United States Patent Application Publication US 2024/0327476 A1 - sequence listing, part 25

SEQ ID NO: 28063 - DNA, 1528 bp, Homo sapiens
  source 1..1528: mol_type = unassigned DNA
tttctgagagaagaaccctgaggaacagacgttccctggcggccctggcgccttcaaacccagacatgctgctgctgctgctgctgctgcccctgctctgggggacaaaggggatggagggagacagacaatatggggatggttacttgctgcaagtgcaggagctggtgacggtgcaggagggcctgtgtgtccatgtgccctgctccttctcctacccccaggatggctggactgactctgacccagttcatggctactggttccgggcaggagacagaccataccaagacgctccagtggccacaaacaacccagacagagaagtgcaggcagagacccagggccgattccaactccttggggacatttggagcaacgactgctccctgagcatcagagacgccaggaagagggataaggggtcatatttctttcggctagagagaggaagcatgaaatggagttacaaatcacagttgaattacaaaactaagcagctgtctgtgtttgtgacagcatccacagccctgggaaatggctcatctctttcagtccttgagggccagtctctgcgcctggtctgtgctgtcaacagcaatccccctgccaggctgagctggacccgggggagcctgaccctgtgcccctcacggtcctcaaaccctgggctgctggagctgcctcgagtgcacgtgagggatgaaggggaattcacctgccgagctcagaacgctcagggctcccagcacatttccctgagcctctccctgcagaatgagggcacaggcacctcaagacctgtatcacaagtgacactggcagcagtcgggggagctggagccacagccctggccttcctgtccttctgcatcatcttcatcatagtgaggtcctgcaggaagaaatcggcaaggccagcagcgggcgtgggggatacaggcatggaagatgcaaaggccatcaggggctcggcctctcagggacccctgactgaatcctggaaagatggcaaccccctgaagaagcctcccccagctgttgccccctcgtcaggggaggaaggagagctccattatgcaaccctcagcttccataaagtgaagcctcaggacccgcagggacaggaggccactgacagtgaatactcggagatcaagatccacaagcgagaaactgcagagactcaggcctgtttgaggaatcacaacccctccagcaaagaagtcagaggctgattctcatagaacaagaaccctctagagccccatgctatgcaatgtgcctggttccccttccgccatgattgtaagtttcctgaggcctcccccgccatgtggaactgtgagtcaattacacctctttcatttataaattactcagtctcaggtatttcttaatagcagtgtgaaaacaggctaacacattgttctttgaaatttaaaaatagcgttagcttttcagttgaatcacgcagctcttacatgtgccatgccatgagtgttgccaaacatgcacccctgtgtaa

SEQ ID NO: 28064 - DNA, 1689 bp, Homo sapiens
  source 1..1689: mol_type = unassigned DNA
agttcctgagagaagaaccctgaggaacagacgttccctcgcggccctggcacctctaaccccagacatgctgctgctgctgctgcccctgctctgggggagggagagggcggaaggacagacaagtaaactgctgacgatgcagagttccgtgacggtgcaggaaggcctgtgtgtccatgtgccctgctccttctcctacccctcgcatggctggatttaccctggcccagtagttcatggctactggttccgggaaggggccaatacagaccaggatgctccagtggccacaaacaacccagctcgggcagtgtgggaggagactcgggaccgattccacctccttggggacccacataccaagaattgcaccctgagcatcagagatgccagaagaagtgatgcggggagatacttctttcgtatggagaaaggaagtataaaatggaattataaacatcaccggctctctgtgaatgtgacagccttgacccacaggcccaacatcctcatcccaggcaccctggagtccggctgcccccagaatctgacctgctctgtgccctgggcctgtgagcaggggacaccccctatgatctcctggatagggacctccgtgtcccccctggacccctccaccacccgctcctcggtgctcaccctcatcccacagccccaggaccatggcaccagcctcacctgtcaggtgaccttccctggggccagcgtgaccacgaacaagaccgtccatctcaacgtgtcctacccgcctcagaacttgaccatgactgtcttccaaggagacggcacagtatccacagtcttgggaaatggctcatctctgtcactcccagagggccagtctctgcgcctggtctgtgcagttgatgcagttgacagcaatccccctgccaggctgagcctgagctggagaggcctgaccctgtgcccctcacagccctcaaacccgggggtgctggagctgccttgggtgcacctgagggatgcagctgaattcacctgcagagctcagaaccctctcggctctcagcaggtctacctgaacgtctccctgcagagcaaagccacatcaggagtgactcagggggtggtcgggggagctggagccacagccctggtcttcctgtccttctgcgtcatcttcgttgtagtgaggtcctgcaggaagaaatcggcaaggccagcagcgggcgtgggagatacgggcatagaggatgcaaacgctgtcaggggttcagcctctcaggggcccctgactgaaccttgggcagaagacagtcccccagaccagcctcccccagcttctgcccgctcctcagtgggggaaggagagctccagtatgcatccctcagcttccagatggtgaagccttgggactcgcggggacaggaggccactgacaccgagtactcggagatcaagatccacagatgagaaactgcagagactcaccctgattgagggatcacagcccctccaggcaagggagaagtcagaggctgattcttgtagaattaacagccctcaacgtgatgagctatgataacactatgaattatgtgcagagtgaaaagcacacaggctttagagtcaaagtatctcaaacctgaatccacactgtgccctcccttttatttttttaactaaaagacagacaaattcct

SEQ ID NO: 28065 - DNA, 1572 bp, Homo sapiens
  source 1..1572: mol_type = unassigned DNA
agttcctgagagaagaaccctgaggaacagacgttccctcgcggccctggcacctctaaccccagacatgctgctgctgctgctgcccctgctctgggggagggagagggcggaaggacagacaagtaaactgctgacgatgcagagttccgtgacggtgcaggaaggcctgtgtgtccatgtgccctgctccttctcctacccctcgcatggctggatttaccctggcccagtagttcatggctactggttccgggaaggggccaatacagaccaggatgctccagtggccacaaacaacccagctcgggcagtgtgggaggagactcgggaccgattccacctccttggggacccacataccaagaattgcaccctgagcatcagagatgccagaagaagtgatgcggggagatacttctttcgtatggagaaaggaagtataaaatggaattataaacatcaccggctctctgtgaatgtgacagccttgacccacaggcccaacatcctcatcccaggcaccctggagtccggctgcccccagaatctgacctgctctgtgccctgggcctgtgagcaggggacaccccctatgatctcctggatagggacctccgtgtcccccctggacccctccaccacccgctcctcggtgctcaccctcatcccacagccccaggaccatggcaccagcctcacctgtcaggtgaccttccctggggccagcgtgaccacgaacaagaccgtccatctcaacgtgtcctacccgcctcagaacttgaccatgactgtcttccaaggagacggcacagtatccacagtcttgggaaatggctcatctctgtcactcccagagggccagtctctgcgcctggtctgtgcagttgatgcagttgacagcaatccccctgccaggctgagcctgagctggagaggcctgaccctgtgcccctcacagccctcaaacccgggggtgctggagctgccttgggtgcacctgagggatgcagctgaattcacctgcagagctcagaaccctctcggctctcagcaggtctacctgaacgtctccctgcagagcaaagccacatcaggagtgactcagggggtggtcgggggagctggagccacagccctggtcttcctgtccttctgcgtcatcttcgttgtagtgaggtcctgcaggaagaaatcggcaaggccagcagcgggcgtgggagatacgggcatagaggatgcaaacgctgtcaggggttcagcctctcagatcttgaatcattttattggatttcctacattccttggactgggtttcgagtttctcctgaatctccgtgatctttgttgccatccagattctgaattctatgtctatcatttcagtcatttcagactcattaagaacattgctggggagatagtgtggtcacttgaaggtaaaatactctggcttttggatgtgtcagatttctttcactggttcttcctcatctgtgtgggctgatgttcctttaatctttgaagttgctgttctttggatagggctctttgcttttatattctctgatg

SEQ ID NO: 28066 - DNA, 2045 bp, Homo sapiens
  source 1..2045: mol_type = unassigned DNA
cgggaagcgcggcggggcctccagaccggggcgggcttaagggtgacatctgcgctttaaagggtccgggtcagctgactcccgactctgtggagtctagctgccagggtcgcggcagctgcggggagagatgactggggagcgacccagcacggcgctcccggacagacgctgggggccgcggattctgggcttctggggaggctgtagggtttgggtgtttgccgcgatcttcctgctgctgtctctggcagcctcctggtccaaggctgagaacgacttcggtctggtgcagccgctggtgaccatggagcaactgctgtgggtgagcgggagacagatcggctcagtggacaccttccgcatcccgctcatcacagccactccgcggggcactcttctcgcctttgctgaggcgaggaaaatgtcctcatccgatgagggggccaagttcatcgccctgcggaggtccatggaccagggcagcacatggtctcctacagcgttcattgtcaatgatggggatgtccccgatgggctgaaccttggggcagtagtgagcgatgttgagacaggagtagtatttcttttctactccctttgtgctcacaaggccggctgccaggtggcctctaccatgttggtatggagcaaggatgatggtgtttcctggagcacaccccggaatctctccctggatattggcactgaagtgtttgcccctggaccgggctctggtattcagaaacagcgggagccacggaagggccgcctcatcgtgtgtggccatgggacgctggagcgggacggagtcttctgtctcctcagcgatgatcatggtgcctcctggcgctacggaagtggggtcagcggcatcccctacggtcagcccaagcaggaaaatgatttcaatcctgatgaatgccagccctatgagctcccagatggctcagtcgtcatcaatgcccgaaaccagaacaactaccactgccactgccgaattgtcctccgcagctatgatgcctgtgatacactaaggccccgtgatgtgaccttcgaccctgagctcgtggaccctgtggtagctgcaggagctgtagtcaccagctccggcattgtcttcttctccaacccagcacatccagagttccgagtgaacctgaccctgcgatggagcttcagcaatggtacctcatggcggaaagagacagtccagctatggccaggccccagtggctattcatccctggcaaccctggagggcagcatggatggagaggagcaggccccccagctctacgtcctgtatgagaaaggccggaaccactacacagagagcatctccgtggccaaaatcagtgtctatgggacactctgagctgtgccactgccacaggggtattctgccttcaggactctgccttcaggaacacgggtctgtagagggtctgctggagacgcctgaaagacagttccatcttcctttagactccagccttggcaaaatcaccttccctttaccagggaaatcacttcctttaggactgaaagctaggcgtcctctcccacaaaaaagtcctgccctcatctgagaatactgtctttccatatggctaagtgtggccccaccaccctctctgccctcccgggacattgattggtcctgtcttgggcaggtctagtgagctgtagaattgaatcaatgtgaactcagggaactggggaaggctgagcctcctctttggtgttgcggtaagataaccgacagggctggtgaaagtccccagatggcaggatatttggtttcagagtaaggactaggtgcaccaccatgactgactatcaatcaaaatgtttgtaacttaaaatttttaatgaaggataatgaatatttgtagagtctctatggttctgtcaatgcacatcttcgtgtctgttttcctcatgtatccttgtgagcctgggtgagttctggggagagacctgatgtgcgtactgcctgtgaaaatctgactttggcaaatcaaatcctcttttccttttga

SEQ ID NO: 28067 - DNA, 2045 bp, Homo sapiens; identical to SEQ ID NO: 28066
  source 1..2045: mol_type = unassigned DNA

SEQ ID NO: 28068 - DNA, 2071 bp, Homo sapiens
  source 1..2071: mol_type = unassigned DNA
gagctacttgaagaccaattagagtccgggaagcgcggcggggcctccagaccggggcgggcttaagggtgacatctgcgctttaaagggtccgggtcagctgactcccgactctgtggagtctagctgccagggtcgcggcagctgcggggagagatgactggggagcgacccagcacggcgctcccggacagacgctgggggccgcggattctgggcttctggggaggctgtagggtttgggtgtttgccgcgatcttcctgctgctgtctctggcagcctcctggtccaaggctgagaacgacttcggtctggtgcagccgctggtgaccatggagcaactgctgtgggtgagcgggagacagatcggctcagtggacaccttccgcatcccgctcatcacagccactccgcggggcactcttctcgcctttgctgaggcgaggaaaatgtcctcatccgatgagggggccaagttcatcgccctgcggaggtccatggaccagggcagcacatggtctcctacagcgttcattgtcaatgatggggatgtccccgatgggctgaaccttggggcagtagtgagcgatgttgagacaggagtagtatttcttttctactccctttgtgctcacaaggccggctgccaggtggcctctaccatgttggtatggagcaaggatgatggtgtttcctggagcacaccccggaatctctccctggatattggcactgaagtgtttgcccctggaccgggctctggtattcagaaacagcgggagccacggaagggccgcctcatcgtgtgtggccatgggacgctggagcgggacggagtcttctgtctcctcagcgatgatcatggtgcctcctggcgctacggaagtggggtcagcggcatcccctacggtcagcccaagcaggaaaatgatttcaatcctgatgaatgccagccctatgagctcccagatggctcagtcgtcatcaatgcccgaaaccagaacaactaccactgccactgccgaattgtcctccgcagctatgatgcctgtgatacactaaggccccgtgatgtgaccttcgaccctgagctcgtggaccctgtggtagctgcaggagctgtagtcaccagctccggcattgtcttcttctccaacccagcacatccagagttccgagtgaacctgaccctgcgatggagcttcagcaatggtacctcatggcggaaagagacagtccagctatggccaggccccagtggctattcatccctggcaaccctggagggcagcatggatggagaggagcaggccccccagctctacgtcctgtatgagaaaggccggaaccactacacagagagcatctccgtggccaaaatcagtgtctatgggacactctgagctgtgccactgccacaggggtattctgccttcaggactctgccttcaggaacacgggtctgtagagggtctgctggagacgcctgaaagacagttccatcttcctttagactccagccttggcaaaatcaccttccctttaccagggaaatcacttcctttaggactgaaagctaggcgtcctctcccacaaaaaagtcctgccctcatctgagaatactgtctttccatatggctaagtgtggccccaccaccctctctgccctcccgggacattgattggtcctgtcttgggcaggtctagtgagctgtagaattgaatcaatgtgaactcagggaactggggaaggctgagcctcctctttggtgttgcggtaagataaccgacagggctggtgaaagtccccagatggcaggatatttggtttcagagtaaggactaggtgcaccaccatgactgactatcaatcaaaatgtttgtaacttaaaatttttaatgaaggataatgaatatttgtagagtctctatggttctgtcaatgcacatcttcgtgtctgttttcctcatgtatccttgtgagcctgggtgagttctggggagagacctgatgtgcgtactgcctgtgaaaatctgactttggcaaatcaaatcctcttttccttttga

SEQ ID NO: 28069 - DNA, 2045 bp, Homo sapiens; identical to SEQ ID NO: 28066
  source 1..2045: mol_type = unassigned DNA

SEQ ID NO: 28070 - DNA, 2045 bp, Homo sapiens; identical to SEQ ID NO: 28066
  source 1..2045: mol_type = unassigned DNA

SEQ ID NO: 28071 - DNA, 2045 bp, Homo sapiens; identical to SEQ ID NO: 28066
  source 1..2045: mol_type = unassigned DNA

SEQ ID NO: 28072 - DNA, 2045 bp, Homo sapiens; identical to SEQ ID NO: 28066
  source 1..2045: mol_type = unassigned DNA

SEQ ID NO: 28073 - DNA, 2045 bp, Homo sapiens
  source 1..2045: mol_type = unassigned DNA
cgggaagcgcggcggggcctccagaccggggcgggcttaagggtgacatctgcgctttaaagggtccgggtcagctgactcccgactctgtggagtctagctgccagggtcgcggcagctgcggggagagatgactggggagcgacccagcacggcgctcccggacagacgctgggggccgcggattctgggcttctggggaggctgtagggtttgggtgtttgccgcgatcttcctgctgctgtctctggcagcctcctggtccaaggctgagaacgacttcggtctggtgcagccgctggtgaccatggagcaactgctgtgggtgagcgggagacagatcggctcagtggacaccttccgcatcccgctcatcacagccactccgcggggcactcttctcgcctttgctgaggcgaggaaaatgtcctcatccgatgagggggccaagttcatcgccctgcggaggtccatggaccagggcagcacatggtctcctacagcgttcattgtcaatgatggggatgtccccgatgggctgaaccttggggcagtagtgagcgatgttgagacaggagtagtatttcttttctactccctttgtgctcacaaggccggctgccaggtggcctctaccatgttggtatggagcaaggatgatggtgtttcctggagcacaccccggaatctctccctggatattggcactgaagtgtttgcccctggaccgggctctggtattcagaaacagcgggagccacggaagggccgcctcatcgtgtgtggccatgggacgctggagcgggacggagtcttctgtctcctcagcgatgatcatggtgcctcctggcgctacggaagtggggtcagcggcatcccctacggtcagcccaagcaggaaaatgatttcaatcctgatgaatgccagccctatgagctcccagatggctcagtcgtcatcaatgcccgaaaccagaacaactaccactgccactgccgaattgtcctccgcagctatgatgcctgtgatacactaaggccccgtgatgtgaccttcgaccctgagctcgtggaccctgtggtagctgcaggagctgtagtcaccagctccggcattgtcttcttctccaacccagcacatccagagttccgagtgaacctgaccctgcgatggagcttcagcaatggtacctcatggcggaaagagacagtccagctatggccaggccccagtggctattcatccctggcaaccctggagggcagcatggatggagaggagcaggccccccagctctacgtcctgtatgagaaaggccggaaccactacacagagagcatctccgtggccaaaatcagtgtctatgggacactctgagctgtgccactgccacaggggtattctgccttcaggactctgccttcaggaacacaggtctgtagagggtctgctggagacgcctgaaagacagttccatcttcctttagactccagccttggcaaaatcaccttccctttaccagggaaatcacttcctttaggactgaaagctaggcgtcctctcccacaaaaaagtcctgccctcatctgagaatactgtctttccatatggctaagtgtggccccaccaccctctctgccctcccgggacattgattggtcctgtcttgggcaggtctagtgagctgtagaattgaatcaatgtgaactcagggaactggggaaggctgagcctcctctttggtgttgcggtaagataaccgacagggctggtgaaagtccccagatggcaggatatttggtttcagagtaaggactaggtgcaccaccatgactgactatcaatcaaaatgtttgtaacttaaaatttttaatgaaggataatgaatatttgtagagtctctatggttctgtcaatgcacatcttcgtgtctgttttcctcatgtatccttgtgagcctgggtgagttctggggagagacctgatgtgcgtactgcctgtgaaaatctgactttggcaaatcaaatcctcttttccttttga

SEQ ID NO: 28074 - DNA, 1143 bp, Homo sapiens
  source 1..1143: mol_type = unassigned DNA
atggcgtcccttcctgtcctgcagaaggagagcgtgttccagtcgggagcccatgcctacagaatccctgccctgctctacctgcctgggcagcagtccctgctggccttcgcggaacagcgggcaagcaagaaggatgagcacgcagagctgattgtcctgcgcagaggagactacgacgcacccacccaccaggttcagtggcaagctcaggaggtggtggcccaggcccggctggatggccaccggtccatgaacccatgccccttgtatgacgcgcagacggggaccctcttcctcttcttcattgccatccctgggcaagtcacggagcaacagcagctgcagaccagggccaatgtgacgcggctgtgccaagtcaccagcactgaccacgggaggacctggagctcccccagagacctcactgatgcggccatcggcccagcctaccgggagtggtccacctttgcagtgggcccggggcattgtttgcagcttcacgacagggcccggagcctggtggtgcccgcctacgcctaccggaaacttcaccccatccaaaggccgatcccctctgccttctgcttcctcagccatgaccatgggcgcacgtgggcgcgagggcactttgtggcccaggacaccctggagtgccaggtggccgaagtcgagactggggagcagagggtggtgaccctcaacgcgagaagccacctccgagccagggtccaggcccagagcaccaatgacgggcttgatttccaggagtctcagctggtgaagaagctggtggagccgccgccccagggctgccaggggagcgtcatcagcttccccagcccccgctcggggcctggctccccagcccagtggctgctctacactcaccccacacactcctggcagagggccgacctgggtgcctacctcaacccgcgacctccagcccctgaggcctggtcagagccggtactgctggccaagggcagctgtgcctactcagacctccagagcatgggcaccggccctgatgggtcccccttgtttgggtgtctgtacgaagccaatgattacgaggagattgtctttctcatgttcaccctgaagcaagccttcccagctgagtacctgcctcagtga

SEQ ID NO: 28075 - DNA, 3519 bp, Homo sapiens
  source 1..3519: mol_type = unassigned DNA
tttccttttattggcgtttgtaaaatttcttctttttaaaattgttatattttagagacagggtctcgctctgtcacccaggctggagtgcagtggtgcaatcacagctcaccacagcctccaactcctgggctcaaggcatcctcccacgtaggccttccaaagcgctgagattgtaggcataagccaccaggcccagcctattacctttacgttgtacttagtcccagataaaaaatgaccttagatcagtcctttcctctttggctggggagaggggggcttaaattccggtactgtgaaacagaagaatggactcagtgctatgtgacaaatctatgtatgtaaatgtgtgtatatacacacacataaattatatatatgaatatattttcattttcatattttgcaaggagagtagccaatgctctggacctctggtcctttttgtagggtaccctctgaggccgggaacctttgctcaactctcaggctgtccagggaagctttaggcggtgataccgagctacagaccaatataagagctcggggctgtggcactgaagagaggaggcggccgttgggaactgaggtgggcccagggcttgagctgagttggcgagggtggaggtggtgccggtcccacgccgtggtggggaccgagctgcgggctggagggaggggcagcgccgagggggcgggacggggagggctcgcggagtaggccaacggttggccccaaccgccactgactacagcctgcgcccgcctcttttcgttgccgttacctgtttccggcagtcgacacgctcttcgcttctcggggcttgtctccgtgtcctccgtctcagttgtttctccctctctatcctcctctgtctcagtctccccagccttggggccggtgcctcttccgggcttcggcgaatgagacctgcggacctgcccccgcgccccatggaagaatccccggcgtccagctctgccccgacagagacggaggagccggggtccagtgcagaggtcatggaagaagtgacaacatgctccttcaacagccctctgttccggcaggaagatgacagagggattacctaccggatcccagccctgctctacataccccccacccacaccttcctggcctttgcagagaagcgttctacgaggagagatgaggatgctctccacctggtgctgaggcgagggttgaggattgggcagttggtacagtgggggcccctgaagccactgatggaagccacactaccggggcatcggaccatgaacccctgtcctgtatgggagcagaagagtggttgtgtgttcctgttcttcatctgtgtgcggggccatgtcacagagcgtcaacagattgtgtcaggcaggaatgctgcccgcctttgcttcatctacagtcaggatgctggatgttcatggagtgaggtgagggacttgactgaggaggtcattggctcagagctgaagcactgggccacatttgctgtgggcccaggtcatggcatccagctgcagtcagggagactggtcatccctgcgtatacctactacatcccttcctggttcttttgcttccagctaccatgtaaaaccaggcctcattctctgatgatctacagtgatgacctaggggtcacatggcaccatggtagactcattaggcccatggttacagtagaatgtgaagtggcagaggtgactgggagggctggccaccctgtgctatattgcagtgcccggacaccaaacaggtgccgggcagaggcgctcagcactgaccatggtgaaggctttcagagactggccctgagtcgacagctctgtgagcccccacatggttgccaagggagtgtggtaagtttccggcccctggagatcccacataggtgccaggactctagcagcaaagatgcacccaccattcagcagagctctccaggcagttcactgaggctggaggaggaagctggaacaccgtcagaatcatggctcttgtactcacacccaaccagtaggaaacagagggttgacctaggtatctatctcaaccagacccccttggaggctgcctgctggtcccgcccctggatcttgcactgtgggccctgtggctactctgatctggctgctctggaggaggagggcttgtttgggtgtttgtttgaatgtgggaccaagcaagagtgtgagcagattgccttccgcctgtttacacaccgggagatcctgagtcacctgcagggggactgcaccagccctggtaggaacccaagccaattcaaaagcaattaattggcttaggacccaatttccatagatgcaaatggcagttacagacaggttaacagaagctactgaagtctacagataatcaaaaaacttaatattctgttccctaccttttttcacttttcctcctccaaagagcaaaatgaaaattttgccttagctactgcagtggaaagagcactgaactaggagttggaagacaaggatgtggtcctggctctgccactggcttgcttttggaccttggatgtgtcacctgaactctctggacctcaggtttccatctgtaaaatgagagtattggttctaagatttctcatcttctcatccctaggacaagcatagtgcctgcatgcttcatgatcagtaagtcctggctgcataaaggactctgatgtcaaaatggaaaccaggggacttaccttttcacatgacttacccctcatccgagtgtgaggttacaagcaggtgtcatggcaggaaggaagaccagatctgtatgatttgttccatttttaataacaaaaatatccacacccttttaataatgctcagttctgtaggctctctatcctagaggaattgagcaaaacagaagaatcatgaagtctcctaccttctacagccttgtagttctgcttaccttctcttcctcatccagaaagcatcattttctagggagaacaatgagaatctcaatgccagtagtactggataatagtgcgtattgcttctggtggcattaccctgatgatgggctgaagttcatttattagggtggttcctgatgggaaaaggacatggattaggactttaaaacactggacagaatttcccacagtctttgccctcaaggagttcaccagtttatggggctagaagagcgagaaaattcaagaaaataaatgtagctggtgggagactttgtagatgttgggctatatgttggggtgatggtagctcctgatgtaattttcttagttgcatcttcaatatgcctggagtcgtctgtccaaggcttgtccaggcttctgggtttctctcaagtttgtttttctcaggatattgtcctggcccagctactcctttacctgtgagaagatcttcaccattaggaagatctctagacccccagatctcagaatcaggcctatttgtgtaggcccatggaaatcactacttgtgaagtagagatgcctttttgtctaa

SEQ ID NO: 28076 - DNA, 2468 bp, Homo sapiens
  source 1..2468: mol_type = unassigned DNA
cccacgtaggccttccaaagcgctgagattgtaggcataagccaccaggcccagcctattacctttacgttgtacttagtcccagataaaaaatgaccttagatcagtcctttcctctttggctggggagaggggggcttaaattccggtactgtgaaacagaagaatggactcagtgctatgtgacaaatctatgtatgtaaatgtgtgtatatacacacacataaattatatatatgaatatattttcattttcatattttgcaaggagagtagccaatgctctggacctctggtcctttttgtagggtaccctctgaggccgggaacctttgctcaactctcaggctgtccagggaagctttaggcggtgataccgagctacagaccaatataagagctcggggctgtggcactgaagagaggaggcggccgttgggaactgagtctccccagccttggggccggtgcctcttccgggcttcggcgaatgagacctgcggacctgcccccgcgccccatggaagaatccccggcgtccagctctgccccgacagagacggaggagccggggtccagtgcagaggtcatggaagaagtgacaacatgctccttcaacagccctctgttccggcaggaagatgacagagggattacctaccggatcccagccctgctctacataccccccacccacaccttcctggcctttgcagagaagcgttctacgaggagagatgaggatgctctccacctggtgctgaggcgagggttgaggattgggcagttggtacagtgggggcccctgaagccactgatggaagccacactaccggggcatcggaccatgaacccctgtcctgtatgggagcagaagagtggttgtgtgttcctgttcttcatctgtgtgcggggccatgtcacagagcgtcaacagattgtgtcaggcaggaatgctgcccgcctttgcttcatctacagtcaggatgctggatgttcatggagtgaggtgagggacttgactgaggaggtcattggctcagagctgaagcactgggccacatttgctgtgggcccaggtcatggcatccagctgcagtcagggagactggtcatccctgcgtatacctactacatcccttcctggttcttttgcttccagctaccatgtaaaaccaggcctcattctctgatgatctacagtgatgacctaggggtcacatggcaccatggtagactcattaggcccatggttacagtagaatgtgaagtggcagaggtgactgggagggctggccaccctgtgctatattgcagtgcccggacaccaaacaggtgccgggcagaggcgctcagcactgaccatggtgaaggctttcagagactggccctgagtcgacagctctgtgagcccccacatggttgccaagggagtgtggtaagtttccggcccctggagatcccacataggtgccaggactctagcagcaaagatgcacccaccattcagcagagctctccaggcagttcactgaggctggaggaggaagctggaacaccgtcagaatcatggctcttgtactcacacccaaccagtaggaaacagagggttgacctaggtatctatctcaaccagacccccttggaggctgcctgctggtcccgcccctggatcttgcactgtgggccctgtggctactctgatctggctgctctggaggaggagggcttgtttgggtgtttgtttgaatgtgggaccaagcaagagtgtgagcagattgccttccgcctgtttacacaccgggagatcctgagtcacctgcagggggactgcaccagccctggtaggaacccaagccaattcaaaagcaattaattggcttaggacccaatttccatagatgcaaatggcagttacagacaggttaacagaagctactgaagtctacagataatcaaaaaacttaatattctgttccctaccttttttcacttttcctcctccaaagagcaaaatgaaaattttgccttagctactgcagtggaaagagcactgaactaggagttggaagacaaggatgtggtcctggctctgccactggcttgcttttggaccttggatgtgtcacctgaactctctggacctcaggtttccatctgtaaaatgagagtattggttctaagatttctcatcttctcatccctaggacaagcatagtgcctgcatgcttcatgatcagtaagtcctggctgcataaaggactctgatgtcaaaatggaaaccaggggacttaccttttcacatgacttacccctcatccgagtgtgaggttacaagcaggtgtcatggcaggaaggaagaccagatctgtatgatttgttccatttttaataacaaaaatatccacacccttttaataatgctcagttctgtaggctctctatcctagaggaattgagcaaaacag

SEQ ID NO: 28077 - DNA, 2049 bp, Homo sapiens
  source 1..2049: mol_type = unassigned DNA
agagaggaggcggccgttgggaactgagtctccccagccttggggccggtgcctcttccgggcttcggcgaatgagacctgcggacctgcccccgcgccccatggaagaatccccggcgtccagctctgccccgacagagacggaggagccggggtccagtgcagaggtcatggaagaagtgacaacatgctccttcaacagccctctgttccggcaggaagatgacagagggattacctaccggatcccagccctgctctacataccccccacccacaccttcctggcctttgcagagaagcgttctacgaggagagatgaggatgctctccacctggtgctgaggcgagggttgaggattgggcagttggtacagtgggggcccctgaagccactgatggaagccacactaccggggcatcggaccatgaacccctgtcctgtatgggagcagaagagtggttgtgtgttcctgttcttcatctgtgtgcggggccatgtcacagagcgtcaacagattgtgtcaggcaggaatgctgcccgcctttgcttcatctacagtcaggatgctggatgttcatggagtgaggtgagggacttgactgaggaggtcattggctcagagctgaagcactgggccacatttgctgtgggcccaggtcatggcatccagctgcagtcagggagactggtcatccctgcgtatacctactacatcccttcctggttcttttgcttccagctaccatgtaaaaccaggcctcattctctgatgatctacagtgatgacctaggggtcacatggcaccatggtagactcattaggcccatggttacagtagaatgtgaagtggcagaggtgactgggagggctggccaccctgtgctatattgcagtgcccggacaccaaacaggtgccgggcagaggcgctcagcactgaccatggtgaaggctttcagagactggccctgagtcgacagctctgtgagcccccacatggttgccaagggagtgtggtaagtttccggcccctggagatcccacataggtgccaggactctagcagcaaagatgcacccaccattcagcagagctctccaggcagttcactgaggctggaggaggaagctggaacaccgtcagaatcatggctcttgtactcacacccaaccagtaggaaacagagggttgacctaggtatctatctcaaccagacccccttggaggctgcctgctggtcccgcccctggatcttgcactgtgggccctgtggctactctgatctggctgctctggaggaggagggcttgtttgggtgtttgtttgaatgtgggaccaagcaagagtgtgagcagattgccttccgcctgtttacacaccgggagatcctgagtcacctgcagggggactgcaccagccctggtaggaacccaagccaattcaaaagcaattaattggcttaggacccaatttccatagatgcaaatggcagttacagacaggttaacagaagctactgaagtctacagataatcaaaaaacttaatattctgttccctaccttttttcacttttcctcctccaaagagcaaaatgaaaattttgccttagctactgcagtggaaagagcactgaactaggagttggaagacaaggatgtggtcctggctctgccactggcttgcttttggaccttggatgtgtcacctgaactctctggacctcaggtttccatctgtaaaatgagagtattggttctaagatttctcatcttctcatccctaggacaagcatagtgcctgcatgcttcatgatcagtaagtcctggctgcataaaggactctgatgtcaaaatggaaaccaggggacttaccttttcacatgacttacccctcatccgagtgtgaggttacaagcaggtgtcatggcaggaaggaagaccagatctgtatgatttgttccatttttaataacaaaaatatccacacccttttaataatgctcagttctgtaggctctctatcctagaggaattgagcaaaacag

SEQ ID NO: 28078 - DNA, 1632 bp, Homo sapiens
  source 1..1632: mol_type = unassigned DNA
cttcgcttctcggggcttgtctccgtgtcctccgtctcagttgtttctccctctctatcctcctctgtctcagtctccccagccttggggccggtgcctcttccgggcttcggcgaatgagacctgcggacctgcccccgcgccccatggaagaatccccggcgtccagctctgccccgacagagacggaggagccggggtccagtgcagtgggggcccctgaagccactgatggaagccacactaccggggcatcggaccatgaacccctgtcctgtatgggagcagaagagtggttgtgtgttcctgttcttcatctgtgtgcggggccatgtcacagagcgtcaacagattgtgtcaggcaggaatgctgcccgcctttgcttcatctacagtcaggatgctggatgttcatggagtgaggtgagggacttgactgaggaggtcattggctcagagctgaagcactgggccacatttgctgtgggcccaggtcatggcatccagctgcagtcagggagactggtcatccctgcgtatacctactacatcccttcctggttcttttgcttccagctaccatgtaaaaccaggcctcattctctgatgatctacagtgatgacctaggggtcacatggcaccatggtagactcattaggcccatggttacagtagaatgtgaagtggcagaggtgactgggagggctggccaccctgtgctatattgcagtgcccggacaccaaacaggtgccgggcagaggcgctcagcactgaccatggtgaaggctttcagagactggccctgagtcgacagctctgtgagcccccacatggttgccaagggagtgtggtaagtttccggcccctggagatcccacataggtgccaggactctagcagcaaagatgcacccaccattcagcagagctctccaggcagttcactgaggctggaggaggaagctggaacaccgtcagaatcatggctcttgtactcacacccaaccagtaggaaacagagggttgacctaggtatctatctcaaccagacccccttggaggctgcctgctggtcccgcccctggatcttgcactgtgggccctgtggctactctgatctggctgctctggaggaggagggcttgtttgggtgtttgtttgaatgtgggaccaagcaagagtgtgagcagattgccttccgcctgtttacacaccgggagatcctgagtcacctgcagggggactgcaccagccctggtaggaacccaagccaattcaaaagcaattaattggcttaggacccaatttccatagatgcaaatggcagttacagacaggttaacagaagctactgaagtctacagataatcaaaaaacttaatattctgttccctaccttttttcacttttcctcctccaaagagcaaaatgaaaattttgccttagctactgcagtggaaagagcactgaactaggagttggaagacaaggatgtggtcctggctctgccactggcttgcttttggaccttggatgtgtcacctgaactctctggacctcaggtttccatctgtaaaatgagagtattggttctaagatttctcatcttctcatccctaggacaagcatag

SEQ ID NO: 28079 - DNA, 6854 bp, Homo sapiens
  source 1..6854: mol_type = unassigned DNA
gcctcgggaggtggtggagtgacctggccccagtgctgcgtccttatcagccgagccggtcccagctcttgctcctgcctgtttgcctggaaatggccacgcttctccttctccttggggtgctggtggtaagcccagacgctctggggagcacaacagcagtgcagacacccacctccggagagcctttggtctctactagcgagcccctgagctcaaagatgtacaccacttcaataacaagtgaccctaaggccgacagcactggggaccagacctcagccctacctccctcaacttccatcaatgagggatcccctctttggacttccattggtgccagcactggttcccctttacctgagccaacaacctaccaggaagtttccatcaagatgtcatcagtgccccaggaaacccctcatgcaaccagtcatcctgctgttcccataacagcaaactctctaggatcccacaccgtgacaggtggaaccataacaacgaactctccagaaacctccagtaggaccagtggagcccctgttaccacggcagctagctctctggagacctccagaggcacctctggaccccctcttaccatggcaactgtctctctggagacttccaaaggcacctctggaccccctgttaccatggcaactgactctctggagacctccactgggaccactggaccccctgttaccatgacaactggctctctggagccctccagcggggccagtggaccccaggtctctagcgtaaaactatctacaatgatgtctccaacgacctccaccaacgcaagcactgtgcccttccggaacccagatgagaactcacgaggcatgctgccagtggctgtgcttgtggccctgctggcggtcatagtcctcgtggctctgctcctgctgtggcgccggcggcagaagcggcggactggggccctcgtgctgagcagaggcggcaagcgtaacggggtggtggacgcctgggctgggccagcccaggtccctgaggagggggccgtgacagtgaccgtgggagggtccgggggcgacaagggctctgggttccccgatggggaggggtctagccgtcggcccacgctcaccactttctttggcagacggaagtctcgccagggctccctggcgatggaggagctgaagtctgggtcaggccccagcctcaaaggggaggaggagccactggtggccagtgaggatggggctgtggacgccccagctcctgatgagcccgaagggggagacggggctgccccttaagtgtcggtgaatagtgaggctggaggccggaatctcagccagcctccagcaccttccctctcaccatcccactgccccctcgctcccatgtttccacccggcaccctgatcctcacccgaatctcctttttttttttcttttgagacagagtttcgctttgtcgcccaggctggagtgcaatgcacgatctcagttcactgcaacctctgcctcctaagttcaggcgattctcctgcctcagcttcccgagtaactgagattacaggcacccaccaccatgcccagctgcttttttgtatttttggtagagatggggtttcaccatgttggctaggctggtctcaaactcctgacctcaggtgatctacctgcctcagcctcccaaagtgctgagattacagacatgagcctccgcgccttgcctcctcacccacctcttcactctgaatcctcatgaggcttctcagccctggatttcctgctgccatcctcacccagcacccacaactagcgcctgggcagggcagggctggcacctctcaacgtctgtggactgaatgaataaaccctcctcatccacccctatttatctccatcaccatttccccctctttcttgttcctggaaacggctgctgagtctccatcggccaaacttatctgccctgtgatttctttgacaattctccttttcccccagaacccaccctgggttgaccagagtctgggaagaaggacaagagaacccggcaaactccctcctaggattaactttgtaaagcacccttgccctgtagctgcaagggctgtggaacctgggcagcccgcaaccacctttagctctgggccccccaggccagcctggagcatggctgggtggggccaccagcccatgctctcaggcgggcctgtgatctttcccagggcacatggactgtaggctggccctggcccacaccaccacactctccccagccatggacagaggcagccagaggcctcacggtttctcctccgagtttctggctgggtgtagttctcagaaaccccagtgcctgcgtgtgtccactcgtgggtgtggtttgtgtgcaagagctgaggatttggcgatgcttgggaggggtagttgtgggtacagacggtgtgggggtgggaagtggtgcagagactgaagagggtcaacctgggcatgggggacacagggactgctgagaacgtgcgtgtcatctttgctctgatggggtggacatagcagaaaatctaactctgtctgtagccccatacagaatgccagggtgagcacagtggctggtgcctttaatcccagcactttggaaagttgaggcaggaggatcgcttgagcccaggagttcgagtctgaagtgagctgtgattgcaccactgcacttcagcctgggcaacagagtgagcccctgtctcaaaaaagaaaagaaaaagaaagccaggcttcatggaaagatcgtatgtgtgacccaaatatgagttcttcagctcagccatggtaatcccttccttgaagtctccatttctgcagtacacatgcatgtgcgctctctctctctctctctctctcacacacacacacacacacacacacacacgcgcgcgcgcgcgcgctctcctgcgaacagaggcagggggagaggggtttgccctggtctcggggactggtctggctggcgcttccccactgcacgtttccaggtttagtttgtctgtgtctcctcttccatcccaggggctgagccccttccatcctccaagaggaaccagtgagagtgagtgaaggaggggcctggagccagggacttcccctgtggggcctgggtggagaggggagaactcaatggtgctgcctttgagaccagcccaggctacagcccaggagcacacatgggccagggcagttggtatttcccgaggacaaagaggaaattttcaaagaggaagttgttgagttagagcttgcggtggctgagagcagacaggttgacctgcaaaaaaagacaggggaggcatgtgagtgtgacagccctgctctgtggcctgggcaggagatgggggaaagggtcaggtgggggatgggctcgtgcagtgggagaggagacggagggagggagcgggaaggggcttgcttagtgggtgggaagagctgagctcggatggaaccagcttctaccagccaggctgggcacccactgggctgcatctggtggccttttctgattgctatttggactcactgcagctgcagaatgacagaggccatgtccaaaatcccttagagacactgttgtcttagagttgttaaaataagagcccccatatcaggtttagaaaatactgtcaccgaacgaacgtcgctgtcctcagctccacctccctttcctttgacagatatggttgttttctaagccaggactggttttagtcaggtcctgggcgaatcctgaaaaaaagaggtagtacgggtaaggaaggcacccaacagggctttcacaatccagaaaatatcaaaatataagtgttaaaagagaggcacaggccgggtgcggtggctcacgcctgtaatctcagcactttgggaggccaaggtgggcagatcatgaggtcaggagtttgagaccagcctggccaatatgatgaaaccccgtttctactaaaaatacaaaagttagccaggcatggtggtgtgctcctgtaatcccagctacttaggaggctgaggccagagaattgcttgaaccctggagtcagaggttgcagtgagccgggatcatgccactgtactccaggctgggtgacaaagtgagactgtctcaaaaaataaaaataaataaaataaataaaagagaggcacaaacagtgttatgaatgcaccaaggaaaatggtgcattcataactctcaggtgaagcctaccaagccatgcgtgtgtgcacatatgtgtgtacgtgtgcatgtgcgtgcgtgcatgtgcgtgcgtgcatgtgcctgtgtgtgtatgtgtgcacatgtgtgtgcgcatgtgtgtgtgtgcgcgcatgtgtgtgtgcatgcatgttctcccatgcatgtgtactgtggcaagggagactttgaggaagagattccagtggctgagcagaagggctcgcattgccctggcgaaaggttggaaggcttcacctgagagtgtgtcgtggcctttgtcatatccactgcttgattcctttctttaaaaattatttttattgttttctacatatgagaaccaccacacctggctaatttttgtattttttgtagagatggggtttcaccatgttgtcccggctggtctcaaactcccgggcacaagagatccacctgcctcagcctcccaaaatgctgggactataggcatgagccactgcacccagccactgcttcattcctggtggctgctgtgcctggcatgttgcagatcctccatgaatatgcatttgaatgaatgaatgaatgaatgaatgaatgaatggagatgacgcctcagagattctttcttttgagatgaggtctcattctgtcacccagactagagggcagtggtgcaatcacagctcaccacagcctcaacctcctgggcctcccaagtagctgcgatcacaggtgtgcaccaacatgcccagctaatttttttttttaatttttaatttgtacagacagggtcttgctgtgttgcccaggctggtctcaaactcctgggctcaagtggtcctcccacctaagcttccccaaatactgggattataggtgtgagccactgtgcccaggcttgcctcagatatttgaaggctgggaaggattttgcaaagctgggaaaaggaaaaggcattcccagcagaggggatagcaggtggaaatacataattaaaaaaaaaaaacgtggagcagatccagcgcagtggctcatgcctgtaatcccagcactttgggaggcagagcagggaggattgcttgagtctaggagttcaagaccagcctgggtaacatagaaagaccctgtctctacaaaaacacaaaaaattagccaggcgtggtggtgcatgcctgtagtaccagctacttgagaagctgaggcaggaggactgcttgaagccaggagtttgagaccagcctgggcaacatagtgagaccccgtgtctacaaaaagtaaacatttatatatatattttttaaagtggagcagttcaatatagagtcttttttgaacaaacgtgaaatagatgtcttttttttttttttgagatggagttttcactcttgttacccaggctggagtgcaatggcgtgatcttggctcaccagaacctccgcctcctgggttcaaacaattctcctgcctcagcctcccaggtagctgggattacaggcatgcaccaccaaacccggataattttgtatttttagtagagatggggtttcaccatgttggtcaagctggtcttgaactcccgacctctgctgatccgtatgcctcggcctcccaaagtgctgggattacatgcgtgagccaccgtgcccgacaatagatgtcttttaattttctggaggaaaaagcaaagcaaaagaagcagtggatattttaagactaaaaaggaaaacaaaaaaaggagatagagcaggccagacgtggtggctcaacgtctgtaatcccagcactttgggaggccgaggcaggtggatcacctgaggtcaggagttcaagaccagcctgaccaacatggtgaaaccctgtttcaaaatacaaaaaattagctgggcgtggtggcgggcacctgtaatcccagctacttgggaggctgaggcaggagaatcccttgaacccaggaggtggaggttgcagtgagccgagatcacgccattgcactccagcctgggcgacaagtaaaaaactccatctcaaaaaaaaaaaaggagatagagcaaggaacagtaagaaaatagttgggtgcagtggctatgcggtggcactataggaggctgaggcgggcagatcacctgaggtcaggagttggagaccagcctgggcaacatagacccctatctctacaaaaaatttgaaatatgaaaaattagccaggtgtagtggtgtgcgcctgtggtaccagctactcaagaggcgaaggcagggaagattgcttgagcccaggagtttgaggctatagtgagctgtgatcatgccactgcactccagcctgggcaatagtgtgagactctgtctcaaaagaaagaacatggccaggcgtggtggctcacacctgtaatcccagcactttgggaggccgaggcagtcagatcatgaggccagtttgaaaccagcctggccaacatggtgaaaccctgtctctactaaaaatacaaaaattagccaggcgtggtggcatgcccccgtaatcccagctacttgggggtctgaggcagaagaattgcttgaaaccgggaggcagaggttgcagtgagccgagatcgtgtcattgcactctagtctgggcgacagagcaagactccgtcttgg

SEQ ID NO: 28080 - DNA, 1935 bp, Homo sapiens
  source 1..1935: mol_type = unassigned DNA
cctctgagcccagccctccctagcatcaccacttccatcccattcctcagccaagagccaggaatcctgattccagatcccacgcttccctgcctccctcaggtcccagctcttgctcctgcctgtttgcctggaaatggccacgcttctccttctccttggggtgctggtggtaagcccagacgctctggggagcacaacagcagtgcagacacccacctccggagagcctttggtctctactagcgagcccctgagctcaaagatgtacaccacttcaataacaagtgaccctaaggccgacagcactggggaccagacctcagccctacctccctcaacttccatcaatgagggatcccctctttggacttccattggtgccagcactggttcccctttacctgagccaacaacctaccaggaagtttccatcaagatgtcatcagtgccccaggaaacccctcatgcaaccagtcatcctgctgttcccataacagcaaactctctaggatcccacaccgtgacaggtggaaccataacaacgaactctccagaaacctccagtaggaccagtggagcccctgttaccacggcagctagctctctggagacctccagaggcacctctggaccccctcttaccatggcaactgtctctctggagacttccaaaggcacctctggaccccctgttaccatggcaactgactctctggagacctccactgggaccactggaccccctgttaccatgacaactggctctctggagccctccagcggggccagtggaccccaggtctctagcgtaaaactatctacaatgatgtctccaacgacctccaccaacgcaagcactgtgcccttccggaacccagatgagaactcacgaggcatgctgccagtggctgtgcttgtggccctgctggcggtcatagtcctcgtggctctgctcctgctgtggcgccggcggcagaagcggcggactggggccctcgtgctgagcagaggcggcaagcgtaacggggtggtggacgcctgggctgggccagcccaggtccctgaggagggggccgtgacagtgaccgtgggagggtccgggggcgacaagggctctgggttccccgatggggaggggtctagccgtcggcccacgctcaccactttctttggcagacggaagtctcgccagggctccctggcgatggaggagctgaagtctgggtcaggccccagcctcaaaggggaggaggagccactggtggccagtgaggatggggctgtggacgccccagctcctgatgagcccgaagggggagacggggctgccccttaagtgtcggtgaatagtgaggctggaggccggaatctcagccagcctccagcaccttccctctcaccatcccactgccccctcgctcccatgtttccacccggcaccctgatcctcacccgaatctcctttttttttttcttttgagacagagtttcgctttgtcgcccaggctggagtgcaatgcacgatctcagttcactgcaacctctgcctcctaagttcaggcgattctcctgcctcagcttcccgagtaactgagattacaggcacccaccaccatgcccagctgcttttttgtatttttggtagagatggggtttcaccatgttggctaggctggtctcaaactcctgacctcaggtgatctacctgcctcagcctcccaaagtgctgagattacagacatgagcctccgcgccttgcctcctcacccacctcttcactctgaatcctcatgaggcttctcagccctggatttcctgctgccatcctcacccagcacccacaactagcgcctgggcagggcagggctggcacctctcaacgtctgtggactgaatgaataaaccctcctcatccacccctatttatctcca

SEQ ID NO: 28081 - DNA, 1197 bp, Homo sapiens
  source 1..1197: mol_type = unassigned DNA
cctttccccttggggccctgtccttcccagtcttgccccagcctcgggaggtggtggagtgacctggccccagtgctgcgtccttatcagccgagccggtcccagctcttgctcctgcctgtttgcctggaaatggccacgcttctccttctccttggggtgctggtggtaagcccagacgctctggggagcacaacagcagtgcagacacccacctccggagagcctttggtctctactagcgagcccctgagctcaaagatgtacaccacttcaataacaagtgaccctaaggccgacagcactggggaccagacctcagccctacctccctcaacttccatcaatgagggatcccctctttggacttccattggtgccagcactggttcccctttacctgagccaacaacctaccaggaagtttccatcaagatgtcatcagtgccccaggaaacccctcatgcaaccagtcatcctgctgttcccataacagcaaactctctaggatcccacaccgtgacaggtggaaccataacaacgaactctccagaaacctccagtaggaccagtggagcccctgttaccacggcagctagctctctggagacctccagaggcacctctggaccccctcttaccatggcaactgtctctctggagacttccaaaggcacctctggaccccctgttaccatggcaactgactctctggagacctccactgggaccactggaccccctgttaccatgacaactggctctctggagccctccagcggggccagtggaccccaggtctctagcgtaaaactatctacaatgatgtctccaacgacctccaccaacgcaagcactgtgcccttccggaacccagatgagaactcacgaggcatgctgccagtggctgtgcttgtggccctgctggcggtcatagtcctcgtggctctgctcctgctgtggcgccggcggcagaagcggcggactggggccctcgtgctgagcagaggcggcaagcgtaacggggtggtggacgcctgggctgggccagcccaggtccctgaggagggggccgtgacagtgaccgtgggagggtccgggggcgacaagggctctgggttccccgatggggaggggtctagccgtcggcccacgctcaccactttctttggcagacggaagtctcgccagggctcc

SEQ ID NO: 28082 - DNA, 1656 bp, Homo sapiens
  source 1..1656: mol_type = unassigned DNA
ctccgaggccgtgagcgcaaagcctcaggccccggctccctcctgagctgcgccgtgccaggccgcccgccgggatgcagtgggccgtgggccggcggtgggcgtgggccgcgctgctcctggctgtcgcagcggtgctgacccaggtcgtctggctctggctgggtacgcagagcttcgtcttccagcgcgaagagatagcgcagttggcgcggcagtacgctgggctggaccacgagctggccttctctcgtctgatcgtggagctgcggcggctgcacccaggccacgtgctgcccgacgaggagctgcagtgggtgttcgtgaatgcgggtggctggatgggcgccatgtgccttctgcacgcctcgctgtccgagtatgtgctgctcttcggcaccgccttgggctcccgcggccactcggggcgctactgggctgagatctcggataccatcatctctggcaccttccaccagtggagagagggcaccaccaaaagtgaggtcttctacccaggggagacggtagtacacgggcctggtgaggcaacagctgtggagtgggggccaaacacatggatggtggagtacggccggggcgtcatcccatccaccctggccttcgcgctggccgacactgtcttcagcacccaggacttcctcaccctcttctatactcttcgctcctatgctcggggcctccggcttgagctcaccacctacctctttggccaggacccttgaccagccaggcctgaaggaagacctgcggatagacaggagcgggcaggcccgcacatatccacttgctggagcccatgtttacagacagggacatacaccatgcagatcctgagttcctgctgtatgagcagggatatccatgcttatgtatccaaacacagagacccatgggaacaaatgagacacatatagatactgagacctgtgtgtacagtaggaccatgcactcacacccatctggagagggagcccccggtataccaagggagccagttgtgttcagacacacacatcacagcttgactcactaactgaggcctttccatagctccacagcttcccacctcctccccaccaaaccggggttctagagttaaggatgggggagggtattatactgcctcagtctgactcctcaacccagcagcaatttgaggggatgagggggaagaggagctgccttttggaggcccccttcacctgcagctatgatgcccttccccttctcccctgtcctcaccatatgccttatccccattctactcccctgctatgcaagtgcccctgtggcttgtccccaaccccctcagcaacaaagctcagctggggaacgagagtaatttgaagaatgcttgaagtcagcgtcttccattccagaaagacccccattcttcctttgggggtatgatgtggaagctggtttcagcccaggacccaccactgaggagaggatctagacaggtgggcctaattccaaggggcccttcctggcctggagaaggccttttacacacacacaacacatacacacacacacacacacacacatatcacagttttcacacagcccctgctgcattctctgtccatctgtctgtttctattaataaagatttgttgatctgttcca

SEQ ID NO: 28083 - DNA, 1479 bp, Homo sapiens
  source 1..1479: mol_type = unassigned DNA
atgcagtgggccgtgggccggcggtgggcgtgggccgcgctgctcctggctgtcgcagcggtgctgacccaggtcgtctggctctggctggggctggaccacgagctggccttctctcgtctgatcgaggagctgcagtgggtgttcgtgaatgcgggtggctggatgggcgccatgtgccttctgcacgcctcgctgtccgagtatgtgctgctcttcggcaccgccttgggctcccgcggccactcggggcgctactgggctgagatctcggataccatcatctctggcaccttccaccagtggagagagggcaccaccaaaagtgaggtcttctacccaggggagacggtagtacacgggcctggtgaggcaacagctgtggagtgggggccaaacacatggatggtggagtacggccggggcgtcatcccatccaccctggccttcgcgctggccgacactgtcttcagcacccaggacttcctcaccctcttctatactcttcgctcctatgctcggggcctccggcttgagctcaccacctacctctttggccaggacccttgaccagccaggcctgaaggaagacctgcggatagacaggagcgggcaggcccgcacatatccacttgctggagcccatgtttacagacagggacatacaccatgcagatcctgagttcctgctgtatgagcagggatatccatgcttatgtatccaaacacagagacccatgggaacaaatgagacacatatagatactgagacctgtgtgtacagtaggaccatgcactcacacccatctggagagggagcccccggtataccaagggagccagttgtgttcagacacacacatcacagcttgactcactaactgaggcctttccatagctccacagcttcccacctcctccccaccaaaccggggttctagagttaaggatgggggagggtattatactgcctcagtctgactcctcaacccagcagcaatttgaggggatgagggggaagaggagctgccttttggaggcccccttcacctgcagctatgatgcccttccccttctcccctgtcctcaccatatgccttatccccattctactcccctgctatgcaagtgcccctgtggcttgtccccaaccccctcagcaacaaagctcagctggggaacgagagtaatttgaagaatgcttgaagtcagcgtcttccattccagaaagacccccattcttcctttgggggtatgatgtggaagctggtttcagcccaggacccaccactgaggagaggatctagacaggtgggcctaattccaaggggcccttcctggcctggagaaggccttttacacacacacaacacatacacacacacacacacacacacatatcacagttttcacacagcccctgctgcattctctgtccatctgtctgtttctattaataaagatttgttgatctgttcc

SEQ ID NO: 28084 - DNA, 1743 bp, Homo sapiens
  source 1..1743: mol_type = unassigned DNA
ctcctgagctgcgccgtgccaggccgcccgccgggatgcagtgggccgtgggccggcggtgggcgtgggccgcgctgctcctggctgtcgcagcggtgctgacccaggtcgtctggctctggctgggtacgcagagcttcgtcttccagcgcgaagagatagcgcagttggcgcggcagtacgctggtgagcgggcagagggcagggaggggagcggccggcctgggagcggagcctagggttccgaaggcgccatccccggacctaggaccggtgccagccctgactccgccgcccctctgcctccgccagggctggaccacgagctggccttctctcgtctgatcgtggagctgcggcggctgcacccaggccacgtgctgcccgacgaggagctgcagtgggtgttcgtgaatgcgggtggctggatgggcgccatgtgccttctgcacgcctcgctgtccgagtatgtgctgctcttcggcaccgccttgggctcccgcggccactcggggcgctactgggctgagatctcggataccatcatctctggcaccttccaccagtggagagagggcaccaccaaaagtgaggtcttctacccaggggagacggtagtacacgggcctggtgaggcaacagctgtggagtgggggccaaacacatggatggtggagtacggccggggcgtcatcccatccaccctggccttcgcgctggccgacactgtcttcagcacccaggacttcctcaccctcttctatactcttcgctcctatgctcggggcctccggcttgagctcaccacctacctctttggccaggacccttgaccagccaggcctgaaggaagacctgcggatagacaggagcgggcaggcccgcacatatccacttgctggagcccatgtttacagacagggacatacaccatgcagatcctgagttcctgctgtatgagcagggatatccatgcttatgtatccaaacacagagacccatgggaacaaatgagacacatatagatactgagacctgtgtgtacagtaggaccatgcactcacacccatctggagagggagcccccggtataccaagggagccagttgtgttcagacacacacatcacagcttgactcactaactgaggcctttccatagctccacagcttcccacctcctccccaccaaaccggggttctagagttaaggatgggggagggtattatactgcctcagtctgactcctcaacccagcagcaatttgaggggatgagggggaagaggagctgccttttggaggcccccttcacctgcagctatgatgcccttccccttctcccctgtcctcaccatatgccttatccccattctactcccctgctatgcaagtgcccctgtggcttgtccccaaccccctcagcaacaaagctcagctggggaacgagagtaatttgaagaatgcttgaagtcagcgtcttccattccagaaagacccccattcttcctttgggggtatgatgtggaagctggtttcagcccaggacccaccactgaggagaggatctagacaggtgggcctaattccaaggggcccttcctggcctggagaaggccttttacacacacacaacacatacacacacacacacacacacacatatcacagttttcacacagcccctgctgcattctctgtccatctgtctgtttctattaataaagatttgttgatctgttcca

SEQ ID NO: 28085 - DNA, 840 bp, Homo sapiens
  source 1..840: mol_type = unassigned DNA
ggcggtggcgggggagcgcttcgtgggcagccggcgggctccgaggccgtgagcgcaaagcctcaggccccggctccctcctgagctgcgccgtgccaggccgcccgccgggatgcagtgggccgtgggccggcggtgggcgtgggccgcgctgctcctggctgtcgcagcggtgctgacccaggtcgtctggctctggctgggtacgcagagcttcgtcttccagcgcgaagagatagcgcagttggcgcggcagtacgctgggctggaccacgagctggccttctctcgtctgatcgtggagctgcggcggctgcacccaggccacgtgctgcccgacgaggagctgcagtgggtgttcgtgaatgcgggtggctggatgggcgccatgtgccttctgcacgcctcgctgtccgagtatgtgctgctcttcggcaccgccttgggctcccgcggccactcgggggagacggtagtacacgggcctggtgaggcaacagctgtggagtgggggccaaacacatggatggtggagtacggccggggcgtcatcccatccaccctggccttcgcgctggccgacactgtcttcagcacccaggacttcctcaccctcttctatactcttcgctcctatgctcggggcctccggcttgagctcaccacctacctctttggccaggacccttgaccagccaggcctgaaggaagacctgcggatagacaggagcgggcaggcccgcacatatccacttgctggagcccatgtttacagacagggacatacaccatgcagatcctgagttcctgctgtatgagcagggatatccatgcttatgt

SEQ ID NO: 28086 - DNA, 3148 bp, Homo sapiens
  source 1..3148: mol_type = unassigned DNA
gcacacctccccgcgccgccgccgccaccgcccgcactccgccgcctctgcccgcaaccgctgagccatccatgggggtcgcgggccgcaaccgtcccggggcggcctgggcggtgctgctgctgctgctgctgctgccgccactgctgctgctggcgggggccgtcccgccgggtcggggccgtgccgcggggccgcaggaggatgtagatgagtgtgcccaagggctagatgactgccatgccgacgccctgtgtcagaacacacccacctcctacaagtgctcctgcaagcctggctaccaaggggaaggcaggcagtgtgaggacatcgatgaatgtggaaatgagctcaatggaggctgtgtccatgactgtttgaatattccaggcaattatcgttgcacttgttttgatggcttcatgttggctcatgacggtcataattgtcttgatgtggacgagtgcctggagaacaatggcggctgccagcatacctgtgtcaacgtcatggggagctatgagtgctgctgcaaggaggggtttttcctgagtgacaatcagcacacctgcattcaccgctcggaagagggcctgagctgcatgaataaggatcacggctgtagtcacatctgcaaggaggccccaaggggcagcgtcgcctgtgagtgcaggcctggttttgagctggccaagaaccagagagactgcatcttgacctgtaaccatgggaacggtgggtgccagcactcctgtgacgatacagccgatggcccagagtgcagctgccatccacagtacaagatgcacacagatgggaggagctgccttgagcgagaggacactgtcctggaggtgacagagagcaacaccacatcagtggtggatggggataaacgggtgaaacggcggctgctcatggaaacgtgtgctgtcaacaatggaggctgtgaccgcacctgtaaggatacttcgacaggtgtccactgcagttgtcctgttggattcactctccagttggatgggaagacatgtaaagatattgatgagtgccagacccgcaatggaggttgtgatcatttctgcaaaaacatcgtgggcagttttgactgcggctgcaagaaaggatttaaattattaacagatgagaagtcttgccaagatgtggatgagtgctctttggataggacctgtgaccacagctgcatcaaccaccctggcacatttgcttgtgcttgcaaccgagggtacaccctgtatggcttcacccactgtggagacaccaatgagtgcagcatcaacaacggaggctgtcagcaggtctgtgtgaacacagtgggcagctatgaatgccagtgccaccctgggtacaagctccactggaataaaaaagactgtgtggaagtgaaggggctcctgcccacaagtgtgtcaccccgtgtgtccctgcactgcggtaagagtggtggaggagacgggtgcttcctcagatgtcactctggcattcacctctcttcaggactgcaaggggcctactctgtcacctgtggctcttcctctcctctcaggaacaaacaacaaaaatcaaatgactctgcttttggggatgtcaccaccatcaggacaagtgtaacctttaagctaaatgaaggcaagtgtagtttgaaaaatgctgagctgtttcccgagggtctgcgaccagcactaccagagaagcacagctcagtaaaagagagcttccgctacgtaaaccttacatgcagctctggcaagcaagtcccaggagcccctggccgaccaagcacccctaaggaaatgtttatcactgttgagtttgagcttgaaactaaccaaaaggaggtgacagcttcttgtgacctgagctgcatcgtaaagcgaaccgagaagcggctccgtaaagccatccgcacgctcagaaaggccgtccacagggagcagtttcacctccagctctcaggcatgaacctcgacgtggctaaaaagcctcccagaacatctgaacgccaggcagagtcctgtggagtgggccagggtcatgcagaaaaccaatgtggtctgtgtcaacctggtgaatattctgcagatggctttgcaccttgccatctctgtgccctgggcacgttccagcctgaagctggtcgaacttcctgcttcccctgtggaggaggccttgccaccaaacatcagggagctacttcctttcaggactgtgaaaccagagttcaatgttcacctggacatttctacaacaccaccactcaccgatgtattcgttgcccagtgggaacataccagcctgaatttggaaaaaataattgtgtttcttgcccaggaaatactacgactgactttgatggctccacaaacataacccagtgtaaaaacagaagatgtggaggggagctgggagatttcactgggtacattgaatccccaaactacccaggcaattacccagccaacaccgagtgtacgtggaccatcaacccaccccccaagcgccgcatcctgatcgtggtccctgagatcttcctgcccatagaggacgactgtggggactatctggtgatgcggaaaacctcttcatccaattctgtgacaacatatgaaacctgccagacctacgaacgccccatcgccttcacctccaggtcaaagaagctgtggattcagttcaagtccaatgaagggaacagcgctagagggttccaggtcccatacgtgacatatgatgaggactaccaggaactcattgaagacatagttcgagatggcaggctctatgcatctgagaaccatcaggaaatacttaaggataagaaacttatcaaggctctgtttgatgtcctggcccatccccagaactatttcaagtacacagcccaggagtcccgagagatgtttccaagatcgttcatccgattgctacgttccaaagtgtccaggtttttgagaccttacaaatgactcagcccacgtgccactcaatacaaatgttctgctatagggttggtgggacagagctgtcttccttctgcatgtcagcacagtcgggtattgctgcctcccgtatcagtgactcattagagttcaatttttatagataatacagatattttggtaaattg

SEQ ID NO: 28087 - DNA, 2258 bp, Homo sapiens
  source 1..2258: mol_type = unassigned DNA
ggccggtcggtcgggtccccgcgccccgcacgcccgcacgcccagcggggcccgcattgagcatgggcgcggcggccgtgcgctggcacttgtgcgtgctgctggccctgggcacacgcgggcggctggccgggggcagcgggctcccagggtcagtcgacgtggatgagtgctcagagggcacagatgactgccacatcgatgccatctgtcagaacacgcccaagtcctacaaatgcctctgcaagccaggctacaagggggaaggcaagcagtgtgaagacattgacgagtgtgagaatgactactacaatgggggctgtgtccacgagtgcatcaacatcccggggaactacaggtgtacctgctttgatggcttcatgctggcacacgatggacacaactgcctggatgtggacgagtgtcaggacaataatggtggctgccagcagatctgcgtcaatgccatgggcagctacgagtgtcagtgccacagtggcttcttccttagtgacaaccagcatacctgcatccaccgctccaatgagggtatgaactgcatgaacaaagaccatggctgtgcccacatctgccgggagacgcccaaaggtggggtggcctgcgactgcaggcccggctttgaccttgcccaaaaccagaaggactgcacactaacctgtaattatggaaacggaggctgccagcacagctgtgaggacacagacacaggccccacgtgtggttgccaccagaagtacgccctccactcagacggtcgcacgtgcatcgagaaggatgaggctgcaattgagcgctctcagttcaatgccacgtcagtagctgatgtggacaagcgggtgaaacggcggctactcatggagacgtgcgcagtcaataacggaggctgcgaccggacatgcaaggacacagccactggcgtgcgatgcagctgccccgttggattcacactgcagccggacgggaagacatgcaaaggtcagcatgtggagctgtgtgggtgcccctgcctgtactggcctggccaagagcctccgtgtgcttgcatagccgggcccagggctgggctgaacgggggccacgtgtagctgtgggaaaggacacgtggcaatcatttgctttgctgttggagaggccaggaagagggagggctggccagcagcagggtccccagcagagttcgagagaacacaggtcccacggcacatcagcaggttcctgggccaaaaaggcactgatgtcagagaatttggctgcacgctgggttaaacagttaagccagcgtctctactgtgggacttcctgggccctcagtgatagtgtggcttcccaaggcgcgtagaatgtagcgcgtttccgaaccccttgacctttggttgcagtgggtcttgcagagctgatggggacagtctggtgttgggccatctgggacacacaggtctactcatgccaggaaaaataaggacagtgtgtcactactaggggggcgaggctagggggatcccatctgaaaagataaggactcaggacttctgcttgccatcagaaaatgaggagtcaggaagacctgagagtgactggttgaaggaaggagggacagggctggcctgctggtggctggcagtgagggaaggcagaggtgtatcctcccacttgtcccctgagtcaccccacaaagacttactgagtacctcctgggttgaggggaccctcaggaaacaggaagcccagggagctgggagaggagagctgggtgggctctcgagacagccctgcagatgaggaggtccagctacccccaaaggacagacggagccccaagaagctgtgggccctggggcagggtgttaggcctgagtgccggagccctctgtgcagaagggtgaggggcagtgctcagtgcccccagcatcactccagaccaccctccaaacgcccccaccccagcgctgggcagtacccccacactctgccaggaagggagagcctagagagcagggcgtggaggggagaggaactggaacttccaaagtcccatcggggaaaatattgaaagtggaggttagggtgacttaaaatagcttgaggtggactttttttaagcctgtaaaaataaatgtatttttgtacagtgtatgacttcttccttgccaacttgctgggaagaaccgagtgattattgacagaaataacagtgcttccgcctgtttatttgaaaataaagcccttctgtggccacc

SEQ ID NO: 28088 - DNA, 3868 bp, Homo sapiens
  source 1..3868: mol_type = unassigned DNA
ggctgggcggctcgggagcccgagcggtggcggagcggcgagcagcgagcagcgcctgcgggagcggccggtcggtcgggtccccgcgccccgcacgcccgcacgcccagcggggcccgcattgagcatgggcgcggcggccgtgcgctggcacttgtgcgtgctgctggccctgggcacacgcgggcggctggccgggggcagcgggctcccagggtcagtcgacgtggatgagtgctcagagggcacagatgactgccacatcgatgccatctgtcagaacacgcccaagtcctacaaatgcctctgcaagccaggctacaagggggaaggcaagcagtgtgaagacattgacgagtgtgagaatgactactacaatgggggctgtgtccacgagtgcatcaacatcccggggaactacaggtgtacctgctttgatggcttcatgctggcacacgatggacacaactgcctggatgtggacgagtgtcaggacaataatggtggctgccagcagatctgcgtcaatgccatgggcagctacgagtgtcagtgccacagtggcttcttccttagtgacaaccagcatacctgcatccaccgctccaatgagggtatgaactgcatgaacaaagaccatggctgtgcccacatctgccgggagacgcccaaaggtggggtggcctgcgactgcaggcccggctttgaccttgcccaaaaccagaaggactgcacactaacctgtaattatggaaacggaggctgccagcacagctgtgaggacacagacacaggccccacgtgtggttgccaccagaagtacgccctccactcagacggtcgcacgtgcatcgagacgtgcgcagtcaataacggaggctgcgaccggacatgcaaggacacagccactggcgtgcgatgcagctgccccgttggattcacactgcagccggacgggaagacatgcaaagacatcaacgagtgcctggtcaacaacggaggctgcgaccacttctgccgcaacaccgtgggcagcttcgagtgcggctgccggaagggctacaagctgctcaccgacgagcgcacctgccaggacatcgacgagtgctccttcgagcggacctgtgaccacatctgcatcaactccccgggcagcttccagtgcctgtgtcaccgcggctacatcctctacgggacaacccactgcggagatgtggacgagtgcagcatgagcaacgggagctgtgaccagggctgcgtcaacaccaagggcagctacgagtgcgtctgtcccccggggaggcggctccactggaacgggaaggattgcgtggagacaggcaagtgtctttctcgcgccaagacctccccccgggcccagctgtcctgcagcaaggcaggcggtgtggagagctgcttcctttcctgcccggctcacacactcttcgtgccagactcggaaaatagctacgtcctgagctgcggagttccagggccgcagggcaaggcgctgcagaaacgcaacggcaccagctctggcctcgggcccagctgctcagatgcccccaccacccccatcaaacagaaggcccgcttcaagatccgagatgccaagtgccacctccggccccacagccaggcacgagcaaaggagaccgccaggcagccgctgctggaccactgccatgtgactttcgtgaccctcaagtgtgactcctccaagaagaggcgccgtggccgcaagtccccatccaaggaggtgtcccacatcacagcagagtttgagatcgagacaaagatggaagaggcctcagacacatgcgaagcggactgcttgcggaagcgagcagaacagagcctgcaggccgccatcaagaccctgcgcaagtccatcggccggcagcagttctatgtccaggtctcaggcactgagtacgaggtagcccagaggccagccaaggcgctggaggggcagggggcatgtggcgcaggccaggtgctacaggacagcaaatgcgttgcctgtgggcctggcacccacttcggtggtgagctcggccagtgtgtgtcatgtatgccaggaacataccaggacatggaaggccagctcagttgcacaccgtgccccagcagcgacgggcttggtctgcctggtgcccgcaacgtgtcggaatgtggaggccagtgttctccaggcttcttctcggccgatggcttcaagccctgccaggcctgccccgtgggcacgtaccagcctgagcccgggcgcaccggctgcttcccctgtggagggggtttgctcaccaaacacgaaggcaccacctccttccaggactgcgaggctaaagtgcactgctcccccggccaccactacaacaccaccacccaccgctgcatccgctgccccgtcggcacctaccagcccgagtttggccagaaccactgcatcacctgtccgggcaacaccagcacagacttcgatggctccaccaacgtcacacactgcaaaaaccagcactgcggcggcgagcttggtgactacaccggctacatcgagtcccccaactaccctggcgactacccagccaacgctgaatgcgtctggcacatcgcgcctcccccaaagcgcaggatcctcatcgtggtccctgagatcttcctgcccatcgaggatgagtgcggcgatgttctggtcatgaggaagagtgcctctcccacgtccatcaccacctatgagacctgccagacctacgagaggcccatcgccttcacctcccgctcccgcaagctctggatccagttcaaatccaatgaaggcaacagcggcaaaggcttccaagtgccctatgtcacctacgatgaggactaccagcaactcatagaggacatcgtgcgcgatgggcgcctgtacgcctcggagaaccaccaggaaattttgaaagacaagaagctgatcaaggccctcttcgacgtgctggcgcatccccagaactacttcaagtacacagcccaggaatccaaggagatgttcccacggtccttcatcaaactgctgcgctccaaagtgtctcggttcctgcggccctacaaataaccggggggagcggccctgcctgggggtggcctggtccgcggagggtgcacctgccctccacagtgggagctgcatgggcctccacaccaccttgggaaccccatggcactgcccttcagggaagccgaccagcccatggagaccgagcccaggcacccttcggacccgctgcccctgtgggagcaccctgcttcaggaagcctccctccctccctctgcctcccttccccaggacaccaagagcgccctctcctgagccctggcagaccgactgcaggtagcaggattgcaggaccctctgcctggcctggcgtttcaggagagaggggaagtggggcctgtgctctgggaggcgtggtcatccgagacaggagtccaggggagagaggaggggacaaaggcgccgtctgggggaggtcgatgagcctgtgctggcatccgcgggccccacgctttgccaactcctccagccacaggcaaggccacggctccgggctgttgcgctctaagggttctgtgattggatggaacagagctgctggggaggagactggaagtttctgcattccttcaacagaacatttaatgaagtactctatatatatatataaatatatatataaatatatatatatacttctatttgtgggtactttaggaaaatgccctttggtcactgtaaatatgaattgtgaccccatcccttcccgcatgagcccagtgagtcccagcagctatcagcctccctgaacgattaaacagctcctcccagca

SEQ ID NO: 28089 - DNA, 3340 bp, Homo sapiens
  source 1..3340: mol_type = unassigned DNA
gagcagcgagcagcgcctgcgggagcggccggtcggtcgggtccccgcgccccgcacgcccgcacgcccagcggggcccgcattgagcatgggcgcggcggccgtgcgctggcacttgtgcgtgctgctggccctgggcacacgcgggcggctggccgggggcagcgggctcccagggtcagtcgacgtggatgagtgctcagagggcacagatgactgccacatcgatgccatctgtcagaacacgcccaagtcctacaaatgcctctgcaagccaggctacaagggggaaggcaagcagtgtgaagacattgacgagtgtgagaatgactactacaatgggggctgtgtccacgagtgcatcaacatcccggggaactacaggtgtacctgctttgatggcttcatgctggcacacgatggacacaactgcctggatgtggacgagtgtcaggacaataatggtggctgccagcagatctgcgtcaatgccatgggcagctacgagtgtcagtgccacagtggcttcttccttagtgacaaccagcatacctgcatccaccgctccaatgagggtatgaactgcatgaacaaagaccatggctgtgcccacatctgccgggagacgcccaaaggtggggtggcctgcgactgcaggcccggctttgaccttgcccaaaaccagaaggactgcacactaacctgtaattatggaaacggaggctgccagcacagctgtgaggacacagacacaggccccacgtgtggttgccaccagaagtacgccctccactcagacggtcgcacgtgcatcgagacgtgcgcagtcaataacggaggctgcgaccggacatgcaaggacacagccactggcgtgcgatgcagctgccccgttggattcacactgcagccggacgggaagacatgcaaagacatcaacgagtgcctggtcaacaacggaggctgcgaccacttctgccgcaacaccgtgggcagcttcgagtgcggctgccggaagggctacaagctgctcaccgacgagcgcacctgccaggacatcgacgagtgctccttcgagcggacctgtgaccacatctgcatcaactccccaggcacgagcaaaggagaccgccaggcagccgctgctggaccactgccatgtgactttcgtgaccctcaagtgtgactcctccaagaagaggcgccgtggccgcaagtccccatccaaggaggtgtcccacatcacagcagagtttgagatcgagacaaagatggaagaggcctcagacacatgcgaagcggactgcttgcggaagcgagcagaacagagcctgcaggccgccatcaagaccctgcgcaagtccatcggccggcagcagttctatgtccaggtctcaggcactgagtacgaggtagcccagaggccagccaaggcgctggaggggcagggggcatgtggcgcaggccaggtgctacaggacagcaaatgcgttgcctgtgggcctggcacccacttcggtggtgagctcggccagtgtgtgtcatgtatgccaggaacataccaggacatggaaggccagctcagttgcacaccgtgccccagcagcgacgggcttggtctgcctggtgcccgcaacgtgtcggaatgtggaggccagtgttctccaggcttcttctcggccgatggcttcaagccctgccaggcctgccccgtgggcacgtaccagcctgagcccgggcgcaccggctgcttcccctgtggagggggtttgctcaccaaacacgaaggcaccacctccttccaggactgcgaggctaaagtgcactgctcccccggccaccactacaacaccaccacccaccgctgcatccgctgccccgtcggcacctaccagcccgagtttggccagaaccactgcatcacctgtccgggcaacaccagcacagacttcgatggctccaccaacgtcacacactgcaaaaaccagcactgcggcggcgagcttggtgactacaccggctacatcgagtcccccaactaccctggcgactacccagccaacgctgaatgcgtctggcacatcgcgcctcccccaaagcgcaggatcctcatcgtggtccctgagatcttcctgcccatcgaggatgagtgcggcgatgttctggtcatgaggaagagtgcctctcccacgtccatcaccacctatgagacctgccagacctacgagaggcccatcgccttcacctcccgctcccgcaagctctggatccagttcaaatccaatgaaggcaacagcggcaaaggcttccaagtgccctatgtcacctacgatgaggactaccagcaactcatagaggacatcgtgcgcgatgggcgcctgtacgcctcggagaaccaccaggaaattttgaaagacaagaagctgatcaaggccctcttcgacgtgctggcgcatccccagaactacttcaagtacacagcccaggaatccaaggagatgttcccacggtccttcatcaaactgctgcgctccaaagtgtctcggttcctgcggccctacaaataaccggggggagcggccctgcctgggggtggcctggtccgcggagggtgcacctgccctccacagtgggagctgcatgggcctccacaccaccttgggaaccccatggcactgcccttcagggaagccgaccagcccatggagaccgagcccaggcacccttcggacccgctgcccctgtgggagcaccctgcttcaggaagcctccctccctccctctgcctcccttccccaggacaccaagagcgccctctcctgagccctggcagaccgactgcaggtagcaggattgcaggaccctctgcctggcctggcgtttcaggagagaggggaagtggggcctgtgctctgggaggcgtggtcatccgagacaggagtccaggggagagaggaggggacaaaggcgccgtctgggggaggtcgatgagcctgtgctggcatccgcgggccccacgctttgccaactcctccagccacaggcaaggccacggctccgggctgttgcgctctaagggttctgtgattggatggaacagagctgctggggaggagactggaagtttctgcattccttcaacagaacatttaatgaagtactctatatatatatataaatatatatataaatatatatatatacttctatttgtgggtactttaggaaaatgccctttggtcactgtaaatatgaattgtgaccccatcccttcccgcatgagcccagtgagtcccagcagctatcagcctccctgaacgattaaacagctcctcccagc

SEQ ID NO: 28090 - DNA, 1119 bp, Homo sapiens
  source 1..1119: mol_type = unassigned DNA
cccagcggggcccgcattgagcatgggcgcggcggccgtgcgctggcacttgtgcgtgctgctggccctgggcacacgcgggcggctggccgggggcagcgggctcccagggtcagtcgacgtggatgagtgctcagagggcacagatgactgccacatcgatgccatctgtcagaacacgcccaagtcctacaaatgcctctgcaagccaggctacaagggggaaggcaagcagtgtgaagacattgacgagtgtgagaatgactactacaatgggggctgtgtccacgagtgcatcaacatcccggggaactacaggtgtacctgctttgatggcttcatgctggcacacgatggacacaactgcctggatgtggacgagtgtcaggacaataatggtggctgccagcagatctgcgtcaatgccatgggcagctacgagtgtcagtgccacagtggcttcttccttagtgacaaccagcatacctgcatccaccgctccaatgagggtatgaactgcatgaacaaagaccatggctgtgcccacatctgccgggagacgcccaaaggtggggtggcctgcgactgcaggcccggctttgaccttgcccaaaaccagaaggactgcacactaacctgtaattatggaaacggaggctgccagcacagctgtgaggacacagacacaggccccacgtgtggttgccaccagaagtacgccctccactcagacggtcgcacgtgcatcgagacgtgcgcagtcaataacggaggctgcgaccggacatgcaaggacacagccactggcgtgcgatgcagctgccccgttggattcacactgcagccggacgggaagacatgcaaagacatcaacgagtgcctggtcaacaacggaggctgcgaccacttctgccgcaacaccgtgggcagcttcgagtgcggctgccggaagggctacaagctgctcaccgacgagcgcacctgccaggacatcgacgagtgctccttcgagcggacctgtgaccacatctgcatcaactccccgggcagcttccagtgcctcatcaaactgctgcgctccaaagtgtctcggttcctgcggccctacaaataaccggg

SEQ ID NO: 28091 - DNA, 524 bp, Homo sapiens
  source 1..524: mol_type = unassigned DNA
ccgggagacgcccaaaggtggggtggcctgcgactgcaggcccggctttgaccttgcccaaaaccagaaggactgcacactaacctgtaattatggaaacggaggctgccagcacagctgtgaggacacagacacaggccccacgtgtggttgccaccagaagtacgccctccactcagacggtcgcacgtgcatcgagaaggatgaggctgcaattgagcgctctcagttcaatgccacgtcagtagctgatgtggacaagcgggtgaaacggcggctactcatggagacgtgcgcagtcaataacggaggctgcgaccggacatgcaaggacacagccactggcgtgcgatgcagctgccccgttggattcacactgcagccggacgggaagacatgcaaagacatcaacgagtgcctggtcaacaacggaggctgcgaccacttctgccgcaacaccgtgggcagcttcgagtgcggctgccggaagggctacaagctgctcaccgacgagcgcacctgcc

SEQ ID NO: 28092 - DNA, 3727 bp, Homo sapiens
  source 1..3727: mol_type = unassigned DNA
gcgcacacctccccgcgccgccgccgccaccgcccgcactccgccgcctctgcccgcaaccgctgagccatccatgggggtcgcgggccgcaaccgtcccggggcggcctgggcggtgctgctgctgctgctgctgctgccgccactgctgctgctggcgggggccgtcccgccgggtcggggccgtgccgcggggccgcaggaggatgtagatgagtgtgcccaagggctagatgactgccatgccgacgccctgtgtcagaacacacccacctcctacaagtgctcctgcaagcctggctaccaaggggaaggcaggcagtgtgaggacatcgatgaatgtggaaatgagctcaatggaggctgtgtccatgactgtttgaatattccaggcaattatcgttgcacttgttttgatggcttcatgttggctcatgacggtcataattgtcttgatgtggacgagtgcctggagaacaatggcggctgccagcatacctgtgtcaacgtcatggggagctatgagtgctgctgcaaggaggggtttttcctgagtgacaatcagcacacctgcattcaccgctcggaagagggcctgagctgcatgaataaggatcacggctgtagtcacatctgcaaggaggccccaaggggcagcgtcgcctgtgagtgcaggcctggttttgagctggccaagaaccagagagactgcatcttgacctgtaaccatgggaacggtgggtgccagcactcctgtgacgatacagccgatggcccagagtgcagctgccatccacagtacaagatgcacacagatgggaggagctgccttgagcgagaggacactgtcctggaggtgacagagagcaacaccacatcagtggtggatggggataaacgggtgaaacggcggctgctcatggaaacgtgtgctgtcaacaatggaggctgtgaccgcacctgtaaggatacttcgacaggtgtccactgcagttgtcctgttggattcactctccagttggatgggaagacatgtaaagatattgatgagtgccagacccgcaatggaggttgtgatcatttctgcaaaaacatcgtgggcagttttgactgcggctgcaagaaaggatttaaattattaacagatgagaagtcttgccaagatgtggatgagtgctctttggataggacctgtgaccacagctgcatcaaccaccctggcacatttgcttgtgcttgcaaccgagggtacaccctgtatggcttcacccactgtggagacaccaatgagtgcagcatcaacaacggaggctgtcagcaggtctgtgtgaacacagtgggcagctatgaatgccagtgccaccctgggtacaagctccactggaataaaaaagactgtgtggaagtgaaggggctcctgcccacaagtgtgtcaccccgtgtgtccctgcactgcggtaagagtggtggaggagacgggtgcttcctcagatgtcactctggcattcacctctcttcagatgtcaccaccatcaggacaagtgtaacctttaagctaaatgaaggcaagtgtagtttgaaaaatgctgagctgtttcccgagggtctgcgaccagcactaccagagaagcacagctcagtaaaagagagcttccgctacgtaaaccttacatgcagctctggcaagcaagtcccaggagcccctggccgaccaagcacccctaaggaaatgtttatcactgttgagtttgagcttgaaactaaccaaaaggaggtgacagcttcttgtgacctgagctgcatcgtaaagcgaaccgagaagcggctccgtaaagccatccgcacgctcagaaaggccgtccacagggagcagtttcacctccagctctcaggcatgaacctcgacgtggctaaaaagcctcccagaacatctgaacgccaggcagagtcctgtggagtgggccagggtcatgcagaaaaccaatgtgtcagttgcagggctgggacctattatgatggagcacgagaacgctgcattttatgtccaaatggaaccttccaaaatgaggaaggacaaatgacttgtgaaccatgcccaagaccaggaaattctggggccctgaagaccccagaagcttggaatatgtctgaatgtggaggtctgtgtcaacctggtgaatattctgcagatggctttgcaccttgccatctctgtgccctgggcacgttccagcctgaagctggtcgaacttcctgcttcccctgtggaggaggccttgccaccaaacatcagggagctacttcctttcaggactgtgaaaccagagttcaatgttcacctggacatttctacaacaccaccactcaccgatgtattcgttgcccagtgggaacataccagcctgaatttggaaaaaataattgtgtttcttgcccaggaaatactacgactgactttgatggctccacaaacataacccagtgtaaaaacagaagatgtggaggggagctgggagatttcactgggtacattgaatccccaaactacccaggcaattacccagccaacaccgagtgtacgtggaccatcaacccaccccccaagcgccgcatcctgatcgtggtccctgagatcttcctgcccatagaggacgactgtggggactatctggtgatgcggaaaacctcttcatccaattctgtgacaacatatgaaacctgccagacctacgaacgccccatcgccttcacctccaggtcaaagaagctgtggattcagttcaagtccaatgaagggaacagcgctagagggttccaggtcccatacgtgacatatgatgaggactaccaggaactcattgaagacatagttcgagatggcaggctctatgcatctgagaaccatcaggaaatacttaaggataagaaacttatcaaggctctgtttgatgtcctggcccatccccagaactatttcaagtacacagcccaggagtcccgagagatgtttccaagatcgttcatccgattgctacgttccaaagtgtccaggtttttgagaccttacaaatgactcagcccacgtgccactcaatacaaatgttctgctatagggttggtgggacagagctgtcttccttctgcatgtcagcacagtcgggtattgctgcctcccgtatcagtgactcattagagttcaatttttatagataatacagatattttggtaaattgaacttggtttttctttcccagcatcgtggatgtagactgagaatggctttgagtggcatcagcttctcactgctgtgggcggatgtcttggatagatcacgggctggctgagctggactttggtcagcctaggtgagactcacctgtccttctggggtcttactcctcctcaaggagtctgtagtggaaaggaggccacagaataagctgcttattctgaaacttcagcttcctctagcccggccctctctaagggagccctctgcactcgtgtgcaggctctgaccaggcagaacaggcaagaggggagggaaggagacccctgcaggctccctccacccaccttgagacctgggaggactcagtttctccacagccttctccagcctgtgtgatacaagtttgatcccaggaacttgagttctaagcagtgctcgtgaaaaaaaaaagcagaaagaattagaaataaataaaaactaagcacttctggaga

SEQ ID NO: 28093 - DNA, 2912 bp, Homo sapiens
  source 1..2912: mol_type = unassigned DNA
gcaaccgctgagccatccatgggggtcgcgggccgcaaccgtcccggggcggcctgggcggtgctgctgctgctgctgctgctgccgccactgctgctgctggcgggggccgtcccgccgggtcggggccgtgccgcggggccgcaggaggatgtagatgagtgtgcccaagggctagatgactgccatgccgacgccctgtgtcagaacacacccacctcctacaagtgctcctgcaagcctggctaccaaggggaaggcaggcagtgtgaggacatcgatgaatgtggaaatgagctcaatggaggctgtgtccatgactgtttgaatattccaggcaattatcgttgcacttgttttgatggcttcatgttggctcatgacggtcataattgtcttgatgtggacgagtgcctggagaacaatggcggctgccagcatacctgtgtcaacgtcatggggagctatgagtgctgctgcaaggaggggtttttcctgagtgacaatcagcacacctgcattcaccgctcggaagagggcctgagctgcatgaataaggatcacggctgtagtcacatctgcaaggaggccccaaggggcagcgtcgcctgtgagtgcaggcctggttttgagctggccaagaaccagagagactgcatcttgacctgtaaccatgggaacggtgggtgccagcactcctgtgacgatacagccgatggcccagagtgcagctgccatccacagtacaagatgcacacagatgggaggagctgccttgagcgagaggacactgtcctggaggtgacagagagcaacaccacatcagtggtggatggggataaacgggtgaaacggcggctgctcatggaaacgtgtgctgtcaacaatggaggctgtgaccgcacctgtaaggatacttcgacaggtgtccactgcagttgtcctgttggattcactctccagttggatgggaagacatgtaaagatattgatgagtgccagacccgcaatggaggttgtgatcatttctgcaaaaacatcgtgggcagttttgactgcggctgcaagaaaggatttaaattattaacagatgagaagtcttgccaagatgtggatgagtgctctttggataggacctgtgaccacagctgcatcaaccaccctggcacatttgcttgtgcttgcaaccgagggtacaccctgtatggcttcacccactgtggagacaccaatgagtgcagcatcaacaacggaggctgtcagcaggtctgtgtgaacacagtgggcagctatgaatgccagtgccaccctgggtacaagctccactggaataaaaaagactgtgtggcttcttgtgacctgagctgcatcgtaaagcgaaccgagaagcggctccgtaaagccatccgcacgctcagaaaggccgtccacagggagcagtttcacctccagctctcaggcatgaacctcgacgtggctaaaaagcctcccagaacatctgaacgccaggcagagtcctgtggagtgggccagggtcatgcagaaaaccaatgtgtcagttgcagggctgggacctattatgatggagcacgagaacgctgcattttatgtccaaatggaaccttccaaaatgaggaaggacaaatgacttgtgaaccatgcccaagaccaggaaattctggggccctgaagaccccagaagcttggaatatgtctgaatgtggaggtctgtgtcaacctggtgaatattctgcagatggctttgcaccttgccatctctgtgccctgggcacgttccagcctgaagctggtcgaacttcctgcttcccctgtggaggaggccttgccaccaaacatcagggagctacttcctttcaggactgtgaaaccagagttcaatgttcacctggacatttctacaacaccaccactcaccgatgtattcgttgcccagtgggaacataccagcctgaatttggaaaaaataattgtgtttcttgcccaggaaatactacgactgactttgatggctccacaaacataacccagtgtaaaacttcatccaattctgtgacaacatatgaaacctgccagacctacgaacgccccatcgccttcacctccaggtcaaagaagctgtggattcagttcaagtccaatgaagggaacagcgctagagggttccaggtcccatacgtgacatatgatgaggactaccaggaactcattgaagacatagttcgagatggcaggctctatgcatctgagaaccatcaggaaatacttaaggataagaaacttatcaaggctctgtttgatgtcctggcccatccccagaactatttcaagtacacagcccaggagtcccgagagatgtttccaagatcgttcatccgattgctacgttccaaagtgtccaggtttttgagaccttacaaatgactcagcccacgtgccactcaatacaaatgttctgctatagggttggtgggacagagctgtcttccttctgcatgtcagcacagtcgggtattgctgcctcccgtatcagtgactcattagagttcaatttttatagataatacagatattttggtaaattgaacttggtttttctttcccagcatcgtggatgtagactgagaatggctttgagtggcatcagcttctcactgctgtgggcggatgtcttggatagatcacgggctggctgagctggactttggtcagcctaggtgagactcacctgtccttctggggtcttactcctcctcaaggagtctgtagtggaaaggaggccacagaataagctgcttattctgaaacttcagcttcctctagcccggccctctctaagggagccctctgcactcgtgtgcaggctctgaccaggcagaacaggcaagagggga

SEQ ID NO: 28094 - DNA, 4683 bp, Homo sapiens
  source 1..4683: mol_type = unassigned DNA
ccgcgcacacctccccgcgccgccgccgccaccgcccgcactccgccgcctctgcccgcaaccgctgagccatccatgggggtcgcgggccgcaaccgtcccggggcggcctgggcggtgctgctgctgctgctgctgctgccgccactgctgctgctggcgggggccgtcccgccgggtcggggccgtgccgcggggccgcaggaggatgtagatgagtgtgcccaagggctagatgactgccatgccgacgccctgtgtcagaacacacccacctcctacaagtgctcctgcaagcctggctaccaaggggaaggcaggcagtgtgaggacatcgatgaatgtggaaatgagctcaatggaggctgtgtccatgactgtttgaatattccaggcaattatcgttgcacttgttttgatggcttcatgttggctcatgacggtcataattgtcttgatgtggacgagtgcctggagaacaatggcggctgccagcatacctgtgtcaacgtcatggggagctatgagtgctgctgcaaggaggggtttttcctgagtgacaatcagcacacctgcattcaccgctcggaagagggcctgagctgcatgaataaggatcacggctgtagtcacatctgcaaggaggccccaaggggcagcgtcgcctgtgagtgcaggcctggttttgagctggccaagaaccagagagactgcatcttgacctgtaaccatgggaacggtgggtgccagcactcctgtgacgatacagccgatggcccagagtgcagctgccatccacagtacaagatgcacacagatgggaggagctgccttgagcgagaggacactgtcctggaggtgacagagagcaacaccacatcagtggtggatggggataaacgggtgaaacggcggctgctcatggaaacgtgtgctgtcaacaatggaggctgtgaccgcacctgtaaggatacttcgacaggtgtccactgcagttgtcctgttggattcactctccagttggatgggaagacatgtaaagatattgatgagtgccagacccgcaatggaggttgtgatcatttctgcaaaaacatcgtgggcagttttgactgcggctgcaagaaaggatttaaattattaacagatgagaagtcttgccaagatgtggatgagtgctctttggataggacctgtgaccacagctgcatcaaccaccctggcacatttgcttgtgcttgcaaccgagggtacaccctgtatggcttcacccactgtggagacaccaatgagtgcagcatcaacaacggaggctgtcagcaggtctgtgtgaacacagtgggcagctatgaatgccagtgccaccctgggtacaagctccactggaataaaaaagactgtgtggaagtgaaggggctcctgcccacaagtgtgtcaccccgtgtgtccctgcactgcggtaagagtggtggaggagacgggtgcttcctcagatgtcactctggcattcacctctcttcaggactgcaaggggcctactctgtcacctgtggctcttcctctcctctcaggaacaaacaacaaaaatcaaatgactctgcttttggggatgtcaccaccatcaggacaagtgtaacctttaagctaaatgaaggcaagtgtagtttgaaaaatgctgagctgtttcccgagggtctgcgaccagcactaccagagaagcacagctcagtaaaagagagcttccgctacgtaaaccttacatgcagctctggcaagcaagtcccaggagcccctggccgaccaagcacccctaaggaaatgtttatcactgttgagtttgagcttgaaactaaccaaaaggaggtgacagcttcttgtgacctgagctgcatcgtaaagcgaaccgagaagcggctccgtaaagccatccgcacgctcagaaaggccgtccacagggagcagtttcacctccagctctcaggcatgaacctcgacgtggctaaaaagcctcccagaacatctgaacgccaggcagagtcctgtggagtgggccagggtcatgcagaaaaccaatgtgtcagttgcagggctgggacctattatgatggagcacgagaacgctgcattttatgtccaaatggaaccttccaaaatgaggaaggacaaatgacttgtgaaccatgcccaagaccaggaaattctggggccctgaagaccccagaagcttggaatatgtctgaatgtggaggtctgtgtcaacctggtgaatattctgcagatggctttgcaccttgccatctctgtgccctgggcacgttccagcctgaagctggtcgaacttcctgcttcccctgtggaggaggccttgccaccaaacatcagggagctacttcctttcaggactgtgaaaccagagttcaatgttcacctggacatttctacaacaccaccactcaccgatgtattcgttgcccagtgggaacataccagcctgaatttggaaaaaataattgtgtttcttgcccaggaaatactacgactgactttgatggctccacaaacataacccagtgtaaaaacagaagatgtggaggggagctgggagatttcactgggtacattgaatccccaaactacccaggcaattacccagccaacaccgagtgtacgtggaccatcaacccaccccccaagcgccgcatcctgatcgtggtccctgagatcttcctgcccatagaggacgactgtggggactatctggtgatgcggaaaacctcttcatccaattctgtgacaacatatgaaacctgccagacctacgaacgccccatcgccttcacctccaggtcaaagaagctgtggattcagttcaagtccaatgaagggaacagcgctagagggttccaggtcccatacgtgacatatgatgaggactaccaggaactcattgaagacatagttcgagatggcaggctctatgcatctgagaaccatcaggaaatacttaaggataagaaacttatcaaggctctgtttgatgtcctggcccatccccagaactatttcaagtacacagcccaggagtcccgagagatgtttccaagatcgttcatccgattgctacgttccaaagtgtccaggtttttgagaccttacaaatgactcagcccacgtgccactcaatacaaatgttctgctatagggttggtgggacagagctgtcttccttctgcatgtcagcacagtcgggtattgctgcctcccgtatcagtgactcattagagttcaatttttatagataatacagatattttggtaaattgaacttggtttttctttcccagcatcgtggatgtagactgagaatggctttgagtggcatcagcttctcactgctgtgggcggatgtcttggatagatcacgggctggctgagctggactttggtcagcctaggtgagactcacctgtccttctggggtcttactcctcctcaaggagtctgtagtggaaaggaggccacagaataagctgcttattctgaaacttcagcttcctctagcccggccctctctaagggagccctctgcactcgtgtgcaggctctgaccaggcagaacaggcaagaggggagggaaggagacccctgcaggctccctccacccaccttgagacctgggaggactcagtttctccacagccttctccagcctgtgtgatacaagtttgatcccaggaacttgagttctaagcagtgctcgtgaaaaaaaaaagcagaaagaattagaaataaataaaaactaagcacttctggagacataataatgtacatttattgccagccttcctcgttgcaagcttccaccctgcagcaaatgcactatgctgactctcgcaccttcagctgtgccctctgacactctgctggccattgcctgagggactggggagttcaggtgaaatgtaatttcctcagtggatgagaatcatcaattgtcatgaaaaggcgatttcaccaaccctgagtcggtattgccaagggttctactccccaagtgggcttcccatcacaagggatctgaggtccaggtgggtgtggtgaggcccagcctgtcatgtatgccttccttccccagtctcaaatgtgagagacggactctgctccgtggacatgagcagccccttgaagggtggtctcattctctaacagtaacagcactgccagaaacaccccctgaatgccacacgatcatctcactttgggtcaggccagcagggcctcacgatcatttcttgaacttgaattttcagtgttattgaatctttaaacatttaaatccccaagcaaaaatctcattacagtgaataaaaaggaatccaatcaaacaagccaccacttccctaatggatggactacctacaactatagtgttttgttatttcaataacaattctatgcacagccaattctccataccaaagtactaaaaaaatgtttaacaagcatttttgaagaaaacaaagagaacttcattatggttaaacttgcttttcatctcagtgttgctttttttaacctgttaataacattgattcttaaaaagtcctaatcaaacttctttatttggatgggccctaaatattcattttcagatttctcttcaaaagtttgaacatcatcatt

SEQ ID NO: 28095 - DNA, 1077 bp, Homo sapiens
  source 1..1077: mol_type = unassigned DNA
ccagcctaggccgaacttccggctctcactgctaggggcttaagcggagggagtcgagccagcgtcgccgcgatggtgttgttggagagcgagcagttcctgacggagctgaccagacttttccagaagtgccggacgtcgggcagcgtctatatcaccttgaagaagtatgacggtcgaaccaaacccattccaaagaagggtactgtggagggctttgagcccgcagacaacaagtgtctgttaagagctaccgatgggaagaagaagatcagcactgtggtgagctccaaggaagtgaataagtttcagatggcttattcaaacctccttagagctaacatggatgggctgaagaagagagacaaaaagaacaaaactaagaagaccaaagcagcagcagcagcagcagcagcagcacctgccgcagcagcaacagcaccaacaacagcagcaacaacagcagcaacagcagcacagtaaagggcatacatttcctgctttcaccaattaaccactgaattgctattttttccttttggccagatagctaggtttctggttcccccacagtaggtgttttcacataagattagggtccttttggaaagaatagttgcagtgtttataggatagttgtggtaagaatctagtttattttgcatttggctaattggtctgtgctgcatggttatatactcctggattatagattaaaagtctctgtagacatctctgtgaagagcaagctatcattaaacatgtctgtttatcagcactgtctctttattcctttcccaacccattttaatagttctggcaataactactaaatctagaatgatgtgattaatgaataggctttagctctataatatcttctaggttattagaattgaaacctgacagttttataaaaagtcatgttatctcatgagctgcttcccacctggctgtataattttatcatcatggttccccagtttcgatgagttctcacagtcaaatgagagtttgtttaaccaccttaggagaaacatactacaaagtcatcaagaataaaggttccaaagtaat

SEQ ID NO: 28096 - DNA, 937 bp, Homo sapiens
  source 1..937: mol_type = unassigned DNA
agagccgggttcctcccgggtttctgccgggtttctccctgcggctcctgggttgttgagactcttgtgaagatggcttgcgctgccgcgcggtccccggccgaccaggacaggtttatttgtatctatcctgcttatttaaataataagaagaccatcgcagagggaaggcgaatccccataagtaaggctgttgaaaatcctacagctacagagattcaagatgtatgttcagcagttggacttaacgtatttcttgagaaaaataaaatgtactctagagaatggaatcgtgatgtccaatacagaggcagagtccgggtccagctcaaacaggaagatgggagcctctgccttgtacagttcccatcacattatacactaagcctaacttctggttcctaggtaagtcagtaatgttgtatgcagcagaaatgatacctaaactaaaaacaaggacacaaaaaacaggaggtgctgaccaaagtcttcaacaaggagagggaagtaaaaaagggaaaggaaagaaaaagaagtaacctagtatcagcatcaagtatgtggtactactgtaagagacatgaatggagacttctaatttgtatcggagggaaacagaagctttttgtttgcatcatttaactgaactgtgaacccttgtgcctctcatctttatcatcggagttgacagtgaaacaaatttacatcagaagtttgcatctcgcgtatatgccgtataaaagaatttttttgtctttcaatgcagttttttggaagaaaatatttttaaatggacaatggactgtacaataagttacttgaaataagttgtttcagataaatttcaattagatttaaaataaacattttgtccaccttttaagttaatgaaataaaatttgaaactgacttttgcagcttttgcttatatactaat

SEQ ID NO: 28097 - DNA, 2841 bp, Homo sapiens
  source 1..2841: mol_type = unassigned DNA
caaacaggcgatgagaaatcgcggacgcggaaccatttcttgggcaggacttccggcggaaaagcgggctgtctcggaaactcagagccgggttcctcccgggtttctgccgggtttctccctgcggctcctgggttgttgagactcttgtgaagatggcttgcgctgccgcgcggtccccggccgaccaggacaggtttatttgtatctatcctgcttatttaaataataagaagaccatcgcagagggaaggcgaatccccataagtaaggctgttgaaaatcctacagctacagagattcaagatgtatgttcagcagttggacttaacgtatttcttgagaaaaataaaatgtactctagagaatggaatcgtgatgtccaatacagaggcagagtccgggtccagctcaaacaggaagatgggagcctctgccttgtacagttcccatcacgtaagtcagtaatgttgtatgcagcagaaatgatacctaaactaaaaacaaggacacaaaaaacaggaggtgctgaccaaagtcttcaacaaggagagggaagtaaaaaagggaaaggaaagaaaaagaagtaacctagtatcagcatcaagtatgtggtactactgtaagagacatgaatggagacttctaatttgtatcggagggaaacagaagctttttgtttgcatcatttaactgaactgtgaacccttgtgcctctcatctttatcatcggagttgacagtgaaacaaatttacatcagaagtttgcatctcgcgtatatgccgtataaaagaatttttttgtctttcaatgcagttttttggaagaaaatatttttaaatggacaatggactgtacaataagttacttgaaataagttgtttcagataaatttcaattagatttaaaataaacattttgtccaccttttaagttaatgaaataaaatttgaaactgacttttgcagcttttgcttatatactaatgctaggagaggagggataattaagaataaaatatgtagtgaaagtttccatagtgtgaggctaaaactagaagaaactgtggtaggtccttttgtgggtgggggacaggggagtctgtaaaaagccagtctgtagatgatattttaatatattattgtaatcgaatcgttcagttgttttttgacatggaaagtcctggattttaagctttaaatttgcttattttgtaggtttaagaacatgattttcatgggagttgtaaaattaactgtgctttagcaccttgaggtacactttccttcaacaaatgaaattggattggtgctccagaatttcagagcggtttctgaaagtagtgattttgagctatcccaattcctgttcttcctgaggcctggtttagctcttccttgaattctgcaagctatctcatattttcagtaaattccattttttttaagtttgtttgtttgtttgtttttgagatggagtttcactcttgttgcctaggctggagtgcaatggcacgatatcggcgtaccacaacctctgcatcccaggttcaagagattctcctgcctcagcctccctaggagctgggattacaggcatgtgccaccacacccggctaattttgtatttttagtagagacagggtttttccatgttggtcaggctggtctcgaactcccgacctcaggtgatctgcccacctcagcctcccaaagtgctgggattacaggcatgagccaccgtgcccggccttctttacatttttattgctcacagtcaaacattcctattgattgtaaaataagcaaacctagagttgtggagatttatatgtatttatttatttgaattgagacagggtcttaaactcccaggctcaagtgatcctcctgcctcaacctcccaaagtgctgggattacaggcatgagctagctggcctgttgactttttttttttaactctaacaatttctgttttatagtgaacataatagtataagacttagtttatatatttgacttacaaataaatcctggggagaggggagtatgtgtaaaacataattcagagcagccttctttgagaaagtgggtgtgtttggctgtgtaacaaaacaataaggggatgtgtttgctgtgtaacaaaacaatgaaggatttaagcaggatatttttgcctcatatgttaaatccaagtgaggttgctgtggtggttggtttagctctcagtgatgccttttttgtatttttccgctctgctgtccatgacatatttctaacacctttatgattattgttcctgcttgtaaaagggctgatatttacatgagtgcaaggcaggaagaaaaggtagctgtgccagccacttctggcaagcagttctcccaccttagcctcccaagtagctgagaccataggcatgagatttctcaaaattcctcccagcaggctttcacttagtttcattgttgagaactgtgacaggtccatctctagctgcaaaggaggctgagaaagtgaacacagcagtcctccttatccttggggaatacattccaagagtggatccctgaaacagcagatagtactgaaccctatatatactatgtttttgcctatgtatatatacttgatatggtttggctgctacccaacccaaaatctcatcttgaattataatccccaaatccctatgtgttaagggtgggaccaggtggagataattggatcatgggggcaatttcccctgtgctgttcttgagataatgagtgactctcaggagatctgttggttttataagtgcctggcgtttcccctgcttgcagtcactccatcttgc

SEQ ID NO: 28098 - DNA, 660 bp, Homo sapiens
  source 1..660: mol_type = unassigned DNA
cgggttcctcccgggtttctgccgggtttctccctgcggctcctgggttgttgagactcttgtgaagatggcttgcgctgccgcgcggtccccggccgaccaggacaggctgttgaaaatcctacagctacagagattcaagatgtatgttcagcagttggacttaacgtatttcttgagaaaaataaaatgtactctagagaatggaatcgtgatgtccaatacagaggcagagtccgggtccagctcaaacaggaagatgggagcctctgccttgtacagttcccatcacgtaagtcagtaatgttgtatgcagcagaaatgatacctaaactaaaaacaaggacacaaaaaacaggaggtgctgaccaaagtcttcaacaaggagagggaagtaaaaaagggaaaggaaagaaaaagaagtaacctagtatcagcatcaagtatgtggtactactgtaagagacatgaatggagacttctaatttgtatcggagggaaacagaagctttttgtttgcatcatttaactgaactgtgaacccttgtgcctctcatctttatcatcggagttgacagtgaaacaaatttacatcagaagtttgcatctcgcgtatatgccgtataaaagaatttttttgtctttcaatgcagttttttg

SEQ ID NO: 28099 - DNA, 2279 bp, Homo sapiens
  source 1..2279: mol_type = unassigned DNA
gagccgcgtagaaggaacgcggcggtgtgccccggaagcggaagtagattctcctatagaaaggctggactacgcggagtggtgacgtttcctcattgggcggaaggttcgctggcactccgttggtcttccagctggtgggagttgacgacgtggtgctgggcgttgggaccctactttatctagttcgggaagttgggttgtggggtcatacctgtctgtctgctcccagctttcttgggtttcttccgacggcgtggggcctcgctaaggaattcccggcccctcagggccacggctttagcggtgtcttttgcgagttcttcgtaagtacatcttaaagctgtcaagatggttctagcagaccttggaagaaaaataacatcagcattacgctcgttgagcaatgccaccattatcaatgaagaggtattgaatgctatgctaaaagaagtctgtaccgctttgttggaagcagatgttaatattaaactagtgaagcaactaagagaaaatgttaagtctgctattgatcttgaagagatggcatctggtcttaacaaaagaaaaatgattcagcatgctgtatttaaagaacttgtgaagcttgtagaccctggagttaaggcatggacacccactaaaggaaaacaaaatgtgattatgtttgttggattgcaagggagtggtaaaacaacaacatgttcaaagctagcatattattaccagaggaaaggttggaagacctgtttaatatgtgcagacacattcagagcaggggcttttgaccaactaaaacagaatgctaccaaagcaagaattccattttatggaagctatacagaaatggatcctgtcatcattgcttctgaaggagtagagaaatttaaaaatgaaaattttgaaattattattgttgatacaagtggccgccacaaacaagaagactctttgtttgaagaaatgcttcaagttgctaatgctatacaacctgataacattgtttatgtgatggatgcctccattgggcaggcttgtgaagcccaggctaaggcttttaaagataaagtagatgtagcctcagtaatagtgacaaaacttgatggccatgcaaaaggaggtggtgcactcagtgcagtcgctgccacaaaaagtccgattattttcattggtacaggggaacatatagatgactttgaacctttcaaaacacagccttttattagcaaacttcttggtatgggcgacattgaaggactgatagataaagtcaacgagttgaagttggatgacaatgaagcacttatagagaagttgaaacatggtcagtttacgttgcgagacatgtatgagcaatttcaaaatatcatgaaaatgggccccttcagtcagatcttggggatgatccctggttttgggacagattttatgagcaaaggaaatgaacaggagtcaatggcaaggctaaagaaattaatgacaataatggatagtatgaatgatcaagaactagacagtacggatggtgccaaagtttttagtaaacaaccaggaagaatccaaagagtagcaagaggatcgggtgtatcaacaagagatgttcaagaacttttgacacaatataccaagtttgcacagatggtaaaaaagatgggaggtatcaaaggacttttcaaaggtggcgacatgtctaagaatgtgagccagtcacagatggcaaaattgaaccaacaaatggccaaaatgatggatcctagggttcttcatcacatgggtggtatggcaggacttcagtcaatgatgaggcagtttcaacagggtgctgctggcaacatgaaaggcatgatgggattcaataatatgtaaagaaaatgccttaatataaactgactcagttgaatacctaatttgctgagacctcagcgtttcccttctttttgcgaattggggggaaagtgtatttttcttgcttatcatgcactctttccttttcttctcgcccgcttttcccctccttttctttttccttccttctttcctccctttaatataagggagaaatacatggtttttgtggaaatcattatatgtttgctttagattttcttctgttttcaccatcataacacttaagttaaatcatgatgtaaaattttagtacttaaaggtttttaattatctcgaaggccaagcattgcatttgtaaacagtcctggtcagtagttaaataatgtttcaattaaagtgctgtaaaataaacttcaaagtggttataagtt

SEQ ID NO: 28100 - DNA, 2187 bp, Homo sapiens
  source 1..2187: mol_type = unassigned DNA
gagccgcgtagaaggaacgcggcggtgtgccccggaagcggaagtagattctcctatagaaaggctggactacgcggagtggtgacgtttcctcattgggcggaaggttcgctggcactccgttggtcttccagctggtgggagttgacgacgtggtgctgggcgttgggaccctactttatctagttcgggaagttgggttgtggggtcatacctgtctgtctgctcccagctttcttgggtttcttccgacggcgtggggcctcgctaaggaattcccggcccctcagggccacggctttagcggtgtcttttgcgagttcttcgtaagtacatcttaaagctgtcaagatggttctagcagaccttggaagaaaaataacatcagcattacgctcgttgagcaatgccaccattatcaatgaagaggtctgctattgatcttgaagagatggcatctggtcttaacaaaagaaaaatgattcagcatgctgtatttaaagaacttgtgaagcttgtagaccctggagttaaggcatggacacccactaaaggaaaacaaaatgtgattatgtttgttggattgcaagggagtggtaaaacaacaacatgttcaaagctagcatattattaccagaggaaaggttggaagacctgtttaatatgtgcagacacattcagagcaggggcttttgaccaactaaaacagaatgctaccaaagcaagaattccattttatggaagctatacagaaatggatcctgtcatcattgcttctgaaggagtagagaaatttaaaaatgaaaattttgaaattattattgttgatacaagtggccgccacaaacaagaagactctttgtttgaagaaatgcttcaagttgctaatgctatacaacctgataacattgtttatgtgatggatgcctccattgggcaggcttgtgaagcccaggctaaggcttttaaagataaagtagatgtagcctcagtaatagtgacaaaacttgatggccatgcaaaaggaggtggtgcactcagtgcagtcgctgccacaaaaagtccgattattttcattggtacaggggaacatatagatgactttgaacctttcaaaacacagccttttattagcaaacttcttggtatgggcgacattgaaggactgatagataaagtcaacgagttgaagttggatgacaatgaagcacttatagagaagttgaaacatggtcagtttacgttgcgagacatgtatgagcaatttcaaaatatcatgaaaatgggccccttcagtcagatcttggggatgatccctggttttgggacagattttatgagcaaaggaaatgaacaggagtcaatggcaaggctaaagaaattaatgacaataatggatagtatgaatgatcaagaactagacagtacggatggtgccaaagtttttagtaaacaaccaggaagaatccaaagagtagcaagaggatcgggtgtatcaacaagagatgttcaagaacttttgacacaatataccaagtttgcacagatggtaaaaaagatgggaggtatcaaaggacttttcaaaggtggcgacatgtctaagaatgtgagccagtcacagatggcaaaattgaaccaacaaatggccaaaatgatggatcctagggttcttcatcacatgggtggtatggcaggacttcagtcaatgatgaggcagtttcaacagggtgctgctggcaacatgaaaggcatgatgggattcaataatatgtaaagaaaatgccttaatataaactgactcagttgaatacctaatttgctgagacctcagcgtttcccttctttttgcgaattggggggaaagtgtatttttcttgcttatcatgcactctttccttttcttctcgcccgcttttcccctccttttctttttccttccttctttcctccctttaatataagggagaaatacatggtttttgtggaaatcattatatgtttgctttagattttcttctgttttcaccatcataacacttaagttaaatcatgatgtaaaattttagtacttaaaggtttttaattatctcgaaggccaagcattgcatttgtaaacagtcctggtcagtagttaaataatgtttcaattaaagtgctgtaaaataaacttcaaagtggttataagtt

SEQ ID NO: 28101 - DNA, 572 bp, Homo sapiens
  source 1..572: mol_type = unassigned DNA
agtcacacctctatctctcatctttccgctcttagctgggagtgctccgcctagtcacttttcttaaggtggctcgtcgaggcctgacttcttccccgaaatcacgtccctagacagcctcctattttaccactaactttactcctgcagttattcagcggtaggaaactgaaaccaaaaaccagtgtaagcaagtaaacatctaaactgtttcaggagccgcgtagaaggaacgcggcggtgtgccccggaagcggaagtagattctcctatagaaaggctggactacgcggagtggtgacgtttcctcattgggcggaagctttcttgggtttcttccgacggcgtggggcctcgctaaggaattcccggcccctcagggccacggctttagcggtgtcttttgcgagttcttcgtaagtacatcttaaagctgtcaagatggttctagcagaccttggaagaaaaataacatcagcattacgctcgttgagcaatgccaccattatcaatgaagaggtattgaatgctatgctaaaagaagtctgtaccgctttgttggaagcagatgt

SEQ ID NO: 28102 - DNA, 558 bp, Homo sapiens
  source 1..558: mol_type = unassigned DNA
atctttccgctcttagctgggagtgctccgcctagtcacttttcttaaggtggctcgtcgaggcctgacttcttccccgaaatcacgtccctagacagcctcctattttaccactaactttactcctgcagttattcagcggtaggaaactgaaaccaaaaaccagtgtaagcaagtaaacatctaaactgtttcaggagccgcgtagaaggaacgcggcggtgtgccccggaagcggaagtagattctcctatagaaaggctggactacgcggagtggtgacgtttcctcattgggcggaagagttcttcgtaagtacatcttaaagctgtcaagatggttctagcagaccttggaagaaaaataacatcagcattacgctcgttgagcaatgccaccattatcaatgaagaggtattgaatgctatgctaaaagaagtctgtaccgctttgttggaagcagatgttaatattaaactagtgaagcaactaagagaaaatgttaagtctgctattgatcttgaagagatggcatctggtcttaacaaaagaaaaatg

SEQ ID NO: 28103 - DNA, 2327 bp, Homo sapiens
  source 1..2327: mol_type = unassigned DNA
gagatccaagacgcaactcccaccgccaggcggtcgcctcagaagggagccgcgtagaaggaacgcggcggtgtgccccggaagcggaagtagattctcctatagaaaggctggactacgcggagtggtgacgtttcctcattgggcggaaggttcgctggcactccgttggtcttccagctggtgggagttgacgacgtggtgctgggcgttgggaccctactttatctagttcgggaagttgggttgtggggtcatacctgtctgtctgctcccagctttcttgggtttcttccgacggcgtggggcctcgctaaggaattcccggcccctcagggccacggctttagcggtgtcttttgcgagttcttcgtaagtacatcttaaagctgtcaagatggttctagcagaccttggaagaaaaataacatcagcattacgctcgttgagcaatgccaccattatcaatgaagaggtattgaatgctatgctaaaagaagtctgtaccgctttgttggaagcagatgttaatattaaactagtgaagcaactaagagaaaatgttaagtctgctattgatcttgaagagatggcatctggtcttaacaaaagaaaaatgattcagcatgctgtatttaaagaacttgtgaagcttgtagaccctggagttaaggcatggacacccactaaaggaaaacaaaatgtgattatgtttgttggattgcaagggagtggtaaaacaacaacatgttcaaagctagcatattattaccagaggaaaggttggaagacctgtttaatatgtgcagacacattcagagcaggggcttttgaccaactaaaacagaatgctaccaaagcaagaattccattttatggaagctatacagaaatggatcctgtcatcattgcttctgaaggagtagagaaatttaaaaatgaaaattttgaaattattattgttgatacaagtggccgccacaaacaagaagactctttgtttgaagaaatgcttcaagttgctaatgctatacaacctgataacattgtttatgtgatggatgcctccattgggcaggcttgtgaagcccaggctaaggcttttaaagataaagtagatgtagcctcagtaatagtgacaaaacttgatggccatgcaaaaggaggtggtgcactcagtgcagtcgctgccacaaaaagtccgattattttcattggtacaggggaacatatagatgactttgaacctttcaaaacacagccttttattagcaaacttcttggtatgggcgacattgaaggactgatagataaagtcaacgagttgaagttggatgacaatgaagcacttatagagaagttgaaacatggtcagtttacgttgcgagacatgtatgagcaatttcaaaatatcatgaaaatgggccccttcagtcagatcttggggatgatccctggttttgggacagattttatgagcaaaggaaatgaacaggagtcaatggcaaggctaaagaaattaatgacaataatggatagtatgaatgatcaagaactagacagtacggatggtgccaaagtttttagtaaacaaccaggaagaatccaaagagtagcaagaggatcgggtgtatcaacaagagatgttcaagaacttttgacacaatataccaagtttgcacagatggtaaaaaagatgggaggtatcaaaggacttttcaaaggtggcgacatgtctaagaatgtgagccagtcacagatggcaaaattgaaccaacaaatggccaaaatgatggatcctagggttcttcatcacatgggtggtatggcaggacttcagtcaatgatgaggcagtttcaacagggtgctgctggcaacatgaaaggcatgatgggattcaataatatgtaaagaaaatgccttaatataaactgactcagttgaatacctaatttgctgagacctcagcgtttcccttctttttgcgaattggggggaaagtgtatttttcttgcttatcatgcactctttccttttcttctcgcccgcttttcccctccttttctttttccttccttctttcctccctttaatataagggagaaatacatggtttttgtggaaatcattatatgtttgctttagattttcttctgttttcaccatcataacacttaagttaaatcatgatgtaaaattttagtacttaaaggtttttaattatctcgaaggccaagcattgcatttgtaaacagtcctggtcagtagttaaataatgtttcaattaaagtgctgtaaaataaacttcaaagtggttataagttaa

SEQ ID NO: 28104 - DNA, 2398 bp, Homo sapiens
  source 1..2398: mol_type = unassigned DNA
gcaggggcaagatggctgctgagaagcaggtcccaggcggcggcggcggcggcggcagtggcggcggcggtggcagtggcggcggcggtagcggcggtggacgtggtgccggaggggaagaaaataaagaaaacgaacgcccttcggccggatcgaaggcaaacaaagaatttggggatagcctgagtttggagattcttcagattattaaggaatcccagcagcagcatggtttacggcatggagattttcagaggtacaggggctactgttcccgtagacaaagacgtcttcgaaaaacactcaacttcaagatgggtaacagacacaaattcacagggaagaaagtgactgaagagcttctgaccgataatagatacttgcttctggttctgatggatgctgaaagagcctggagctacgccatgcagctgaaacaggaagccaacactgaaccccgaaaacggtttcacttgttatctcgcctacgcaaagccgtgaagcatgcagaggaattggaacgcttgtgtgagagcaatcgcgtggatgccaagaccaaattagaggctcaggcttacacagcttacctctcaggaatgctacgttttgaacatcaagaatggaaagctgccattgaggcttttaacaaatgcaaaactatctatgagaagctagccagtgctttcacagaggagcaggctgtgctgtataaccaacgtgtggaagagatttcacccaacatccgctattgtgcatataatattggtgagactcgagccaaacaggcagctaccatgagtgaagtggagtggagagggagaacggttccagtgaagattgacaaagtgcgcattttcttattaggactggctgataacgaagcagctattgtccaggctgaaagcgaagaaactaaggagcgcctgtttgaatcaatgctcagcgagtgtcgggacgccatccaggtggttcgggaggagctcaagccagatcagaaacagagagattatatccttgaaggagagccagggaaggtgtctaatcttcaatacttgcatagctacctgacttacatcaagctatcaacggcaatcaagcgtaatgagaacatggccaaaggtctgcagagggctctgctgcagcagcagccagaggatgacagcaagcgctcaccccggccccaggacctgatccgactctatgacatcatcttacagaatctggtggaattgctccagcttcctggtttagaggaagacaaagccttccagaaagagataggcctcaagactctggtgttcaaagcttacaggtgttttttcattgctcagtcctatgtgctggtgaagaagtggagcgaagcccttgtcctgtatgacagagtcctgaaatatgcaaatgaagtaaattctgatgctggcgccttcaagaacagcctaaaggacctgcctgatgtgcaagagctcatcactcaagtgcggtcagagaagtgctccctgcaggccgcagccatccttgatgcaaacgacgctcatcaaacagagacctcctcctcccaagtcaaggacaataagcctctggttgaacggtttgagacattctgcctggacccttcccttgtcaccaagcaagccaaccttgtgcacttcccaccaggcttccagcccattccctgcaagcctttgttctttgacctggccctcaaccatgtggctttcccaccccttgaggacaagttggaacagaagaccaagagtggcctcactggatacatcaagggcatctttggattcaggagctaaccaggctcttcctcgggggcgggggagattctgactcttaatctgtattgtgagaaaatcccagcaagttccatgatattaaatccaggtctgcattggcccggggcaagagtttaacatcttcggccctgcattcctacatcttgtgtctgtacacgttcttaagcagcgtgtcaggagagcaccctgttgtcttctggtaaatgtgtgcagggtcatcctgtctcctgtacctcctgggaaaggggccgctgctgtctggtgccctgtgagctgtgattgattgcctttggtcagtaatgcgttcaggagtccacaccaggcacagatggggccttgaaacgctttgtcatgcttcttcagtaccatggatttgaaatgaactcatccttgctgtgagcatccaggagcccttgagaagtttatctatgactatgaaactggcaacgtcaccccagaattacggtcagccttattccccttcacctcccagtgaacgctaagaagtttcagacaagcagagagctctatttttagaagaaatatgttacactcagaaatgatgaaaccaaatcttatattaaaaggcaaagatg

SEQ ID NO: 28105 - DNA, 2515 bp, Homo sapiens
  source 1..2515: mol_type = unassigned DNA
ccctatcccgtcttgctctgcggcgcaggggcaagatggctgctgagaagcaggtcccaggcggcggcggcggcggcggcagtggcggcggcggtggcagtggcggcggcggtagcggcggtggacgtggtgccggaggggaagaaaataaagaaaacgaacgcccttcggccggatcgaaggcaaacaaagaatttggggatagcctgagtttggagattcttcagattattaaggaatcccagcagcagcatggtttacggcatggagattttcagaggtacaggggctactgttcccgtagacaaagacgtcttcgaaaaacactcaacttcaagatgggtaacagacacaaattcacagggaagaaagtgactgaagagcttctgaccgataatagatacttgcttctggttctgatggatgctgaaagagcctggagctacgccatgcagctgaaacaggaagccaacactgaaccccgaaaacggtttcacttgttatctcgcctacgcaaagccgtgaagcatgcagaggaattggaacgcttgtgtgagagcaatcgcgtggatgccaagaccaaattagaggctcaggcttacacagcttacctctcaggaatgctacgttttgaacatcaagaatggaaagctgccattgaggcttttaacaaatgcaaaactatctatgagaagctagccagtgctttcacagaggagcaggctgtgctgtataaccaacgtgtggaagagatttcacccaacatccgctattgtgcatataatattggggaccagtcagccatcaatgaactcatgcagatgagattgaggtctgggggcactgagggtctcttggctgaaaaattggaggctttgatcactcagactcgagccaaacaggcagctaccatgagtgaagtggagtggagagggagaacggttccagtgaagattgacaaagtgcgcattttcttattaggactggctgataacgaagcagctattgtccaggctgaaagcgaagaaactaaggagcgcctgtttgaatcaatgctcagcgagtgtcgggacgccatccaggtggttcgggaggagctcaagccagatcagaaacagagagattatatccttgaaggagagccagggaaggtgtctaatcttcaatacttgcatagctacctgacttacatcaagctatcaacggcaatcaagcgtaatgagaacatggccaaaggtctgcagagggctctgctgcagcagcagccagaggatgacagcaagcgctcaccccggccccaggacctgatccgactctatgacatcatcttacagaatctggtggaattgctccagcttcctggtttagaggaagacaaagccttccagaaagagataggcctcaagactctggtgttcaaagcttacaggtgttttttcattgctcagtcctatgtgctggtgaagaagtggagcgaagcccttgtcctgtatgacagagtcctgaaatatgcaaatgaagtaaattctgatgctggcgccttcaagaacagcctaaaggacctgcctgatgtgcaagagctcatcactcaagtgcggtcagagaagtgctccctgcaggccgcagccatccttgatgcaaacgacgctcatcaaacagagacctcctcctcccaagtcaaggacaataagcctctggttgaacggtttgagacattctgcctggacccttcccttgtcaccaagcaagccaaccttgtgcacttcccaccaggcttccagcccattccctgcaagcctttgttctttgacctggccctcaaccatgtggctttcccaccccttgaggacaagttggaacagaagaccaagagtggcctcactggatacatcaagggcatctttggattcaggagctaaccaggctcttcctcgggggcgggggagattctgactcttaatctgtattgtgagaaaatcccagcaagttccatgatattaaatccaggtctgcattggcccggggcaagagtttaacatcttcggccctgcattcctacatcttgtgtctgtacacgttcttaagcagcgtgtcaggagagcaccctgttgtcttctggtaaatgtgtgcagggtcatcctgtctcctgtacctcctgggaaaggggccgctgctgtctggtgccctgtgagctgtgattgattgcctttggtcagtaatgcgttcaggagtccacaccaggcacagatggggccttgaaacgctttgtcatgcttcttcagtaccatggatttgaaatgaactcatccttgctgtgagcatccaggagcccttgagaagtttatctatgactatgaaactggcaacgtcaccccagaattacggtcagccttattccccttcacctcccagtgaacgctaagaagtttcagacaagcagagagctctatttttagaagaaatatgttacactcagaaatgatgaaaccaaatcttatattaaaaggcaaagatg

SEQ ID NO: 28106 - DNA, 1941 bp, Homo sapiens
  source 1..1941: mol_type = unassigned DNA
ggcaagatggctgctgagaagcaggtcccaggcggcggcggcggcggcggcagtggcggcggcggtggcagtggcggcggcggtagcggcggtggacgtggtgccggaggggaagaaaataaagaaaacgaacgcccttcggccggatcgaaggggctactgttcccgtagacaaagacgtcttcgaaaaacactcaacttcaagatgggtaacagacacaaattcacagggaagaaagtgactgaagagcttctgaccgataatagatacttgcttctggttctgatggatgctgaaagagcctggagctacgccatgcagctgaaacaggaagccaacactgaaccccgaaaacggtttcacttgttatctcgcctacgcaaagccgtgaagcatgcagaggaattggaacgcttgtgtgagagcaatcgcgtggatgccaagaccaaattagaggctcaggcttacacagcttacctctcaggaatgctacgttttgaacatcaagaatggaaagctgccattgaggcttttaacaaatgcaaaactatctatgagaagctagccagtgctttcacagaggagcaggctgtgctgtataaccaacgtgtggaagagatttcacccaacatccgctattgtgcatataatattggggaccagtcagccatcaatgaactcatgcagatgagattgaggtctgggggcactgagggtctcttggctgaaaaattggaggctttgatcactcagactcgagccaaacaggcagctaccatgagtgaagtggagtggagagggagaacggttccagtgaagattgacaaagtgcgcattttcttattaggactggctgataacgaagcagctattgtccaggctgaaagcgaagaaactaaggagcgcctgtttgaatcaatgctcagcgagtgtcgggacgccatccaggtggttcgggaggagctcaagccagatcagaaacagagagattatatccttgaaggagagccagggaaggtgtctaatcttcaatacttgcatagctacctgacttacatcaagctatcaacggcaatcaagcgtaatgagaacatggccaaaggtctgcagagggctctgctgcagcagcagccagaggatgacagcaagcgctcaccccggccccaggacctgatccgactctatgacatcatcttacagaatctggtggaattgctccagcttcctggtttagaggaagacaaagccttccagaaagagataggcctcaagactctggtgttcaaagcttacaggtgttttttcattgctcagtcctatgtgctggtgaagaagtggagcgaagcccttgtcctgtatgacagagtcctgaaatatgcaaatgaagtaaattctgatgctggcgccttcaagaacagcctaaaggacctgcctgatgtgcaagagctcatcactcaagtgcggtcagagaagtgctccctgcaggccgcagccatccttgatgcaaacgacgctcatcaaacagagacctcctcctcccaagtcaaggacaataagcctctggttgaacggtttgagacattctgcctggacccttcccttgtcaccaagcaagccaaccttgtgcacttcccaccaggcttccagcccattccctgcaagcctttgttctttgacctggccctcaaccatgtggctttcccaccccttgaggacaagttggaacagaagaccaagagtggcctcactggatacatcaagggcatctttggattcaggagctaaccaggctcttcctcgggggcgggggagattctgactcttaatctgtattgtgagaaaatcccagcaagttccatgatattaaatccaggtctgcattggcccggggcaagagtttaacatcttcggccctgcattcctacatcttgtgtctgtac

SEQ ID NO: 28107 - DNA, 1236 bp, Homo sapiens
  source 1..1236: mol_type = unassigned DNA
atccgctattgtgcatataatattggggaccagtcagccatcaatgaactcatgcagatgagattgaggtctgggggcactgagggtctcttggctgaaaaattggaggctttgatcactcagactcgagccaaacaggcagctaccatgagtgaagtggagtggagagggagaacggttccagtgaagattgacaaagtgcgcattttcttattaggactggctgataacgaagcagctattgtccaggctgaaagcgaagaaactaaggagcgcctgtttgaatcaatgctcagcgagtgtcgggacgccatccaggtggttcgggaggagctcaagccagatcagaaacagagagattatatccttgaaggagagccagggaaggtgtctaatcttcaatacttgcatagctacctgacttacatcaagctatcaacggcaatcaagcgtaatgagaacatggccaaaggtctgcagagggctctgctgcagcagcagccagaggatgacagcaagcgctcaccccggccccaggacctgatccgactctatgacatcatcttacagaatctggtggaattgctccagcttcctggtttagaggaagacaaagccttccagaaagagataggcctcaagactctggtgttcaaagcttacaggtgttttttcattgctcagtcctatgtgctggtgaagaagtggagcgaagcccttgtcctgtatgacagagtcctgaaatatgcaaatgaagtaaattctgatgctggcgccttcaagaacagcctaaaggacctgcctgatgtgcaagagctcatcactcaagtgcggtcagagaagtgctccctgcaggccgcagccatccttgatgcaaacgacgctcatcaaacagagacctcctcctcccaagtcaaggacaataagcctctggttgaacggtttgagtccacaccaggcacagatggggccttgaaacgctttgtcatgcttcttcagtaccatggatttgaaatgaactcatccttgctgtgagcatccaggagcccttgagaagtttatctatgactatgaaactggcaacgtcaccccagaattacggtcagccttattccccttcacctcccagtgaacgctaagaagtttcagacaagcagagagctctatttttagaagaaatatgttacactcagaaatgatgaaaccaaatcttatattaaaaggcaaagatgacgg

SEQ ID NO: 28108 - DNA, 2386 bp, Homo sapiens
  source 1..2386: mol_type = unassigned DNA
gcggcgcaggggcaagatggctgctgagaagcaggtcccaggcggcggcggcggcggcggcagtggcggcggcggtggcagtggcggcggcggtagcggcggtggacgtggtgccggaggggaagaaaataaagaaaacgaacgcccttcggccggatcgaaggcaaacaaagaatttggggatagcctgagtttggagattcttcagattattaaggaatcccagcagcagcatggtttacggcatggagattttcagaggtacagatacttgcttctggttctgatggatgctgaaagagcctggagctacgccatgcagctgaaacaggaagccaacactgaaccccgaaaacggtttcacttgttatctcgcctacgcaaagccgtgaagcatgcagaggaattggaacgcttgtgtgagagcaatcgcgtggatgccaagaccaaattagaggctcaggcttacacagcttacctctcaggaatgctacgttttgaacatcaagaatggaaagctgccattgaggcttttaacaaatgcaaaactatctatgagaagctagccagtgctttcacagaggagcaggctgtgctgtataaccaacgtgtggaagagatttcacccaacatccgctattgtgcatataatattggggaccagtcagccatcaatgaactcatgcagatgagattgaggtctgggggcactgagggtctcttggctgaaaaattggaggctttgatcactcagactcgagccaaacaggcagctaccatgagtgaagtggagtggagagggagaacggttccagtgaagattgacaaagtgcgcattttcttattaggactggctgataacgaagcagctattgtccaggctgaaagcgaagaaactaaggagcgcctgtttgaatcaatgctcagcgagtgtcgggacgccatccaggtggttcgggaggagctcaagccagatcagaaacagagagattatatccttgaaggagagccagggaaggtgtctaatcttcaatacttgcatagctacctgacttacatcaagctatcaacggcaatcaagcgtaatgagaacatggccaaaggtctgcagagggctctgctgcagcagcagccagaggatgacagcaagcgctcaccccggccccaggacctgatccgactctatgacatcatcttacagaatctggtggaattgctccagcttcctggtttagaggaagacaaagccttccagaaagagataggcctcaagactctggtgttcaaagcttacaggtgttttttcattgctcagtcctatgtgctggtgaagaagtggagcgaagcccttgtcctgtatgacagagtcctgaaatatgcaaatgaagtaaattctgatgctggcgccttcaagaacagcctaaaggacctgcctgatgtgcaagagctcatcactcaagtgcggtcagagaagtgctccctgcaggccgcagccatccttgatgcaaacgacgctcatcaaacagagacctcctcctcccaagtcaaggacaataagcctctggttgaacggtttgagacattctgcctggacccttcccttgtcaccaagcaagccaaccttgtgcacttcccaccaggcttccagcccattccctgcaagcctttgttctttgacctggccctcaaccatgtggctttcccaccccttgaggacaagttggaacagaagaccaagagtggcctcactggatacatcaagggcatctttggattcaggagctaaccaggctcttcctcgggggcgggggagattctgactcttaatctgtattgtgagaaaatcccagcaagttccatgatattaaatccaggtctgcattggcccggggcaagagtttaacatcttcggccctgcattcctacatcttgtgtctgtacacgttcttaagcagcgtgtcaggagagcaccctgttgtcttctggtaaatgtgtgcagggtcatcctgtctcctgtacctcctgggaaaggggccgctgctgtctggtgccctgtgagctgtgattgattgcctttggtcagtaatgcgttcaggagtccacaccaggcacagatggggccttgaaacgctttgtcatgcttcttcagtaccatggatttgaaatgaactcatccttgctgtgagcatccaggagcccttgagaagtttatctatgactatgaaactggcaacgtcaccccagaattacggtcagccttattccccttcacctcccagtgaacgctaagaagtttcagacaagcagagagctctatttttagaagaaatatgttacactcagaaatgatgaaaccaaatcttatattaaaaggcaaagatgacgg

SEQ ID NO: 28109 - DNA, 1974 bp, Homo sapiens
  source 1..1974: mol_type = unassigned DNA
ccctatcccgtcttgctctgcggcgcaggggcaagatggctgctgagaagcaggtcccaggcggcggcggcggcggcggcagtggcggcggcggtggcagtggcggcggcggtagcggcggtggacgtggtgccggaggggaagaaaataaagaaaacgaacgcccttcggccggatcgaaggcaaacaaagaatttggggatagcctgagtttggagattcttcagattattaaggaatcccagcagcagcatggtttacggcatggagattttcagaggtacaggggctactgttcccgtagacaaagacgtcttcgaaaaacactcaacttcaagatgggtaacagacacaaattcacagggaagaaagtgactgaagagcttctgaccgataatagatacttgcttctggttctgatggatgctgaaagagcctggagctacgccatgcagctgaaacaggaagccaacactgaaccccgaaaacggtttcacttgttatctcgcctacgcaaagccgtgaagcatgcagaggaattggaacgcttgtgtgagagcaatcgcgtggatgccaagaccaaattagaggctcaggcttacacagcttacctctcaggaatgctacgttttgaacatcaagaatggaaagctgccattgaggcttttaacaaatgcaaaactatctatgagaagctagccagtgctttcacagaggagcaggctgtgctgtataaccaacgtgtggaagagatttcacccaacatccgctattgtgcatataatattggggaccagtcagccatcaatgaactcatgcagatgagattgaggtctgggggcactgagggtctcttggctgaaaaattggaggctttgatcactcagactcgagccaaacaggcagctaccatgagtgaagtggagtggagagggagaacggttccagtgaagattgacaaagtgcgcattttcttattaggactggctgataacgaagcagctattgtccaggctgaaagcgaagaaactaaggagcgcctgtttgaatcaatgctcagcgagtgtcgggacgccatccaggtggttcgggaggagctcaagccagatcagagagacctcctcctcccaagtcaaggacaataagcctctggttgaacggtttgagacattctgcctggacccttcccttgtcaccaagcaagccaaccttgtgcacttcccaccaggcttccagcccattccctgcaagcctttgttctttgacctggccctcaaccatgtggctttcccaccccttgaggacaagttggaacagaagaccaagagtggcctcactggatacatcaagggcatctttggattcaggagctaaccaggctcttcctcgggggcgggggagattctgactcttaatctgtattgtgagaaaatcccagcaagttccatgatattaaatccaggtctgcattggcccggggcaagagtttaacatcttcggccctgcattcctacatcttgtgtctgtacacgttcttaagcagcgtgtcaggagagcaccctgttgtcttctggtaaatgtgtgcagggtcatcctgtctcctgtacctcctgggaaaggggccgctgctgtctggtgccctgtgagctgtgattgattgcctttggtcagtaatgcgttcaggagtccacaccaggcacagatggggccttgaaacgctttgtcatgcttcttcagtaccatggatttgaaatgaactcatccttgctgtgagcatccaggagcccttgagaagtttatctatgactatgaaactggcaacgtcaccccagaattacggtcagccttattccccttcacctcccagtgaacgctaagaagtttcagacaagcagagagctctatttttagaagaaatatgttacactcagaaatgatgaaaccaaatcttatattaaaaggcaaagatgacgg

SEQ ID NO: 28110 - DNA, 1706 bp, Homo sapiens
  source 1..1706: mol_type = unassigned DNA
ccttcattgctttttaggatgtttgtaaaattcccagtgggaacttagagctttgtgggagcagtggggaggttttttggtttcagcaccttgatgcagaggcttagttaaagggagcagaggtgatacgtggcagtcaagaggttttaaacttgaactgtaccctaccgacaggaaaagaggcaaatcctgtgtagctggctgaaagcgaagaaactaaggagcgcctgtttgaatcaatgctcagcgagtgtcgggacgccatccaggtggttcgggaggagctcaagccagatcagaaacagagagattatatccttgaaggagagccagggaaggtgtctaatcttcaatacttgcatagctacctgacttacatcaagctatcaacggcaatcaagcgtaatgagaacatggccaaaggtctgcagagggctctgctgcagcagcagccagaggatgacagcaagcgctcaccccggccccaggacctgatccgactctatgacatcatcttacagaatctggtggaattgctccagcttcctggtttagaggaagacaaagccttccagaaagagataggcctcaagactctggtgttcaaagcttacaggtgttttttcattgctcagtcctatgtgctggtgaagaagtggagcgaagcccttgtcctgtatgacagagtcctgaaatatgcaaatgaagtaaattctgatgctggcgccttcaagaacagcctaaaggacctgcctgatgtgcaagagctcatcactcaagtgcggtcagagaagtgctccctgcaggccgcagccatccttgatgcaaacgacgctcatcaaacagagacctcctcctcccaagtcaaggacaataagcctctggttgaacggtttgagacattctgcctggacccttcccttgtcaccaagcaagccaaccttgtgcacttcccaccaggcttccagcccattccctgcaagcctttgttctttgacctggccctcaaccatgtggctttcccaccccttgaggacaagttggaacagaagaccaagagtggcctcactggatacatcaagggcatctttggattcaggagctaaccaggctcttcctcgggggcgggggagattctgactcttaatctgtattgtgagaaaatcccagcaagttccatgatattaaatccaggtctgcattggcccggggcaagagtttaacatcttcggccctgcattcctacatcttgtgtctgtacacgttcttaagcagcgtgtcaggagagcaccctgttgtcttctggtaaatgtgtgcagggtcatcctgtctcctgtacctcctgggaaaggggccgctgctgtctggtgccctgtgagctgtgattgattgcctttggtcagtaatgcgttcaggagtccacaccaggcacagatggggccttgaaacgctttgtcatgcttcttcagtaccatggatttgaaatgaactcatccttgctgtgagcatccaggagcccttgagaagtttatctatgactatgaaactggcaacgtcaccccagaattacggtcagccttattccccttcacctcccagtgaacgctaagaagtttcagacaagcagagagctctatttttagaagaaatatgttacactcagaaatgatgaaaccaaatcttatattaaaaggcaaagatgacgg

SEQ ID NO: 28111 - DNA, 3983 bp, Homo sapiens
  source 1..3983: mol_type = unassigned DNA
gctaagtaacttgtttattgtcagacatctagtgagtcgcagagccagggaactgaccacgggcattttcaccccattacccttccagcttattgccgactgctcccgaagggagcgaaaaggacaggcaaagggtttcaccaaaccctttgtaatgggagattcttgccttcttacctttcctcacgtttgcttctctgccagaatgtcttcccgcactttccccagaacccaagttctcctaatcatctttcaagatccctttccctcaaccacagatgagccgtgcctatttctccttcaaatgactccctatggcttctagttggtagtcttttatttaccacctcatagtccttttatttatatcccataaatgatcgtccggccccgcaccgtgggaccaggacgctgcctcgaccatggcggtctcctggaaacaggctgctttgagccgaaactggtgaccgtttcccaaccccgtccaggagtccgacgcctcttttctccaggccaacttcaagtgaggtgtatcaactctatccgcacaaatttcttgccacgagagcagaagattatgatctctgatgctgccttagggctgaagacactcccaactcggcgacgcttagcaatcatcgacttcctcctcctcttggctgcctcggagatcctgttccggggcagaggtctccccgccccgcccctcgtctcctccaagatggcgagcggcggcagcgggggggtgtcagtacctgcgctgtggagtgaagtgaaccggtatggccagaacggcgacttcacgcgcgctctcaagaccgtcaataagatactacagatcaacaaagatgacgtaactgccctgcattgtaaagtggtatgccttatccagaatggaagtttcaaggaagctttgaatgtcatcaatactcacaccaaagtgttagccaataactctctctcctttgaaaaggcatattgcgagtacaggctgaacagaattgagaatgccttgaagacaatagaaagtgccaaccagcagacagacaaactgaaggagctttatggacaagtgttataccgtttggaacgctatgatgaatgcttagcagtgtatagagatctcgtccgaaactcccaagatgattatgatgaggagaggaaaacaaacctttcagcagttgttgcagctcaaagcaattgggaaaaagtggttccagagaacctgggcctccaagaaggcacacatgagctgtgctacaacactgcatgtgcactgataggccaaggccagctgaaccaggccatgaaaatcctacaaaaagctgaagatctttgccgccgttcattatcagaagacactgatgggactgaggaagacccacaggcagaactggccatcattcatggtcagatggcttatattctgcagcttcagggtcgaacagaggaggctttgcaactttacaatcaaataataaaactaaaaccaacagatgtgggattactagctgtaattgcaaataacatcattaccattaacaaggaccaaaatgtctttgactccaagaagaaagtgaaattaaccaatgcggaaggagtagagtttaagctttccaagaaacaactacaagctatagaatttaacaaagctttacttgctatgtacacaaaccaggctgaacaatgccgcaaaatatctgccagtttacagtcccaaagtcccgagcatctcttacctgtgttaatccaagctgcccagctctgccgtgaaaagcagcacacaaaagcaatagagctgcttcaggaattttcagatcagcatccagaaaatgcagctgaaattaagctgaccatggcacagttgaaaatttctcaaggtaatatttctaaagcatgtctaatattgagaagcatagaggagttaaagcataaaccaggcatggtatctgcattagttaccatgtatagccatgaagaagatattgatagtgccattgaggtcttcacacaagctatccagtggtatcaaaaccatcagccaaaatctcctgctcatttgtccttgataagagaagctgcaaacttcaaactcaaatatgggcggaagaaggaggcaattagtgacctacaacagctgtggaaacaaaatccaaaagatattcacaccctggcacagcttatttctgcttactcacttgtagatccagagaaagccaaagctcttagtaaacacttgccatcgtcagatagtatgtctctaaaagtagatgttgaggctcttgaaaattctgctggtgctacatacattcggaagaagggtggaaaagttactggagatagtcaaccaaaggaacaaggacagggagatttgaaaaagaagaaaaagaaaaagaagggaaaattgcctaagaattatgacccaaaagttaccccagatccagaaagatggctgccaatgcgagaacgttcttactaccggggaagaaagaagggtaaaaagaaggatcagattggaaaagggacccagggagcaactgcaggagcttcatctgaactggatgccagtaaaactgtgagcagcccacccacctccccaagacctggcagtgctgcaacagtatctgcctctacaagtaacatcatacccccaagacaccagaaacctgcaggggctccagcaacaaaaaagaaacagcaacagaaaaagaagaaaggtggaaaaggtggctggtgatgagaatattcttgttgcaggctgtttttaaactagtgtcagtgacactaggaatataataaaggtaacacagcaagaagcacagaactactccctcttcatctccatattttcataatttcttgtgtttcaaatagggaaacatcttcctcaaagtctgcctagtgagatatggcctactggttgcctcatagctttgtacagattatgaggactgaaaataattgggcatttacccatcttggtatctgttgtatcctttatctgtgtgtgctgatttgatcttttttcagtttcacataccttatctaaggtttcccaggatttaaacagaaactacttctatgatttcagctggagtctgaagatacttgtttctgttcaagtcccactttaaattatgtcttaggagactgaaagtggaatcttctgagcattcctaaatatctgcttagaaatatcatgtgataaagagggaccttcttaatacactgatgttcttcactaaatggatggccacaagaaaaataaagtaaatgtcttaaataatttaaccataaattttctgtcatgtgatactggaatatgggatacttttcatgtttatatatatatatatatgtatatatatatacatatatatatatatataaacatgaaatatatatatatggctcctttgtgccccatgtcattttcagattatggtagcatgctgatacagcaccatgaaagaactcaaggaaaatatatcaatgtaagaagttcactcttagacccagtgttctgaggtcacatgggtttggactgtctcaatcagaaagattaatgactgttatcaagaacatgaacattggcttcctccatagagaagaaatcagtatctgagttgcataccaggcagtattaaaatctaacaggtctgtttggcccattgatagatactcaaatggtgtctccttctggttatggattttgaccattgattacctttctcaatgtaatgaagtattttacagtcaatttgtggtgtaaatgttgctcttgtctttccttgcttacaaactactttcacattgaacagctgtgagacagacatattgagatgcctgcccttgttagtattcattttatgctgcccaagatatcatttaatttagacttaacaagtatttccttgtgattatattactctgtccttgttaataaagtgctgctgtgtttgactctgaacatactaccaaaa

SEQ ID NO: 28112 - DNA, 3688 bp, Homo sapiens
  source 1..3688: mol_type = unassigned DNA
gggcagaggtctccccgccccgcccctcgtctcctccaagatggcgagcggcggcagcgggggggtgtcagtacctgcgctgtggagtgaagtgaaccggtatggccagaacggcgacttcacgcgcgctctcaagaccgtcaataagatactacagatcaacaaagatgacgtaactgccctgcattgtaaagtggtatgccttatccagaatggaagtttcaaggaagctttgaatgtcatcaatactcacaccaaagtgttagccaataactctctctcctttgaaaaggcatattgcgagtacaggctgaacagaattgagaatgccttgaagacaatagaaagtgccaaccagcagacagacaaactgaaggagctttatggacaagtgttataccgtttggaacgctatgatgaatgcttagcagtgtatagagatctcgtccgaaactcccaagatgattatgatgaggagaggaaaacaaacctttcagcagttgttgcagctcaaagcaattgggaaaaagtggttccagagaacctgggcctccaagaaggcacacatgagctgtgctacaacactgcatgtgcactgataggccaaggccagctgaaccaggccatgaaaatcctacaaaaagctgaagatctttgccgccgttcattatcagaagacactgaccaaaatgtctttgactccaagaagaaagtgaaattaaccaatgcggaaggagtagagtttaagctttccaagaaacaactacaagctatagaatttaacaaagctttacttgctatgtacacaaaccaggctgaacaatgccgcaaaatatctgccagtttacagtcccaaagtcccgagcatctcttacctgtgttaatccaagctgcccagctctgccgtgaaaagcagcacacaaaagcaatagagctgcttcaggaattttcagatcagcatccagaaaatgcagctgaaattaagctgaccatggcacagttgaaaatttctcaaggtaatatttctaaagcatgtctaatattgagaagcatagaggagttaaagcataaaccaggcatggtatctgcattagttaccatgtatagccatgaagaagatattgatagtgccattgaggtcttcacacaagctatccagtggtatcaaaaccatcagccaaaatctcctgctcatttgtccttgataagagaagctgcaaacttcaaactcaaatatgggcggaagaaggaggcaattagtgacctacaacagctgtggaaacaaaatccaaaagatattcacaccctggcacagcttatttctgcttactcacttgtagatccagagaaagccaaagctcttagtaaacacttgccatcgtcagatagtatgtctctaaaagtagatgttgaggctcttgaaaattctgctggtgctacatacattcggaagaagggtggaaaagttactggagatagtcaaccaaaggaacaaggacagggagatttgaaaaagaagaaaaagaaaaagaagggaaaattgcctaagaattatgacccaaaagttaccccagatccagaaagatggctgccaatgcgagaacgttcttactaccggggaagaaagaagggtaaaaagaaggatcagattggaaaagggacccagggagcaactgcaggagcttcatctgaactggatgccagtaaaactgtgagcagcccacccacccaagacctggcagtgctgcaacagtatctgcctctacaagtaacatcatacccccaagacaccagaaacctgcaggggctccagcaacaaaaaagaaacagcaacagaaaaagaagaaaggtggaaaaggtggctggtgatgagaatattcttgttgcaggctgtttttaaactagtgtcagtgacactaggaatataataaaggtaacacagcaagaagcacagaactactccctcttcatctccatattttcataatttcttgtgtttcaaatagggaaacatcttcctcaaagtctgcctagtgagatatggcctactggttgcctcatagctttgtacagattatgaggactgaaaataattgggcatttacccatcttggtatctgttgtatcctttatctgtgtgtgctgatttgatcttttttcagtttcacataccttatctaaggtttcccaggatttaaacagaaactacttctatgatttcagctggagtctgaagatacttgtttctgttcaagtcccactttaaattatgtcttaggagactgaaagtggaatcttctgagcattcctaaatatctgcttagaaatatcatgtgataaagagggaccttcttaatacactgatgttcttcactaaatggatggccacaagaaaaataaagtaaatgtcttaaataatttaaccataaattttctgtcatgtgatactggaatatgggatacttttcatgtttatatatatatatatatgtatatatatatacatatatatatatatataaacatgaaatatatatatatggctcctttgtgccccatgtcattttcagattatggtagcatgctgatacagcaccatgaaagaactcaaggaaaatatatcaatgtaagaagttcactcttagacccagtgttctgaggtcacatgggtttggactgtctcaatcagaaagattaatgactgttatcaagaacatgaacattggcttcctccatagagaagaaatcagtatctgagttgcataccaggcagtattaaaatctaacaggtctgtttggcccattgatagatactcaaatggtgtctccttctggttatggattttgaccattgattacctttctcaatgtaatgaagtattttacagtcaatttgtggtgtaaatgttgctcttgtctttccttgcttacaaactactttcacattgaacagctgtgagacagacatattgagatgcctgcccttgttagtattcattttatgctgcccaagatatcatttaatttagacttaacaagtatttccttgtgattatattactctgtccttgttaataaagtgctgctgtgtttgactctgaacatactaccaaaacttcttcaaagagttttttatgaaagactttcctcctttacaagaaagaaatggggtgctgcctttctgtttagtaaaagcagaatttgcagtggcatctaaagagatcttttttaaataaaaattatgtattgtggcataatcctttttttgagctctacagagaacagtcttttggtaatagtggcaggtatttattccttctgaatatataccccattataggaataactgttacttatttaggattccatcattgaaaattttgacccaaggcacagcagtgaaatttatagttctcaatttagttgtcattattgacaggcattggtattattagtcattgctaagcaactaaaacttcatcagttcaaataagttttaattgtcaaatgaagtataaacacatgaactttctagaaatatttcctcttttggataggtctttaaccagttcatatatatactttgtcaaatatatggatgtgtatgtgtacatttataagaaccagtatggatacatccattcactgtggtacattttaaaataaaatattttagcagtgaatatgg

SEQ ID NO: 28113 - DNA, 2473 bp, Homo sapiens
  source 1..2473: mol_type = unassigned DNA
gcccctcgtctcctccaagatggcgagcggcggcagcgggggggtgtcagtacctgcgctgtggagtgaagtgaaccggtatggccagaacggcgacttcacgcgcgctctcaagaccgtcaataagatactacagatcaacaaagatgacgtaactgccctgcattgtaaagtggtatgccttatccagaatggaagtttcaaggaagctttgaatgtcatcaatactcacaccaaagtgttagccaataactctctctcctttgaaaaggcatattgcgagtacaggctgaacagaattgagaatgccttgaagacaatagaaagtgccaaccagcagacagacaaactgaaggagctttatggacaagtgttataccgtttggaacgctatgatgaatgcttagcagtgtatagagatctcgtccgaaactcccaagatgattatgatgaggagaggaaaacaaacctttcagcagttgttgcagctcaaagcaattgggaaaaagtggttccagagaacctgggcctccaagaaggcacacatgagctgtgctacaacactgcatgtgcactgataggccaaggccagctgaaccaggccatgaaaatcctacaaaaagctgaagatctttgccgccgttcattatcagaagacactgaccaaaatgtctttgactccaagaagaaagtgaaattaaccaatgcggaaggagtagagtttaagctttccaagaaacaactacaagctatagaatttaacaaagctttacttgctatgtacacaaaccaggctgaacaatgccgcaaaatatctgccagtttacagtcccaaagtcccgagcatctcttacctgtgttaatccaagctgcccagctctgccgtgaaaagcagcacacaaaagcaatagagctgcttcaggaattttcagatcagcatccagaaaatgcagctgaaattaagctgaccatggcacagttgaaaatttctcaaggtaatatttctaaagcatgtctaatattgagaagcatagaggagttaaagcataaaccaggcatggtatctgcattagttaccatgtatagccatgaagaagatattgatagtgccattgaggtcttcacacaagctatccagtggtatcaaaaccatcagccaaaatctcctgctcatttgtccttgataagagaagctgcaaacttcaaactcaaatatgggcggaagaaggaggcaattagtgacctacaacagctgtggaaacaaaatccaaaagatattcacaccctggcacagcttatttctgcttactcacttgtagatccagagaaagccaaagctcttagtaaacacttgccatcgtcagatagtatgtctctaaaagtagatgttgaggctcttgaaaattctgctggtgctacatacattcggaagaagggtggaaaagttactggagatagtcaaccaaaggaacaaggacagggagatttgaaaaagaagaaaaagaaaaagaagggaaaattgcctaagaattatgacccaaaagttaccccagatccagaaagatggctgccaatgcgagaacgttcttactaccggggaagaaagaagggtaaaaagaaggatcagattggaaaagggacccagggagcaactgcaggagcttcatctgaactggatgccagtaaaactgtgagcagcccacccacctccccaagacctggcagtgctgcaacagtatctgcctctacaagtaacatcatacccccaagacaccagaaacctgcaggggctccagcaacaaaaaagaaacagcaacagaaaaagaagaaaggtggaaaaggtggctggtgatgagaatattcttgttgcaggctgtttttaaactagtgtcagtgacactaggaatataataaaggtaacacagcaagaagcacagaactactccctcttcatctccatattttcataatttcttgtgtttcaaatagggaaacatcttcctcaaagtctgcctagtgagatatggcctactggttgcctcatagctttgtacagattatgaggactgaaaataattgggcatttacccatcttggtatctgttgtatcctttatctgtgtgtgctgatttgatcttttttcagtttcacataccttatctaaggtttcccaggatttaaacagaaactacttctatgatttcagctggagtctgaagatacttgtttctgttcaagtcccactttaaattatgtcttaggagactgaaagtggaatcttctgagcattcctaaatatctgcttagaaatatcatgtgataaagagggaccttcttaatacactgatgttcttcactaaatggatggccacaagaaaaataaagtaaatgtcttaaataatttaaccataaattttctgtcatgtgatactggaatatgggatacttttcatgtttatatatatatatatat

SEQ ID NO: 28114 - DNA, 3050 bp, Homo sapiens
  source 1..3050: mol_type = unassigned DNA
gatggggagggcacccggcgttctgagcggaagtacggttgagccgatttccggggccactggtgtgacgtgtcccgcgcttggcgcagcaggaagcggcggcgaacgcggcctgaattcccggcgccggccccagctcctctgccgctgccgccatgctcgacttcttcaccattttctccaagggcgggcttgtgctctggtgcttccagggcgttagcgactcatgcaccggacccgttaacgcgttgattcgttccgtgctgctgcaggaacggggaggtaacaactccttcacccatgaggcactcacactcaagtataaactggacaaccagtttgagctggtgtttgtggttggttttcagaagatcctgacactgacatatgtagacaaattgatagatgacgtgcatcggctgtttcgggacaagtaccgcacagagatccaacagcaaagtgctttaagtttattaaatggcacttttgatttccaaaatgacttcctgcggctccttcgtgaagcagaggagagcagtaagatccgtgctcccactaccatgaagaaatttgaagattctgaaaaggccaagaaacctgtgaggtccatgattgagacacggggggaaaagcccaaggaaaaagcaaagaatagcaaaaaaaagggggccaagaaggaaggttctgatggtcctttggctaccagcaaaccagtccctgcagaaaagtcaggtcttccagtgggtcctgagaacggagtagaactttccaaagaggagctgatccgcaggaagcgcgaggagttcattcagaagcatgggaggggtatggagaagtccaacaagtccacgaagtcagatgctccaaaggagaagggcaaaaaagcaccccgggtgtgggaactgggtggctgtgctaacaaagaagtgttggattacagtactcccaccaccaatggaacccctgaggctgccttgtctgaggacatcaacctgattcgagggactgggtctggggggcagcttcaggatctggactgcagcagctctgatgacgaaggggctgctcaaaactctaccaaacctagtgcgaccaagggaacactgggtggcatgtttggtatgctgaagggccttgtgggttcaaagagcttgagtcgtgaagacatggaatctgtgctggacaagatgcgtgatcatctcattgctaagaacgtggctgcagacattgccgtccagctctgtgaatctgttgccaacaagttggaagggaaggtgatggggacgttcagcacggtgacttccacagtaaagcaagccctacaggagtccctggtgcagattctgcagccacagcgtcgtgtagacatgctccgggacatcatggatgcccagcgtcgccagcgcccttatgtcgtcaccttctgcggcgttaatggagtggggaaatctactaatcttgccaagatttccttctggttgttagagaatggcttcagtgtcctcattgctgcctgtgatacatttcgtgctggggccgtggagcagctgcgtacacacacccggcgtttgagtgccctacaccctccagagaagcatggtggccgcaccatggtgcagttgtttgaaaagggctatggcaaggatgctgctggcattgccatggaagccattgcttttgcacgtaaccaaggctttgacgtggtgctggtggacacggcaggccgcatgcaagacaatgcccctctgatgactgccctggccaaactcattactgtcaatacacctgatttggtgctgtttgtaggagaagccttagtaggcaatgaagccgtggaccagctggtcaagttcaacagagccttggctgaccattctatggctcagacacctcggctcattgatggcattgttcttaccaaatttgataccattgatgacaaggtgggagctgctatttctatgacgtacatcacaagcaaacccatcgtctttgtgggcaccggccagacctactgtgacctacgcagcctcaatgccaaggctgtggtggctgccctcatgaaggcttaacgtggctcttgcccaataccaaatcgccgctttccccacaagcccttcttcctgtatcaagaatgtgctttagagtatgtgagcaacctgtcttcagtgtagtacaaaggcagagtgagggggcttgtggctccttccaaccccactccccgttcagcacagccgccatctgcaaggaaggcctaatcatgttacaatcactgcccactgaccctctcccagcgggcctcccccttcctactcaggcacccccttcactctgcctacagactcagtcttattacagctttgaccaatggttggaacccaacaccagagctttgctaataattagtgtggtcaagagccgtctgagcctaatgagtcccagctgcattaggttaagagactcttccagagccagcgccaggtcttgaatggcacctctccctaggatacacagcctgcaggtccccaggacctggatgacacccgcctcactgtggcagtgtattgcctgttaattgctgctaattctaattctgatgatgactcctactccattgtttaccccaaagcatcagctaggctggagtgatttgttacaaatgagcaaaagatgagtccttgcttccctcagaaataaaaggagctcagctgcagcgttgcattgggcttcttggcctcccaactcttcccactcccagaatccagaagtaagctctgcatgttccccttcctgggaggaaaccaattgtcagaaggatgtatgatgaccccctcccctcccatccttcacctcctaagcagtcctggcttttcctcatcactcccctctacagtgcctggtagacaagtgctacattgaagaacacaaacctcttgttaagacttgtcctgtagcttgatattacagatgtgctattagtgcaataaggtgaaggctgtctgcccagagaaataagtaatttatataagaaaataaatttcataaataaa

SEQ ID NO: 28115 - DNA, 1116 bp, Homo sapiens
  source 1..1116: mol_type = unassigned DNA
tttccggtctttcggatgctgacgctctcttcctgtctttgtggctccggaaaggcgtttgggatgccaacgatgaggctgctgtcatttgtggtgttggctctatttgctgtcactcaagcagaggaaggagccaggcttttggcttccaaatcactgctgaacagatacgccgtggagggacgagacctgaccttgcagtacaacatctacaatgttggctcaagtgctgcattagacgtggaactatctgatgattccttccctccagaagactttggcattgtgtctggaatgctcaatgtcaaatgggaccggattgcccctgctagcaatgtctcccacactgtggtcctgcgccctctcaaggctggttatttcaacttcacctcggcaacaattacttacctggcccaggaggatgggcccgttgtgattggctctaccagtgcacctggacagggaggaatcctggctcagcgggagtttgacaggcgattctcccctcattttctggactgggcagcctttggggtcatgacccttccctccatcggcatccccctgctattgtggtactccagcaagaggaaatatgacactcccaaaacgaagaagaactgattggggcttccacagccctcctctcccaagaaatccaggctcctctcccaagaaatccaggtgctttccagactccaaagggtatcttaaatgcaatctcttctctcttagcccttggccactttctcctggatcctgccctgctctcagccatagtgaaggaccagccctaggagtctgcgagagcctccttggttccatcgtgaagccataaacaggaatgcctttggcaatagccttgagcctagagggccctctgatgccccactgaggtgctgttggtttattgctggcaacgtgaattctctcaggggtctaggaggggcattttggagactgcctgacaccacccctatcccctgcctccccctctcagaagagggtggaagatgaaatgaaagctatgggactcttggaggatacccagtgtctattctgggttagagaagtgcttactaaggggttttctaataaaaacaaatgccacattga

SEQ ID NO: 28116 - DNA, 895 bp, Homo sapiens
  source 1..895: mol_type = unassigned DNA
cggtaagtccggaggcttagggcgtccgaacgggagaggcgagagcctcgtgtccgcgcatcaccccgtggctgggggttagctaggggagggcgggaagggcagaggacgcggtggctggaggacgtgtaaccttgcaagaggcgggaggcggggggcagagatgaggctgctgtcatttgtggtgttggctctatttgctgtcactcaagcagaggaaggagccaggcttttggcttccaaatcactgctgaacagatacgccgtggagggacgagacctgaccttgcagtacaacatctacaatgttggctcaagtgctgcattagacgtggaactatctgatgattccttccctccagaagactttggcattgtgtctggaatgctcaatgtcaaatgggaccggattgcccctgctagcaatgtctcccacactgtggtcctgcgccctctcaaggctggttatttcaacttcacctcggcaacaattacttacctggcccaggaggatgggcccgttgtgattggctctaccagtgcacctggacagggaggaatcctggctcagcgggagtttgacaggcgattctcccctcattttctggactgggcagcctttggggtcatgacccttccctccatcggcatccccctgctattgtggtactccagcaagaggaaatatgacactcccaaaacgaagaagaactgattggggcttccacagccctcctctcccaagaaatccaggctcctctcccaagaaatccaggtgctttccagactccaaagggtatcttaaatgcaatctcttctctcttagcccttggccactttctcctggatcctgccctgctctcagccatagtgaaggaccagccctaggagtctg

SEQ ID NO: 28117 - DNA, 351 bp, Homo sapiens
  source 1..351: mol_type = unassigned DNA
gtttgggatgccaacgggtgaagatggtaggagagtctggagaacgggtctgctctggtggcttatggactactctgtggaaggggctgctgttctgatgaggctgctgtcatttgtggtgttggctctatttgctgtcactcaagcagaggaaggagccaggcttttggcttccaaatcactgctgaacagatacgccgtggagggacgagacctgaccttgcagtacaacatctacaatgttggctcaagtgctgcattagacgtggaactatctgatgattccttccctccagaagactttggcattgtgtctggaatgctcaatgtcaaatgggaccggattgcccc

SEQ ID NO: 28118 - DNA, 555 bp, Homo sapiens
  source 1..555: mol_type = unassigned DNA
ggcagaggacgcggtggctggaggacgtgtaaccttgcaagaggcgggaggcggggggcagaggtgattgacccccgcccccccgcccgtgggaccaagaaagggatgtgacagatgaggctgctgtcatttgtggtgttggctctatttgctgtcactcaagcagaggaaggagccaggcttttggcttccaaatcactgctgaacagatacgccgtggagggacgagacctgaccttgcagtacaacatctacaatgttggctcaagtgctgcattagacgtggaactatctgatgattccttccctccagaagactttggcattgtgtctggaatgctcaatgtcaaatgggaccggattgcccctgctagcaatgtctcccacactgtggtcctgcgccctctcaaggctggttatttcaacttcacctcggcaacaattacttacctggcccaggaggatgggcccgttgtgattggctctaccagtgcacctggacagggaggaatcctggctcagcgggagtttgacaggcgattctcccctcatttt

SEQ ID NO: 28119 - DNA, 1671 bp, Homo sapiens
  source 1..1671: mol_type = unassigned DNA
gccacgcagtggctcagtgtgggagcatggcctagaggtcaaacctcttacccatcagggccaggtgctggctggcagctgcttcagatggtttccagcccacctaggacctaaattaacctcttcttaaataagtgtaaggaaagaagactcggacctgaatacgcaagaccgcacacggagaagagcagaagcaaaacccccgcagcctcagaaaccctagctccttcccattccaggcgcctcgaggggaaggcatctggggctctaagactgggggactatgggggatgactggcaaagtccggttctttgccaccgggataggtggcaaagcggtccacgagagaggaaaccgtggagaaatttgagtcccggaaccggattcccgaagcggtttgagaaaggcgggccgggatacgtgagtgactgcctcagaagggctccttcaaggacactaaggaggtgacagccgccgtggcccactctcccggcccgtccggagggccccccgccacccgatgcagaccccctgggggagccggtccagggccaacttcggccaatcccctcagtgacagcggaggcggccaatcaaccccggcgcgaagccctttccccgcccctggtggggcccctagccaatcggactccagactgcttcgggtgcggctaccccaccgctcccctgcgaccgctgccgcggtcccgtggctctttccctgctcacctcccagggacggcagagaagggctggcccgagcaccgccttcgcggcgctgccggcgacggtcgctaccttcagcgccatgacggaaagtgagagcctccgcacgtcccgacacgcagataccgctctcgcgagagttcgacggggtgcgaagtttcggggacaggcgcggacccggtactgcgcacgcgcgcggtcgcaccgattcacgcccccttccggcgcctagagcaccgctgccgccatgttgagggggggaccgcgaccagctgggcccctggctcagggaggggccacgtcagtgctgccagagacgtcacaatgccggcccagccgttcggcagagaagaggcgatggcggcgatggcatctctcggcgccctggcgctgctcctgctgtccagcctctcccgctgctcagccgaggcctgcctggagccccagatcaccccttcctactacaccacttctgacgctgtcatttccactgagaccgtcttcattgtggagatctccctgacatgcaagaacagggtccagaacatggctctctatgctgacgtcggtggaaaacaattccctgtcactcgaggccaggatgtggggcgttatcaggtgtcctggagcctggaccacaagagcgcccacgcaggcacctatgaggttagattcttcgacgaggagtcctacagcctcctcaggaaggctcagaggaataacgaggacatttccatcatcccgcctctgtttacagtcagcgtggaccatcggggcacttggaacgggccctgggtgtccactgaggtgctggctgcggcgatcggccttgtgatctactacttggccttcagtgcgaagagccacatccaggcctgagggcggcaccccagccctgcccttgcttccttcaataaacatcacaggacctgggactgcacagg

SEQ ID NO: 28120 - DNA, 526 bp, Homo sapiens
  source 1..526: mol_type = unassigned DNA
gcagagaagaggcgatggcggcgatggcatctctcggcgccctggcgctgctcctgctgtccagcctctcccgctgctcagccgaggcctgcctggagccccagatcaccccttcctactacaccacttctgacgctgtcatttccactgagaccgtcttcattgtggagatctccctgacatgcaagaacagggtccaggtgtcctggagcctggaccacaagagcgcccacgcaggcacctatgaggttagattcttcgacgaggagtcctacagcctcctcaggaaggctcagaggaataacgaggacatttccatcatcccgcctctgtttacagtcagcgtggaccatcggggcacttggaacgggccctgggtgtccactgaggtgctggctgcggcgatcggccttgtgatctactacttggccttcagtgcgaagagccacatccaggcctgagggcggcaccccagccctgcccttgcttccttcaataaacatcacaggacctgggactgcacagg

SEQ ID NO: 28121 - DNA, 643 bp, Homo sapiens
  source 1..643: mol_type = unassigned DNA
tcgtgttcatgggagctcgttttcttttcctctaggcagagaagaggcgatggcggcgatggcatctctcggcgccctggcgctgctcctgctgtccagcctctcccgctgctcagccgaggcctgcctggagccccagatcaccccttcctactacaccacttctgacgctgtcatttccactgagaccgtcttcattgtggagatctccctgacatgcaagaacagggtccagaacatggctctctatgctgacgtcggtggaaaacaattccctgtcactcgaggccaggatgtggggcgttatcaggtgtcctggagcctggaccacaagagcgcccacgcaggcacctatgaggttagattcttcgacgaggagtcctacagcctcctcaggaaggctcagaggaataacgaggacatttccatcatcccgcctctgtttacagtcagcgtggaccatcggggcacttggaacgggccctgggtgtccactgaggtgctggctgcggcgatcggccttgtgatctactacttggccttcagtgcgaagagccacatccaggcctgagggcggcaccccagccctgcccttgcttccttcaataaacatcacaggacctgggactgcacaggacctggg

SEQ ID NO: 28122 - DNA, 745 bp, Homo sapiens
  source 1..745: mol_type = unassigned DNA
ccccaccgctcccctgcgaccgctgccgcggtcccgtggctctttccctgctcacctcccagggacggcagagaagggctggcccgagcaccgccttcgcggcgctgccggcgacggtcgctaccttcagcgccatgacggaaagcagagaagaggcgatggcggcgatggcatctctcggcgccctggcgctgctcctgctgtccagcctctcccgctgctcagccgaggcctgcctggagccccagatcaccccttcctactacaccacttctgacgctgtcatttccactgagaccgtcttcattgtggagatctccctgacatgcaagaacagggtccagaacatggctctctatgctgacgtcggtggaaaacaattccctgtcactcgaggccaggatgtggggcgttatcaggtgtcctggagcctggaccacaagagcgcccacgcaggcacctatgaggttagattcttcgacgaggagtcctacagcctcctcaggaaggctcagaggaataacgaggacatttccatcatcccgcctctgtttacagtcagcgtggaccatcggggcacttggaacgggccctgggtgtccactgaggtgctggctgcggcgatcggccttgtgatctactacttggccttcagtgcgaagagccacatccaggcctgagggcggcaccccagccctgcccttgcttccttcaataaacatcacaggacctgggactgcacagg

SEQ ID NO: 28123 - DNA, 427 bp, Homo sapiens
  source 1..427: mol_type = unassigned DNA
ccgtgggctctggctgccggagtgctgcagtgtcggcactggtggtcagggtggcccctccgtgtccactctgcccacactctgctcaacacccaacccaggtgtcctggagcctggaccacaagagcgcccacgcaggcacctatgaggttagattcttcgacgaggagtcctacagcctcctcaggaaggctcagaggaataacgaggacatttccatcatcccgcctctgtttacagtcagcgtggaccatcggggcacttggaacgggccctgggtgtccactgaggtgctggctgcggcgatcggccttgtgatctactacttggccttcagtgcgaagagccacatccaggcctgagggcggcaccccagccctgcccttgcttccttcaataaacatcacaggacctgggactgcacagg

SEQ ID NO: 28124 - DNA, 4034 bp, Homo sapiens
  source 1..4034: mol_type = unassigned DNA
tttctcttctctgtgtcgtcagagctccagggagggacctgggtagaaggagaagccggaaacagcgggctggggcagccactgcttacactgaagagggaggacgggagaggagtgtgtgtgtgtgtgtgtgtgtgtgtgtgtatgtatgtgtgtgctttatcttatttttctttttggtggtggtggtggaaggggggaggtgctagcagggccagccttgaactcgctggacagagctacagacctatggggcctggaagtgcccgctgagaaagggagaagacagcagaggggttgccgaggcaacctccaagtcccagatcatgtctctgtggggtctggtctccaagatgcccccagaaaaagtgcagcggctctatgtcgactttccccaacacctgcggcatcttctgggtgactggctggagagccagccctgggagttcctggtcggctccgacgccttctgctgcaacttggctagtgccctactttcagacactgtccagcaccttcaggcctcggtgggagagcagggggaggggagcaccatcttgcaacacatcagcacccttgagagcatatatcagagggaccccctgaagctggtggccactttcagacaaatacttcaaggagagaaaaaagctgttatggaacagttccgccacttgccaatgcctttccactggaagcaggaagaactcaagtttaagacaggcttgcggaggctgcagcaccgagtaggggagatccaccttctccgagaagccctgcagaagggggctgaggctggccaagtgtctctgcacagcttgatagaaactcctgctaatgggactgggccaagtgaggccctggccatgctactgcaggagaccactggagagctagaggcagccaaagccctagtgctgaagaggatccagatttggaaacggcagcagcagctggcagggaatggcgcaccgtttgaggagagcctggccccactccaggagaggtgtgaaagcctggtggacatttattcccagctacagcaggaggtaggggcggctggtggggagcttgagcccaagacccgggcatcgctgactggccggctggatgaagtcctgagaaccctcgtcaccagttgcttcctggtggagaagcagcccccccaggtactgaagactcagaccaagttccaggctggagttcgattcctgttgggcttgaggttcctgggggccccagccaagcctccgctggtcagggccgacatggtgacagagaagcaggcgcgggagctgagtgtgcctcagggtcctggggctggagcagaaagcactggagaaatcatcaacaacactgtgcccttggagaacagcattcctgggaactgctgctctgccctgttcaagaacctgcttctcaagaagatcaagcggtgtgagcggaagggcactgagtctgtcacagaggagaagtgcgctgtgctcttctctgccagcttcacacttggccccggcaaactccccatccagctccaggccctgtctctgcccctggtggtcatcgtccatggcaaccaagacaacaatgccaaagccactatcctgtgggacaatgccttctctgagatggaccgcgtgccctttgtggtggctgagcgggtgccctgggagaagatgtgtgaaactctgaacctgaagttcatggctgaggtggggaccaaccgggggctgctcccagagcacttcctcttcctggcccagaagatcttcaatgacaacagcctcagtatggaggccttccagcaccgttctgtgtcctggtcgcagttcaacaaggagatcctgctgggccgtggcttcaccttttggcagtggtttgatggtgtcctggacctcaccaaacgctgtctccggagctactggtctgaccggctgatcattggcttcatcagcaaacagtacgttactagccttcttctcaatgagcccgacggaacctttctcctccgcttcagcgactcagagattgggggcatcaccattgcccatgtcatccggggccaggatggctctccacagatagagaacatccagccattctctgccaaagacctgtccattcgctcactgggggaccgaatccgggatcttgctcagctcaaaaatctctatcccaagaagcccaaggatgaggctttccggagccactacaagcctgaacagatgggtaaggatggcaggggttatgtcccagctaccatcaagatgaccgtggaaagggaccaaccacttcctaccccagagctccagatgcctaccatggtgccttcttatgaccttggaatggcccctgattcctccatgagcatgcagcttggcccagatatggtgccccaggtgtacccaccacactctcactccatccccccgtatcaaggcctctccccagaagaatcagtcaacgtgttgtcagccttccaggagcctcacctgcagatgccccccagcctgggccagatgagcctgccctttgaccagcctcacccccagggcctgctgccgtgccagcctcaggagcatgctgtgtccagccctgaccccctgctctgctcagatgtgaccatggtggaagacagctgcctgagccagccagtgacagcgtttcctcagggcacttggattggtgaagacatattccctcctctgctgcctcccactgaacaggacctcactaagcttctcctggaggggcaaggggagtcggggggagggtccttgggggcacagcccctcctgcagccctcccactatgggcaatctgggatctcaatgtcccacatggacctaagggccaaccccagttggtgatcccagctggagggagaacccaaagagacagctcttctactacccccacagacctgctctggacacttgctcatgccctgccaagcagcagatggggagggtgccctcctatccccacctactcctgggtcaggaggaaaagactaacaggagaatgcacagtgggtggagccaatccactccttcctttctatcattcccctgcccacctccttccagcactgactggaagggaagttcaggctctgagacacaccccaacatgcctgcacctgcagcgcgcacacgcacgcacacacacatacagagctctctgagggtgatggggctgagcaggaggggggctgggtaagagcacaggttagggcatggaaggcttctccgcccattctgacccagggcctaggacggataggcaggaacatacagacacatttacactagaggccagggatagaggatattgggtctcagccctaggggaatgggaagcagctcaagggaccctgggtgggagcataggaggggtctggacatgtggttactagtacaggttttgccctgattaaaaaatctcccaaagccccaaattcctgttagccaggtggaggcttctgatacgtgtatgagactatgcaaaagtacaagggctgagattcttcgtgtatagctgtgtgaacgtgtatgtacctaggatatgttaaatgtatagctggcaccttagttgcatgaccacatagaacatgtgtctatctgcttttgcctacgtgacaacacaaatttgggagggtgagacactgcacagaagacagcagcaagtgtgctggcctctctgacatatgctaacccccaaatactctgaatttggagtctgactgtgcccaagtgggtccaagtggctgtgacatctacgtatggctccacacctccaatgctgcctgggagccagggtgagagtctgggtccaggcctggccatgtggccctccagtgtatgagagggccctgcctgctgcatcttttctgttgccccatccaccgccagcttcccttcactcccctatcccattctccctctcaaggcaggggtcatagatcctaagccataaaataaattttattccaaaataacaaaataaataatctactgtacacaatctgaaaa

SEQ ID NO: 28125 - DNA, 3037 bp, Homo sapiens
  source 1..3037: mol_type = unassigned DNA
aaacagcgggctggggcagccactgcttacactgaagagggaggacgggagaggagtgtgtgtgtgtgtgtgtgtgtgtgtgtgtatgtatgtgtgtgctttatcttatttttctttttggtggtggtggtggaaggggggaggtgctagcagggccagccttgaactcgctggacagagctacagacctatggggcctggaagtgcccgctgagaaagggagaagacagcagaggggttgccgaggtgaggggttgcctccgaggcaacctccaagtcccagatcatgtctctgtggggtctggtctccaagatgcccccagaaaaagtgcagcggctctatgtcgactttccccaacacctgcggcatcttctgggtgactggctggagagccagccctgggagttcctggtcggctccgacgccttctgctgcaacttggctagtgccctactttcagacactgtccagcaccttcaggcctcggtgggagagcagggggaggggagcaccatcttgcaacacatcagcacccttgagagcatatatcagagggaccccctgaagctggtggccactttcagacaaatacttcaaggagagaaaaaagctgttatggaacagttccgccacttgccaatgcctttccactggaagcaggaagaactcaagtttaagacaggcttgcggaggctgcagcaccgagtaggggagatccaccttctccgagaagccctgcagaagggggctgaggctggccaagtgtctctgcacagcttgatagaaactcctgctaatgggactgggccaagtgaggccctggccatgctactgcaggagaccactggagagctagaggcagccaaagccctagtgctgaagaggatccagatttggaaacggcagcagcagctggcagggaatggcgcaccgtttgaggagagcctggccccactccaggagaggtgtgaaagcctggtggacatttattcccagctacagcaggaggtaggggcggctggtggggagcttgagcccaagacccgggcatcgctgactggccggctggatgaagtcctgagaaccctcgtcaccagttgcttcctggtggagaagcagcccccccaggtactgaagactcagaccaagttccaggctggagttcgattcctgttgggcttgaggttcctgggggccccagccaagcctccgctggtcagggccgacatggtgacagagaagcaggcgcgggagctgagtgtgcctcagggtcctggggctggagcagaaagcactggagaaatcatcaacaacactgtgcccttggagaacagcattcctgggaactgctgctctgccctgttcaagaacctgcttctcaagaagatcaagcggtgtgagcggaagggcactgagtctgtcacagaggagaagtgcgctgtgctcttctctgccagcttcacacttggccccggcaaactccccatccagctccaggccctgtctctgcccctggtggtcatcgtccatggcaaccaagacaacaatgccaaagccactatcctgtgggacaatgccttctctgagatggaccgcgtgccctttgtggtggctgagcgggtgccctgggagaagatgtgtgaaactctgaacctgaagttcatggctgaggtggggaccaaccgggggctgctcccagagcacttcctcttcctggcccagaagatcttcaatgacaacagcctcagtatggaggccttccagcaccgttctgtgtcctggtcgcagttcaacaaggagatcctgctgggccgtggcttcaccttttggcagtggtttgatggtgtcctggacctcaccaaacgctgtctccggagctactggtctgaccggctgatcattggcttcatcagcaaacagtacgttactagccttcttctcaatgagcccgacggaacctttctcctccgcttcagcgactcagagattgggggcatcaccattgcccatgtcatccggggccaggatggctctccacagatagagaacatccagccattctctgccaaagacctgtccattcgctcactgggggaccgaatccgggatcttgctcagctcaaaaatctctatcccaagaagcccaaggatgaggctttccggagccactacaagcctgaacagatgggtaaggatggcaggggttatgtcccagctaccatcaagatgaccgtggaaagggaccaaccacttcctaccccagagctccagatgcctaccatggtgccttcttatgaccttggaatggcccctgattcctccatgagcatgcagcttggcccagatatggtgccccaggtgtacccaccacactctcactccatccccccgtatcaaggcctctccccagaagaatcagtcaacgtgttgtcagccttccaggagcctcacctgcagatgccccccagcctgggccagatgagcctgccctttgaccagcctcacccccagggcctgctgccgtgccagcctcaggagcatgctgtgtccagccctgaccccctgctctgctcagatgtgaccatggtggaagacagctgcctgagccagccagtgacagcgtttcctcagggcacttggattggtgaagacatattccctcctctgctgcctcccactgaacaggacctcactaagcttctcctggaggggcaaggggagtcggggggagggtccttgggggcacagcccctcctgcagccctcccactatgggcaatctgggatctcaatgtcccacatggacctaagggccaaccccagttggtgatcccagctggagggagaacccaaagagacagctcttctactacccccacagacctgctctggacacttgctcatgccctgccaagcagcagatggggagggtgccctcctatccccacctactcctgggtcaggaggaaaagactaacaggagaatgcacagtgggtggagccaatccactccttcctttctatcattcccctgccc

SEQ ID NO: 28126 - DNA, 2703 bp, Homo sapiens
  source 1..2703: mol_type = unassigned DNA
agacctatggggcctggaagtgcccgctgagaaagggagaagacagcagaggggttgccgaggcaacctccaagtcccagatcatgtctctgtggggtctggtctccaagatgcccccagaaaaagtgcagcggctctatgtcgactttccccaacacctgcggcatcttctgggtgactggctggagagccagccctgagcatatatcagagggaccccctgaagctggtggccactttcagacaaatacttcaaggagagaaaaaagctgttatggaacagttccgccacttgccaatgcctttccactggaagcaggaagaactcaagtttaagacaggcttgcggaggctgcagcaccgagtaggggagatccaccttctccgagaagccctgcagaagggggctgaggctggccaagtgtctctgcacagcttgatagaaactcctgctaatgggactgggccaagtgaggccctggccatgctactgcaggagaccactggagagctagaggcagccaaagccctagtgctgaagaggatccagatttggaaacggcagcagcagctggcagggaatggcgcaccgtttgaggagagcctggccccactccaggagaggtgtgaaagcctggtggacatttattcccagctacagcaggaggtaggggcggctggtggggagcttgagcccaagacccgggcatcgctgactggccggctggatgaagtcctgagaaccctcgtcaccagttgcttcctggtggagaagcagcccccccaggtactgaagactcagaccaagttccaggctggagttcgattcctgttgggcttgaggttcctgggggccccagccaagcctccgctggtcagggccgacatggtgacagagaagcaggcgcgggagctgagtgtgcctcagggtcctggggctggagcagaaagcactggagaaatcatcaacaacactgtgcccttggagaacagcattcctgggaactgctgctctgccctgttcaagaacctgcttctcaagaagatcaagcggtgtgagcggaagggcactgagtctgtcacagaggagaagtgcgctgtgctcttctctgccagcttcacacttggccccggcaaactccccatccagctccaggccctgtctctgcccctggtggtcatcgtccatggcaaccaagacaacaatgccaaagccactatcctgtgggacaatgccttctctgagatggaccgcgtgccctttgtggtggctgagcgggtgccctgggagaagatgtgtgaaactctgaacctgaagttcatggctgaggtggggaccaaccgggggctgctcccagagcacttcctcttcctggcccagaagatcttcaatgacaacagcctcagtatggaggccttccagcaccgttctgtgtcctggtcgcagttcaacaaggagatcctgctgggccgtggcttcaccttttggcagtggtttgatggtgtcctggacctcaccaaacgctgtctccggagctactggtctgaccggctgatcattggcttcatcagcaaacagtacgttactagccttcttctcaatgagcccgacggaacctttctcctccgcttcagcgactcagagattgggggcatcaccattgcccatgtcatccggggccaggatggctctccacagatagagaacatccagccattctctgccaaagacctgtccattcgctcactgggggaccgaatccgggatcttgctcagctcaaaaatctctatcccaagaagcccaaggatgaggctttccggagccactacaagcctgaacagatgggtaaggatggcaggggttatgtcccagctaccatcaagatgaccgtggaaagggaccaaccacttcctaccccagagctccagatgcctaccatggtgccttcttatgaccttggaatggcccctgattcctccatgagcatgcagcttggcccagatatggtgccccaggtgtacccaccacactctcactccatccccccgtatcaaggcctctccccagaagaatcagtcaacgtgttgtcagccttccaggagcctcacctgcagatgccccccagcctgggccagatgagcctgccctttgaccagcctcacccccagggcctgctgccgtgccagcctcaggagcatgctgtgtccagccctgaccccctgctctgctcagatgtgaccatggtggaagacagctgcctgagccagccagtgacagcgtttcctcagggcacttggattggtgaagacatattccctcctctgctgcctcccactgaacaggacctcactaagcttctcctggaggggcaaggggagtcggggggagggtccttgggggcacagcccctcctgcagccctcccactatgggcaatctgggatctcaatgtcccacatggacctaagggccaaccccagttggtgatccctgactggaagggaagttcaggctctgagacacaccccaacatgcctgcacctgcagcgcgcacacgcacgcacacacatttacactagaggccagggatagaggatattgggtctcagccctaggggaatgggaagcagctcaagggaccctgggtgggagcataggaggggtctggacatgtggttactagtacaggttttgccctgatt

SEQ ID NO: 28127 - DNA, 2886 bp, Homo sapiens
  source 1..2886: mol_type = unassigned DNA
gcagccactgcttacactgaagagggaggacgggagaggagtgtgtgtgtgtgtgtgtgtgtgtgtgtgtatgtatgtgtgtgctttatcttatttttctttttggtggtggtggtggaaggggggaggtgctagcagggccagccttgaactcgctggacagagctacagacctatggggcctggaagtgcccgctgagaaagggagaagacagcagaggggttgccgagggagttcctggtcggctccgacgccttctgctgcaacttggctagtgccctactttcagacactgtccagcaccttcaggcctcggtgggagagcagggggaggggagcaccatcttgcaacacatcagcacccttgagagcatatatcagagggaccccctgaagctggtggccactttcagacaaatacttcaaggagagaaaaaagctgttatggaacagttccgccacttgccaatgcctttccactggaagcaggaagaactcaagtttaagacaggcttgcggaggctgcagcaccgagtaggggagatccaccttctccgagaagccctgcagaagggggctgaggctggccaagtgtctctgcacagcttgatagaaactcctgctaatgggactgggccaagtgaggccctggccatgctactgcaggagaccactggagagctagaggcagccaaagccctagtgctgaagaggatccagatttggaaacggcagcagcagctggcagggaatggcgcaccgtttgaggagagcctggccccactccaggagaggtgtgaaagcctggtggacatttattcccagctacagcaggaggtaggggcggctggtggggagcttgagcccaagacccgggcatcgctgactggccggctggatgaagtcctgagaaccctcgtcaccagttgcttcctggtggagaagcagcccccccaggtactgaagactcagaccaagttccaggctggagttcgattcctgttgggcttgaggttcctgggggccccagccaagcctccgctggtcagggccgacatggtgacagagaagcaggcgcgggagctgagtgtgcctcagggtcctggggctggagcagaaagcactggagaaatcatcaacaacactgtgcccttggagaacagcattcctgggaactgctgctctgccctgttcaagaacctgcttctcaagaagatcaagcggtgtgagcggaagggcactgagtctgtcacagaggagaagtgcgctgtgctcttctctgccagcttcacacttggccccggcaaactccccatccagctccaggccctgtctctgcccctggtggtcatcgtccatggcaaccaagacaacaatgccaaagccactatcctgtgggacaatgccttctctgagatggaccgcgtgccctttgtggtggctgagcgggtgccctgggagaagatgtgtgaaactctgaacctgaagttcatggctgaggtggggaccaaccgggggctgctcccagagcacttcctcttcctggcccagaagatcttcaatgacaacagcctcagtatggaggccttccagcaccgttctgtgtcctggtcgcagttcaacaaggagatcctgctgggccgtggcttcaccttttggcagtggtttgatggtgtcctggacctcaccaaacgctgtctccggagctactggtctgaccggctgatcattggcttcatcagcaaacagtacgttactagccttcttctcaatgagcccgacggaacctttctcctccgcttcagcgactcagagattgggggcatcaccattgcccatgtcatccggggccaggatggctctccacagatagagaacatccagccattctctgccaaagacctgtccattcgctcactgggggaccgaatccgggatcttgctcagctcaaaaatctctatcccaagaagcccaaggatgaggctttccggagccactacaagcctgaacagatgggtaaggatggcaggggttatgtcccagctaccatcaagatgaccgtggaaagggaccaaccacttcctaccccagagctccagatgcctaccatggtgccttcttatgaccttggaatggcccctgattcctccatgagcatgcagcttggcccagatatggtgccccaggtgtacccaccacactctcactccatccccccgtatcaaggcctctccccagaagaatcagtcaacgtgttgtcagccttccaggagcctcacctgcagatgccccccagcctgggccagatgagcctgccctttgaccagcctcacccccagggcctgctgccgtgccagcctcaggagcatgctgtgtccagccctgaccccctgctctgctcagatgtgaccatggtggaagacagctgcctgagccagccagtgacagcgtttcctcagggcacttggattggtgaagacatattccctcctctgctgcctcccactgaacaggacctcactaagcttctcctggaggggcaaggggagtcggggggagggtccttgggggcacagcccctcctgcagccctcccactatgggcaatctgggatctcaatgtcccacatggacctaagggccaaccccagttggtgatcccagctggagggagaacccaaagagacagctcttctactacccccacagacctgctctggacacttgctcatgccctgccaagcagcagatggggagggtgccctcctatccccacctactcctgggtcaggaggaaaagactaacaggagaatgcacagtgggtggagccaatccactccttcctttctatcattcccctgcccacctccttccagcactgact

SEQ ID NO: 28128 - DNA, 2879 bp, Homo sapiens
  source 1..2879: mol_type = unassigned DNA
acactgaagagggaggacgggagaggagtgtgtgtgtgtgtgtgtgtgtgtgtgtgtatgtatgtgtgtgctttatcttatttttctttttggtggtggtggtggaaggggggaggtgctagcagggccagccttgaactcgctggacagagctacagacctatggggcctggaagtgcccgctgagaaagggagaagacagcagaggggttgccgagagcatatatcagagggaccccctgaagctggtggccactttcagacaaatacttcaaggagagaaaaaagctgttatggaacagttccgccacttgccaatgcctttccactggaagcaggaagaactcaagtttaagacaggcttgcggaggctgcagcaccgagtaggggagatccaccttctccgagaagccctgcagaagggggctgaggctggccaagtgtctctgcacagcttgatagaaactcctgctaatgggactgggccaagtgaggccctggccatgctactgcaggagaccactggagagctagaggcagccaaagccctagtgctgaagaggatccagatttggaaacggcagcagcagctggcagggaatggcgcaccgtttgaggagagcctggccccactccaggagaggtgtgaaagcctggtggacatttattcccagctacagcaggaggtaggggcggctggtggggagcttgagcccaagacccgggcatcgctgactggccggctggatgaagtcctgagaaccctcgtcaccagttgcttcctggtggagaagcagcccccccaggtactgaagactcagaccaagttccaggctggagttcgattcctgttgggcttgaggttcctgggggccccagccaagcctccgctggtcagggccgacatggtgacagagaagcaggcgcgggagctgagtgtgcctcagggtcctggggctggagcagaaagcactggagaaatcatcaacaacactgtgcccttggagaacagcattcctgggaactgctgctctgccctgttcaagaacctgcttctcaagaagatcaagcggtgtgagcggaagggcactgagtctgtcacagaggagaagtgcgctgtgctcttctctgccagcttcacacttggccccggcaaactccccatccagctccaggccctgtctctgcccctggtggtcatcgtccatggcaaccaagacaacaatgccaaagccactatcctgtgggacaatgccttctctgagatggaccgcgtgccctttgtggtggctgagcgggtgccctgggagaagatgtgtgaaactctgaacctgaagttcatggctgaggtggggaccaaccgggggctgctcccagagcacttcctcttcctggcccagaagatcttcaatgacaacagcctcagtatggaggccttccagcaccgttctgtgtcctggtcgcagttcaacaaggagatcctgctgggccgtggcttcaccttttggcagtggtttgatggtgtcctggacctcaccaaacgctgtctccggagctactggtctgaccggctgatcattggcttcatcagcaaacagtacgttactagccttcttctcaatgagcccgacggaacctttctcctccgcttcagcgactcagagattgggggcatcaccattgcccatgtcatccggggccaggatggctctccacagatagagaacatccagccattctctgccaaagacctgtccattcgctcactgggggaccgaatccgggatcttgctcagctcaaaaatctctatcccaagaagcccaaggatgaggctttccggagccactacaagcctgaacagatgggtaaggatggcaggggttatgtcccagctaccatcaagatgaccgtggaaagggaccaaccacttcctaccccagagctccagatgcctaccatggtgccttcttatgaccttggaatggcccctgattcctccatgagcatgcagcttggcccagatatggtgccccaggtgtacccaccacactctcactccatccccccgtatcaaggcctctccccagaagaatcagtcaacgtgttgtcagccttccaggagcctcacctgcagatgccccccagcctgggccagatgagcctgccctttgaccagcctcacccccagggcctgctgccgtgccagcctcaggagcatgctgtgtccagccctgaccccctgctctgctcagatgtgaccatggtggaagacagctgcctgagccagccagtgacagcgtttcctcagggcacttggattggtgaagacatattccctcctctgctgcctcccactgaacaggacctcactaagcttctcctggaggggcaaggggagtcggggggagggtccttgggggcacagcccctcctgcagccctcccactatgggcaatctgggatctcaatgtcccacatggacctaagggccaaccccagttggtgatcccagctggagggagaacccaaagagacagctcttctactacccccacagacctgctctggacacttgctcatgccctgccaagcagcagatggggagggtgccctcctatccccacctactcctgggtcaggaggaaaagactaacaggagaatgcacagtgggtggagccaatccactccttcctttctatcattcccctgcccacctccttccagcactgactggaagggaagttcaggctctgagacacaccccaacatgcctgcacctgcagcgcgcacacgcacgcacacacacatacagagctctctgagggtgatggggctgagcaggaggggggctgggtaagagcacaggttagggcatgg

SEQ ID NO: 28129 - DNA, 2037 bp, Homo sapiens
  source 1..2037: mol_type = unassigned DNA
atgtctctgtggggtctggtctccaagatgcccccagaaaaagtgcagcggctctatgtcgactttccccaacacctgcggcatcttctgggtgactggctggagagccagccctgggagttcctggtcggctccgacgccttctgctgcaacttggctagtgccctactttcagacactgtccagcaccttcaggcctcggtgggagagcagggggaggggagcaccatcttgcaacacatcagcacccttgagagcatatatcagagggaccccctgaagctggtggccactttcagacaaatacttcaaggagagaaaaaagctgttatggaacagttccgccacttgccaatgcctttccactggaagcaggaagaactcaagtttaagacaggcttgcggaggctgcagcaccgagtaggggagatccaccttctccgagaagccctgcagaagggggctgaggctggccaagtgtctctgcacagcttgatagaaactcctgctaatgggactgggccaagtgaggccctggccatgctactgcaggagaccactggagagctagaggcagccaaagccctagtgctgaagaggatccagatttggaaacggcagcagcagctggcagggaatggcgcaccgtttgaggagagcctggccccactccaggagaggtgtgaaagcctggtggacatttattcccagctacagcaggaggtaggggcggctggtggggagcttgagcccaagacccgggcatcgctgactggccggctggatgaagtcctgagaaccctcgtcaccagttgcttcctggtggagaagcagcccccccaggtactgaagactcagaccaagttccaggctggagttcgattcctgttgggcttgaggttcctgggggccccagccaagcctccgctggtcagggccgacatggtgacagagaagcaggcgcgggagctgagtgtgcctcagggtcctggggctggagcagaaagcactggagaaatcatcaacaacactgtgcccttggagaacagcattcctgggaactgctgctctgccctgttcaagaacctgcttctcaagaagatcaagcggtgtgagcggaagggcactgagtctgtcacagaggagaagtgcgctgtgctcttctctgccagcttcacacttggccccggcaaactccccatccagctccaggccctgtctctgcccctggtggtcatcgtccatggcaaccaagacaacaatgccaaagccactatcctgtgggacaatgccttctctgagatggaccgcgtgccctttgtggtggctgagcgggtgccctgggagaagatgtgtgaaactctgaacctgaagttcatggctgaggtggggaccaaccgggggctgctcccagagcacttcctcttcctggcccagaagatcttcaatgacaacagcctcagtatggaggccttccagcaccgttctgtgtcctggtcgcagttcaacaaggagatcctgctgggccgtggcttcaccttttggcagtggtttgatggtgtcctggacctcaccaaacgctgtctccggagctactggtctgaccggctgatcattggcttcatcagcaaacagtacgttactagccttcttctcaatgagcccgacggaacctttctcctccgcttcagcgactcagagattgggggcatcaccattgcccatgtcatccggggccaggatggctctccacagatagagaacatccagccattctctgccaaagacctgtccattcgctcactgggggaccgaatccgggatcttgctcagctcaaaaatctctatcccaagaagcccaaggatgaggctttccggagccactacaagcctgaacagatgggtaaggatggcaggggttatgtcccagctaccatcaagatgaccgtggaaagggaccaaccacttcctaccccagagctccagatgcctaccatggtgccttcttatgaccttggaatggccctgattcctcca

SEQ ID NO: 28130 - DNA, 2776 bp, Homo sapiens
  source 1..2776: mol_type = unassigned DNA
actgcttacactgaagagggaggacgggagaggagtgtgtgtgtgtgtgtgtgtgtgtgtgtgtatgtatgtgtgtgctttatcttatttttctttttggtggtggtggtggaaggggggaggtgctagcagggccagccttgaactcgctggacagagctacagacctatggggcctggaagtgcccgctgagaaagggagaagacagcagaggggttgccgaggcaacctccaagtcccagatcatgtctctgtggggtctggtctccaagatgcccccagaaaaagtgcagcggctctatgtcgactttccccaacacctgcggcatcttctgggtgactggctggagagccagccctgagcatatatcagagggaccccctgaagctggtggccactttcagacaaatacttcaaggagagaaaaaagctgttatggaacagttccgccacttgccaatgcctttccactggaagcaggaagaactcaagtttaagacaggcttgcggaggctgcagcaccgagtaggggagatccaccttctccgagaagccctgcagaagggggctgaggctggccaagtgtctctgcacagcttgatagaaactcctgctaatgggactgggccaagtgaggccctggccatgctactgcaggagaccactggagagctagaggcagccaaagccctagtgctgaagaggatccagatttggaaacggcagcagcagctggcagggaatggcgcaccgtttgaggagagcctggccccactccaggagaggtgtgaaagcctggtggacatttattcccagctacagcaggaggtaggggcggctggtggggagcttgagcccaagacccgggcatcgctgactggccggctggatgaagtcctgagaaccctcgtcaccagttgcttcctggtggagaagcagcccccccaggtactgaagactcagaccaagttccaggctggagttcgattcctgttgggcttgaggttcctgggggccccagccaagcctccgctggtcagggccgacatggtgacagagaagcaggcgcgggagctgagtgtgcctcagggtcctggggctggagcagaaagcactggagaaatcatcaacaacactgtgcccttggagaacagcattcctgggaactgctgctctgccctgttcaagaacctgcttctcaagaagatcaagcggtgtgagcggaagggcactgagtctgtcacagaggagaagtgcgctgtgctcttctctgccagcttcacacttggccccggcaaactccccatccagctccaggccctgtctctgcccctggtggtcatcgtccatggcaaccaagacaacaatgccaaagccactatcctgtgggacaatgccttctctgagatggaccgcgtgccctttgtggtggctgagcgggtgccctgggagaagatgtgtgaaactctgaacctgaagttcatggctgaggtggggaccaaccgggggctgctcccagagcacttcctcttcctggcccagaagatcttcaatgacaacagcctcagtatggaggccttccagcaccgttctgtgtcctggtcgcagttcaacaaggagatcctgctgggccgtggcttcaccttttggcagtggtttgatggtgtcctggacctcaccaaacgctgtctccggagctactggtctgaccggctgatcattggcttcatcagcaaacagtacgttactagccttcttctcaatgagcccgacggaacctttctcctccgcttcagcgactcagagattgggggcatcaccattgcccatgtcatccggggccaggatggctctccacagatagagaacatccagccattctctgccaaagacctgtccattcgctcactgggggaccgaatccgggatcttgctcagctcaaaaatctctatcccaagaagcccaaggatgaggctttccggagccactacaagcctgaacagatgggtaaggatggcaggggttatgtcccagctaccatcaagatgaccgtggaaagggaccaaccacttcctaccccagagctccagatgcctaccatggtgccttcttatgaccttggaatggcccctgattcctccatgagcatgcagcttggcccagatatggtgccccaggtgtacccaccacactctcactccatccccccgtatcaaggcctctccccagaagaatcagtcaacgtgttgtcagccttccaggagcctcacctgcagatgccccccagcctgggccagatgagcctgccctttgaccagcctcacccccagggcctgctgccgtgccagcctcaggagcatgctgtgtccagccctgaccccctgctctgctcagatgtgaccatggtggaagacagctgcctgagccagccagtgacagcgtttcctcagggcacttggattggtgaagacatattccctcctctgctgcctcccactgaacaggacctcactaagcttctcctggaggggcaaggggagtcggggggagggtccttggggcacagcccctcctgcagccctcccactatgggcaatctgggatctcaatgtcccacatggacctaagggccaaccccagttggtgatcccagctggagggagaacccaaagagacagctcttctactacccccacagacctgctctggacacttgctcatgccctgccaagcagcagatggggagggtgccctcctatccccacctactcct

SEQ ID NO: 28131 - DNA, 3119 bp, Homo sapiens
  source 1..3119: mol_type = unassigned DNA
cctgtcctggtcaagccaatcgacccagccttgttatgggttggggtggggagaaatgtgtcctcctgatggctggggaagaagaggggttggatatttctagccagggccatgccaggaggctggtcactctgcaaggggatgcagaggaaagcggtgcccactcactccagaggacctttctctcttgggctagagaaaggcctattggaggaacctgagcaggaggggcaacctccaagtcccagatcatgtctctgtggggtctggtctccaagatgcccccagaaaaagtgcagcggctctatgtcgactttccccaacacctgcggcatcttctgggtgactggctggagagccagccctgggagttcctggtcggctccgacgccttctgctgcaacttggctagtgccctactttcagacactgtccagcaccttcaggcctcggtgggagagcagggggaggggagcaccatcttgcaacacatcagcacccttgagagcatatatcagagggaccccctgaagctggtggccactttcagacaaatacttcaaggagagaaaaaagctgttatggaacagttccgccacttgccaatgcctttccactggaagcaggaagaactcaagtttaagacaggcttgcggaggctgcagcaccgagtaggggagatccaccttctccgagaagccctgcagaagggggctgaggctggccaagtgtctctgcacagcttgatagaaactcctgctaatgggactgggccaagtgaggccctggccatgctactgcaggagaccactggagagctagaggcagccaaagccctagtgctgaagaggatccagatttggaaacggcagcagcagctggcagggaatggcgcaccgtttgaggagagcctggccccactccaggagaggtgtgaaagcctggtggacatttattcccagctacagcaggaggtaggggcggctggtggggagcttgagcccaagacccgggcatcgctgactggccggctggatgaagtcctgagaaccctcgtcaccagttgcttcctggtggagaagcagcccccccaggtactgaagactcagaccaagttccaggctggagttcgattcctgttgggcttgaggttcctgggggccccagccaagcctccgctggtcagggccgacatggtgacagagaagcaggcgcgggagctgagtgtgcctcagggtcctggggctggagcagaaagcactggagaaatcatcaacaacactgtgcccttggagaacagcattcctgggaactgctgctctgccctgttcaagaacctgcttctcaagaagatcaagcggtgtgagcggaagggcactgagtctgtcacagaggagaagtgcgctgtgctcttctctgccagcttcacacttggccccggcaaactccccatccagctccaggccctgtctctgcccctggtggtcatcgtccatggcaaccaagacaacaatgccaaagccactatcctgtgggacaatgccttctctgagatggaccgcgtgccctttgtggtggctgagcgggtgccctgggagaagatgtgtgaaactctgaacctgaagttcatggctgaggtggggaccaaccgggggctgctcccagagcacttcctcttcctggcccagaagatcttcaatgacaacagcctcagtatggaggccttccagcaccgttctgtgtcctggtcgcagttcaacaaggagatcctgctgggccgtggcttcaccttttggcagtggtttgatggtgtcctggacctcaccaaacgctgtctccggagctactggtctgaccggctgatcattggcttcatcagcaaacagtacgttactagccttcttctcaatgagcccgacggaacctttctcctccgcttcagcgactcagagattgggggcatcaccattgcccatgtcatccggggccaggatggctctccacagatagagaacatccagccattctctgccaaagacctgtccattcgctcactgggggaccgaatccgggatcttgctcagctcaaaaatctctatcccaagaagcccaaggatgaggctttccggagccactacaagcctgaacagatgggtaaggatggcaggggttatgtcccagctaccatcaagatgaccgtggaaagggaccaaccacttcctaccccagagctccagatgcctaccatggtgccttcttatgaccttggaatggcccctgattcctccatgagcatgcagcttggcccagatatggtgccccaggtgtacccaccacactctcactccatccccccgtatcaaggcctctccccagaagaatcagtcaacgtgttgtcagccttccaggagcctcacctgcagatgccccccagcctgggccagatgagcctgccctttgaccagcctcacccccagggcctgctgccgtgccagcctcaggagcatgctgtgtccagccctgaccccctgctctgctcagatgtgaccatggtggaagacagctgcctgagccagccagtgacagcgtttcctcagggcacttggattggtgaagacatattccctcctctgctgcctcccactgaacaggacctcactaagcttctcctggaggggcaaggggagtcggggggagggtccttgggggcacagcccctcctgcagccctcccactatgggcaatctgggatctcaatgtcccacatggacctaagggccaaccccagttggtgatcccagctggagggagaacccaaagagacagctcttctactacccccacagacctgctctggacacttgctcatgccctgccaagcagcagatggggagggtgccctcctatccccacctactcctgggtcaggaggaaaagactaacaggagaatgcacagtgggtggagccaatccactccttcctttctatcattcccctgcccacctccttccagcactgactggaagggaagttcaggctctgagacacaccccaacatgcctgcacctgcagcgcgcacacgcacgcacacacacatacagagctctctgagggtgat

SEQ ID NO: 28132 - DNA, 670 bp, Homo sapiens
  source 1..670: mol_type = unassigned DNA
agagctccagggagggacctgggtagaaggagaagccggaaacagcgggctggggcagccactgcttacactgaagagggaggacgggagaggagtgtgtgtgtgtgtgtgtgtgtgtgtgtgtatgtatgtgtgtgctttatcttatttttctttttggtggtggtggtggaaggggggaggtgctagcagggccagccttgaactcgctggacagagctacagacctatggggcctggaagtgcccgctgagaaagggagaagacagcagaggggttgccgagagaaaggcctattggaggaacctgagcaggaggggtaaggattctgccttgaggagaaaagagctggggtaagtgggcactggaggaaagaggggcatgaaggtcttggagcagaaacgtccagagaagggacctctccattttccatccctctgagaggcctgggagaggcaacctccaagtcccagatcatgtctctgtggggtctggtctccaagatgcccccagaaaaagtgcagcggctctatgtcgactttccccaacacctgcggcatcttctgggtgactggctggagagccagccctgggagttcctggtcggctccgacgccttctgctgcaacttggctagtgccctactttcagacactgtccagcaccttca

SEQ ID NO: 28133 - DNA, 553 bp, Homo sapiens
  source 1..553: mol_type = unassigned DNA
acagacctatggggcctggaagtgcccgctgagaaagggagaagacagcagaggggttgccgagagaaaggcctattggaggaacctgagcaggaggggcaacctccaagtcccagatcatgtctctgtggggtctggtctccaagatgcccccagaaaaagtgcagcggctctatgtcgactttccccaacacctgcggcatcttctgggtgactggctggagagccagccctgggagttcctggtcggctccgacgccttctgctgcaacttggctagtgccctactttcagacactgtccagcaccttcaggcctcggtgggagagcagggggaggggagcaccatcttgcaacacatcagcacccttgagagcatatatcagagggaccccctgaagctggtggccactttcagacaaatacttcaaggagagaaaaaagctgttatggaacagttccgccacttgccaatgcctttccactggaagcaggaagaactcaagtttaagacaggcttgcggaggctgcagcaccgagtaggggagatcca

SEQ ID NO: 28134 - DNA, 603 bp, Homo sapiens
  source 1..603: mol_type = unassigned DNA
ggttctctatcgctcatacccagcactaccaagtcaggggccttcctgcagtaccattcagctgcacccagatgccccaagagcaatgagcccacacgcagagctggaggacctgaaaggcaacctccaagtcccagatcatgtctctgtggggtctggtctccaagatgcccccagaaaaagtgcagcggctctatgtcgactttccccaacacctgcggcatcttctgggtgactggctggagagccagccctgggagttcctggtcggctccgacgccttctgctgcaacttggctagtgccctactttcagacactgtccagcaccttcaggcctcggtgggagagcagggggaggggagcaccatcttgcaacacatcagcacccttgagagcatatatcagagggaccccctgaagctggtggccactttcagacaaatacttcaaggagagaaaaaagctgttatggaacagttccgccacttgccaatgcctttccactggaagcaggaagaactcaagtttaagacaggcttgcggaggctgcagcaccgagtaggggagatccaccttctccgagaagccctgcagaaggggg

SEQ ID NO: 28135 - DNA, 565 bp, Homo sapiens
  source 1..565: mol_type = unassigned DNA
cctgtcctggtcaagccaatcgacccagccttgttatgggttggggtggggagaaatgtgtcctcctgatggctggggaagaagaggggttggatatttctagccagggccatgccaggaggctggtcactctgcaaggggatgcagaggaaagcggtgcccactcactccagaggacctttctctcttgggctagagaaaggcctattggaggaacctgagcaggaggggcaacctccaagtcccagatcatgtctctgtggggtctggtctccaagatgcccccagaaaaagtgcagcggctctatgtcgactttccccaacacctgcggcatcttctgggtgactggctggagagccagccctgggagttcctggtcggctccgacgccttctgctgcaacttggctagtgccctactttcagacactgtccagcaccttcaggcctcggtgggagagcagggggaggggagcaccatcttgcaacacatcagcacccttgagagcatatatcagagggaccccctgaagctggtggccactttcagacaaatacttcaagg

SEQ ID NO: 28136 - DNA, 644 bp, Homo sapiens
  source 1..644: mol_type = unassigned DNA
aaacagcgggctggggcagccactgcttacactgaagagggaggacgggagaggagtgtgtgtgtgtgtgtgtgtgtgtgtgtgtatgtatgtgtgtgctttatcttatttttctttttggtggtggtggtggaaggggggaggtgctagcagggccagccttgaactcgctggacagagctacagacctatggggcctggaagtgcccgctgagaaagggagaagacagcagaggggttgccgagagaaaggcctattggaggaacctgagcaggaggggtaaggattctgccttgaggagaaaagagctggggcaacctccaagtcccagatcatgtctctgtggggtctggtctccaagatgcccccagaaaaagtgcagcggctctatgtcgactttccccaacacctgcggcatcttctgggtgactggctggagagccagccctgggagttcctggtcggctccgacgccttctgctgcaacttggctagtgccctactttcagacactgtccagcaccttcaggcctcggtgggagagcagggggaggggagcaccatcttgcaacacatcagcacccttgagagcatatatcagagggaccccctgaagctggtggccactttcagacaaatactt

SEQ ID NO: 28137 - DNA, 661 bp, Homo sapiens
  source 1..661: mol_type = unassigned DNA
acattcacgcattgggcaactcagagaagctgttttaactttcgatcctgtggtcccacaatcagaggactcgggcagataggggttgagataagcgagtttaggccaccaagcgggcggacgaggatcccagaccttgcgcttcccttctgagtttgggaggcaacctccaagtcccagatcatgtctctgtggggtctggtctccaagatgcccccagaaaaagtgcagcggctctatgtcgactttccccaacacctgcggcatcttctgggtgactggctggagagccagccctgggagttcctggtcggctccgacgccttctgctgcaacttggctagtgccctactttcagacactgtccagcaccttcaggcctcggtgggagagcagggggaggggagcaccatcttgcaacacatcagcacccttgagagcatatatcagagggaccccctgaagctggtggccactttcagacaaatacttcaaggagagaaaaaagctgttatggaacagttccgccacttgccaatgcctttccactggaagcaggaagaactcaagtttaagacaggcttgcggaggctgcagcaccgagtaggggagatccaccttctccgagaagccctgcagaagggggctgaggctggccaag

SEQ ID NO: 28138 - DNA, 2924 bp, Homo sapiens
  source 1..2924: mol_type = unassigned DNA
gtatgcaggagtgggggctggggagagggtgcccccaggggtccaagggggacgcggaatctcactcaccgtcgatagccgccgcgaccagagctgagagcaggggcagcagcaggagcaacggcggggcaacctccaagtcccagatcatgtctctgtggggtctggtctccaagatgcccccagaaaaagtgcagcggctctatgtcgactttccccaacacctgcggcatcttctgggtgactggctggagagccagccctgggagttcctggtcggctccgacgccttctgctgcaacttggctagtgccctactttcagacactgtccagcaccttcaggcctcggtgggagagcagggggaggggagcaccatcttgcaacacatcagcacccttgagagcatatatcagagggaccccctgaagctggtggccactttcagacaaatacttcaaggagagaaaaaagctgttatggaacagttccgccacttgccaatgcctttccactggaagcaggaagaactcaagtttaagacaggcttgcggaggctgcagcaccgagtaggggagatccaccttctccgagaagccctgcagaagggggctgaggctggccaagtgtctctgcacagcttgatagaaactcctgctaatgggactgggccaagtgaggccctggccatgctactgcaggagaccactggagagctagaggcagccaaagccctagtgctgaagaggatccagatttggaaacggcagcagcagctggcagggaatggcgcaccgtttgaggagagcctggccccactccaggagaggtgtgaaagcctggtggacatttattcccagctacagcaggaggtaggggcggctggtggggagcttgagcccaagacccgggcatcgctgactggccggctggatgaagtcctgagaaccctcgtcaccagttgcttcctggtggagaagcagcccccccaggtactgaagactcagaccaagttccaggctggagttcgattcctgttgggcttgaggttcctgggggccccagccaagcctccgctggtcagggccgacatggtgacagagaagcaggcgcgggagctgagtgtgcctcagggtcctggggctggagcagaaagcactggagaaatcatcaacaacactgtgcccttggagaacagcattcctgggaactgctgctctgccctgttcaagaacctgcttctcaagaagatcaagcggtgtgagcggaagggcactgagtctgtcacagaggagaagtgcgctgtgctcttctctgccagcttcacacttggccccggcaaactccccatccagctccaggccctgtctctgcccctggtggtcatcgtccatggcaaccaagacaacaatgccaaagccactatcctgtgggacaatgccttctctgagatggaccgcgtgccctttgtggtggctgagcgggtgccctgggagaagatgtgtgaaactctgaacctgaagttcatggctgaggtggggaccaaccgggggctgctcccagagcacttcctcttcctggcccagaagatcttcaatgacaacagcctcagtatggaggccttccagcaccgttctgtgtcctggtcgcagttcaacaaggagatcctgctgggccgtggcttcaccttttggcagtggtttgatggtgtcctggacctcaccaaacgctgtctccggagctactggtctgaccggctgatcattggcttcatcagcaaacagtacgttactagccttcttctcaatgagcccgacggaacctttctcctccgcttcagcgactcagagattgggggcatcaccattgcccatgtcatccggggccaggatggctctccacagatagagaacatccagccattctctgccaaagacctgtccattcgctcactgggggaccgaatccgggatcttgctcagctcaaaaatctctatcccaagaagcccaaggatgaggctttccggagccactacaagcctgaacagatgggtaaggatggcaggggttatgtcccagctaccatcaagatgaccgtggaaagggaccaaccacttcctaccccagagctccagatgcctaccatggtgccttcttatgaccttggaatggcccctgattcctccatgagcatgcagcttggcccagatatggtgccccaggtgtacccaccacactctcactccatccccccgtatcaaggcctctccccagaagaatcagtcaacgtgttgtcagccttccaggagcctcacctgcagatgccccccagcctgggccagatgagcctgccctttgaccagcctcacccccagggcctgctgccgtgccagcctcaggagcatgctgtgtccagccctgaccccctgctctgctcagatgtgaccatggtggaagacagctgcctgagccagccagtgacagcgtttcctcagggcacttggattggtgaagacatattccctcctctgctgcctcccactgaacaggacctcactaagcttctcctggaggggcaaggggagtcggggggagggtccttgggggcacagcccctcctgcagccctcccactatgggcaatctgggatctcaatgtcccacatggacctaagggccaaccccagttggtgatcccagctggagggagaacccaaagagacagctcttctactacccccacagacctgctctggacacttgctcatgccctgccaagcagcagatggggagggtgccctcctatccccacctactcctgggtcaggaggaaaagactaacaggagaatgcacagtgggtggagccaatccactccttcctttctatcattcccctgcccacctccttccagcactgactggaa

SEQ ID NO: 28139 - DNA, 644 bp, Homo sapiens
  source 1..644: mol_type = unassigned DNA
cttccccttcaaggggctgaagacaaaaggtgcccctgtcctggtcaagccaatcgacccagccttgttatgggttggggtggggagaaatgtgtcctcctgatggctggggaagaagaggggttggatatttctagccagggccatgccaggaggctggtcactctgcaaggggatgcagaggaaagcggtgcccactcactccagaggacctttctctcttgggctagagaaaggcctattggaggaacctgagcaggaggggtaaggattctgccttgaggagaaaagagctggggtaagtgggcactggaggaaagaggggcatgaaggtcttggagcagaaacgtccagagaagggacctctccattttccatccctctgagaggcctgggagaggcaacctccaagtcccagatcatgtctctgtggggtctggtctccaagatgcccccagaaaaagtgcagcggctctatgtcgactttccccaacacctgcggcatcttctgggtgactggctggagagccagccctgggagttcctggtcggctccgacgccttctgctgcaacttggctagtgccctactttcagacactgtccagcaccttcaggcctcggtgggagagcagggggagggga

SEQ ID NO: 28140 - DNA, 729 bp, Homo sapiens
  source 1..729: mol_type = unassigned DNA
ggagctgtcgcggaccctgtagagtcggtctctgttgctctttttgcctgaggagtcttccatcctacgtcgagctctgactcccgtgctgtcgagagggagtccccggggacacctcggcacgcagcggagatgcctctttttgccaccaatcccttcgatcaggatgttgggtcatcctaaagtatgtgaaaaattaaaggctcttatggttgaatggacagatgaatttaagaatgatccacagcttagtctaatatcagcaatgattaagaaccttaaggaacaaggagttacgttcccagctattggctctcaggctgcagaacaagcaaaagcaagcccagctcttgtagccaaggatcctggtactgtggctaacaaaaaagaagaagaagatttagcaaaagccattgagttgtctctcaaggaacaaaggcagcagtcaaccaccctttccactttgtatccaagcacatccagtctcttaactaaccaccaacatgaaggccgaaaagttcgtgctatatatgactttgaagctgctgaagacaatgaacttacttttaaagctggagaaattattacagttcttgatgacagtgatcctaactggtggaaaggtgaaacccatcaaggcatagggttatttccttctaattttgtgactgcagatctcactgctgaaccagaaatgattaaaacagagaagaagacggtacaatttag

SEQ ID NO: 28141 - DNA, 2972 bp, Homo sapiens
  source 1..2972: mol_type = unassigned DNA
agctccgcgcgggggcttcctcggctccttgctgttgccgccgccgcagctgctgccgcggttggtggggttgggtgagaggaggagctgtcgcggaccctgtagagtcggtctctgttgctctttttgcctgaggagtcttccatcctacgtcgagctctgactcccgtgctgtcgagagggagtccccggggacacctcggcacgcagcggagatgcctctttttgccaccaatcccttcgatcaggatgttgagaaagcaaccagcgagatgaatactgctgaggactggggcctcattttggatatctgtgataaagttggtcagtctcgcactggacctaaggattgtcttcggtctattatgagaagagtgaaccacaaagatcctcacgttgctatgcaggctttgactcttctaggagcatgtgtatcaaactgtggcaaaatttttcatttagaagtatgttcaagagattttgctagtgaagtaagcaacgtattaaataagggtcatcctaaagtatgtgaaaaattaaaggctcttatggttgaatggacagatgaatttaagaatgatccacagcttagtctaatatcagcaatgattaagaaccttaaggaacaaggagttacgttcccagctattggctctcaggctgcagaacaagcaaaagcaagcccagctcttgtagccaaggatcctggtactgtggctaacaaaaaagaagaagaagatttagcaaaagccattgagttgtctctcaaggaacaaaggcagcagtcaaccaccctttccactttgtatccaagcacatccagtctcttaactaaccaccaacatgaaggccgaaaagttcgtgctatatatgactttgaagctgctgaagacaatgaacttacttttaaagctggagaaattattacagttcttgatgacagtgatcctaactggtggaaaggtgaaacccatcaaggcatagggttatttccttctaattttgtgactgcagatctcactgctgaaccagaaatgattaaaacagagaagaagacggtacaatttagtgatgatgttcaggtagagacaatagaaccagagccggaaccagcctttattgatgaagataaaatggaccagttgctacagatgctgcaaagtacagaccccagtgatgatcagccagacctaccagagctgcttcatcttgaagcaatgtgtcaccagatgggacctctcattgatgaaaagctggaagatattgatagaaaacattcagaactctcagaacttaatgtgaaagtgatggaggccctttccttatataccaagttaatgaacgaagatccgatgtattccatgtatgcaaagttacagaatcagccatattatatgcagtcatctggtgtttctggttctcaggtgtatgcagggcctcctccaagtggtgcctacctggttgcagggaacgcgcagatgagccacctccagagctacagtcttcccccggagcagctgtcttctctcagccaggcagtggtcccaccatccgcaaacccagcccttcctagtcagcagactcaggccgcttacccaaatacaatggtcagttccgttcaaggaaacacatatcccagccaggcgccagtatatagtcctcctcctgccgctactgctgctgctgcaactgccgatgtcactctgtaccagaatgcaggacctaatatgccccaggtgccaaactataacttaacatcatcaactctgcctcagcccggaggcagccaacagccacctcagccacagcaaccatattctcagaaggctctgctataggacccggtgttcctcttggtggcagatacctgctaaatgccactgacaatgttatgagattcattactatcttaagatgtgtttatcctcagcttataggaatctctccaggtcaacaggttcaaatattcaagaaggtagaactctcctcaatttacactgactttttagaggttcttccccccccgcccctgcagaggaatgaaactacttacaacatttaattcctttcataatatgaaagaattgatacaaggctatttgtctcgtaaacctggtctgcagaaagtcaaacttacaaaaactgttgtgacaaatgttatgtacatatattgatatgtaactgcattagtggccattttgaatcacagtggtgatcgtgtgaatatatttaacactgtgttaaattaatttacgttgctattttattttaatcataaacaactaccatgtttcttaatgttttgtgtaaatttaaggtaattatactatccttttaaacttcaagaaaacaaagttgttagcgtatttacatgaaggcgcattatgttgtcgtgtgtttcagtttcacattaaactgaaccttttactaattgtgagctaaagagatatatatatatatgtgtgtgtatatatatatatctacatgtctttctgtagcctctgcatactactggctgtcatcacaccagcgtacagtagctaaatttttggtgcaattatagcaaatgataatgttcccttttgaacttttacattttggcatgacatttcagagtattgtgggaccatgagacaaaattaagtacgatcacattctttatttctcattttaaagaaatgatgttggtttaccttttcctagttgaagatagtaattaggtttctaagctgtatactgtgtttattggtggcagtgacaccaaagatagaggcaatggatagaaatttttaaactggaaagaaaacctgaattacactacattttcgaagtctcttgtaattatttgggatatcaacaaaatttgattcgtctgtctaatcccttgctagtattttaaatatgtctttaacacattgtatcctttaattcttcattaaaatggaaataagtagatgtttcaaagtaatcta

SEQ ID NO: 28142 - DNA, 740 bp, Homo sapiens
  source 1..740: mol_type = unassigned DNA
ggagctgtcgcggaccctgtagagtcggtctctgttgctctttttgcctgaggagtcttccatcctacgtcgagctctgactcccgtgctgtcgagagggagtccccggggacacctcggcacgcagcggagatgcctctttttgccaccaatcccttcgatcaggatgttgagaaagcaaccagcgagatgaatactgctgaggactggggcctcattttggatatctgtgataaagttggtcagtctcgcactggataaggaaaagagaggatgtgtcttacaaaaagttttaaaataccaaaatggggttttaagaagctttttgagagagatgaggatttgcccaccctttaaacagacctaaggattgtcttcggtctattatgagaagagtgaaccacaaagatcctcacgttgctatgcaggctttgactcttctaggagcatgtgtatcaaactgtggcaaaatttttcatttagaagtatgttcaagagattttgctagtgaagtaagcaacgtattaaataagggtcatcctaaagtatgtgaaaaattaaaggctcttatggttgaatggacagatgaatttaagaatgatccacagcttagtctaatatcagcaatgattaagaaccttaaggaacaaggagttacgttcccagctattggctctcaggctgcagaacaagcaaaagcaagcccagctcttgtagccaaggatcctggtactgtggct

SEQ ID NO: 28143 - DNA, 1984 bp, Homo sapiens
  source 1..1984: mol_type = unassigned DNA
ttccatcctacgtcgagctctgactcccgtgctgtcgagagggagtccccggggacacctcggcacgcagcggagatgcctctttttgccaccaatcccttcgatcaggatgttgagaaagcaaccagcgagatgaatactgctgaggactggggcctcattttggatatctgtgataaagttggtcagtctcgcactggggtcatcctaaagtatgtgaaaaattaaaggctcttatggttgaatggacagatgaatttaagaatgatccacagcttagtctaatatcagcaatgattaagaaccttaaggaacaaggagttacgttcccagctattggctctcaggctgcagaacaagcaaaagcaagcccagctcttgtagccaaggatcctggtactgtggctaacaaaaaagaagaagaagatttagcaaaagccattgagttgtctctcaaggaacaaaggcagcagtcaaccaccctttccactttgtatccaagcacatccagtctcttaactaaccaccaacatgaaggccgaaaagttcgtgctatatatgactttgaagctgctgaagacaatgaacttacttttaaagctggagaaattattacagttcttgatgacagtgatcctaactggtggaaaggtgaaacccatcaaggcatagggttatttccttctaattttgtgactgcagatctcactgctgaaccagaaatgattaaaacagagaagaagacggtacaatttagtgatgatgttcaggtagagacaatagaaccagagccggaaccagcctttattgatgaagataaaatggaccagttgctacagatgctgcaaagtacagaccccagtgatgatcagccagacctaccagagctgcttcatcttgaagcaatgtgtcaccagatgggacctctcattgatgaaaagctggaagatattgatagaaaacattcagaactctcagaacttaatgtgaaagtgatggaggccctttccttatataccaagttaatgaacgaagatccgatgtattccatgtatgcaaagttacagaatcagccatattatatgcagtcatctggtgtttctggttctcaggtgtatgcagggcctcctccaagtggtgcctacctggttgcagggaacgcgcagatgagccacctccagagctacagtcttcccccggagcagctgtcttctctcagccaggcagtggtcccaccatccgcaaacccagcccttcctagtcagcagactcaggccgcttacccaaatacaatggtcagttccgttcaaggaaacacatatcccagccaggcgccagtatatagtcctcctcctgccgctactgctgctgctgcaactgccgatgtcactctgtaccagaatgcaggacctaatatgccccaggtgccaaactataacttaacatcatcaactctgcctcagcccggaggcagccaacagccacctcagccacagcaaccatattctcagaaggctctgctataggacccggtgttcctcttggtggcagatacctgctaaatgccactgacaatgttatgagattcattactatcttaagatgtgtttatcctcagcttataggaatctctccaggtcaacaggttcaaatattcaagaaggtagaactctcctcaatttacactgactttttagaggttcttccccccccgcccctgcagaggaatgaaactacttacaacatttaattcctttcataatatgaaagaattgatacaaggctatttgtctcgtaaacctggtctgcagaaagtcaaacttacaaaaactgttgtgacaaatgttatgtacatatattgatatgtaactgcattagtggccattttgaatcacagtggtgatcgtgtgaatatatttaacactgtgttaaattaatttacgttgctattttattttaatcataaacaactaccatgtttctt

SEQ ID NO: 28144 - DNA, 5701 bp, Homo sapiens
  source 1..5701: mol_type = unassigned DNA
gaaggtccccggcttcgtggctagccggggtcctagcgctggaaaggtggccgtagcggccgcctgacccctacaaaagtctgggacaggggcagcgacaaaggccttgggaggacgcccatggtcggagggatctcgccccgggagaaaagttgggacaggagcgcgggatcgaagggtggactccgagccggcctgtcaggcaagagccgggcaggtgcggtggcggaagtgcagggacggaggccgaagcggagcggtctagggagccgcggccgcgggtcacccggcgggtagcagttgctgagtgtcagctagacagcagcgactagggctcgggcgccggcgagatgcctttgttcaccgccaaccccttcgagcaagacgtggaaaaagccacgaatgagtacaacactacagaagattggagtcttattatggacatatgtgacaaagttggaagtactcctaatggagcgaaagattgcctaaaagccataatgaaaagggtaaatcataaggttccacatgttgctctgcaagcactaactcttcttggggcttgtgtggcaaactgtggaaagatatttcatttagaagtatgttcccgtgattttgcaacagaagtacgtgctgtgattaaaaataaggcacatcctaaagtatgtgaaaaactgaaatctttaatggtggagtggtcagaagaatttcagaaggaccctcagtttagtctgatatctgcaactattaaatctatgaaagaagaaggaattacttttcctccagcaggttctcagactgtctcagctgctgccaagaatggtacgtcatcgaacaaaaacaaagaggatgaagacatagctaaagctattgaattatcgctgcaagaacagaaacagcaacacacagaaacaaaatccttatatccatcttcagaaattcagttaaataataaggttgcacggaaagtgagagctttatatgattttgaagctgttgaggacaatgaactcacctttaaacatggtgaaataattattgttttggatgacagtgatgccaattggtggaaaggagaaaatcacagaggaataggacttttcccatccaattttgtaacaactaatttaaacatagagactgaggcagcggctgtggacaaattgaatgtaattgatgatgatgtggaggaaattaagaaatcagagcctgagcctgtttatatagatgaggataagatggatagagccctgcaggtacttcagagtatagatccaacagattcaaaaccagactcccaagaccttttggatttagaagatatctgccaacagatgggtccaatgatagatgaaaaacttgaagaaattgataggaagcattcagaattgtctgaattgaatgttaaagtcctggaagctctggaactatataacaaattggtgaatgaagcaccagtgtactcagtctattcaaagctccaccctccagcacattacccacctgcatcatctggggttccaatgcagacatatccagttcaatcacatggtggaaactatatgggtcagagcattcaccaagtaactgttgcccaaagctatagcctaggacccgatcaaattggtccactgagatctctgcctccaaatgtgaattcctcagtgacagcacagcctgctcaaacttcatatttaagcactggacaagacactgtttccaatcctacttatatgaaccagaactctaacctacagtcagctactggtacaactgcttacacacagcaaatggggatgtctgtggatatgtcatcttatcagaacactacttccaatttgcctcaactggcaggctttccggtgacagttccagctcatccagttgcacagcagcacacaaattaccatcagcagcctctcctttagaaacaaatcaagcattttcttgaaagccttcataagtgtattattcagtccttgtgataccaacctgaaaatattaaaacttttttccctctcaactcaaaaggaccatgaataaataaagcacaaaaacctctcttattctacaaggccataaaaggttttttttttttttttttttcagtccagtttgtttgaagtcaatcttttcatcagaggcagcttaaagatgctttcagttagttttgtcttactttcagatttctctacataaatctagatactcattaagtagccttatgacaaacagtatgagatacttatgacaaactcgctctgtcacccaggctggagtgcagtagcatgatcgacagagtgagtttgtcaaaagtatctcatacttataaacagtatgagataggaggattaaaatattattttaaagaaaccactgtttccccctaaaatgtcataagagcactgaagaacttgaaatatttttttcagagtttctcacacactttaaaagtctaacttttttgtgtgtaagcatttagcttgccagcatatttctttttggctccttaaattgcggttgtgtttgcagtattgtcacttttgctctcactgttatgttgaataataattagcatataattgtctacagaagcaagagcaatctggaaggaacaaaaatgttttctgtgattaacagtgaagaccttgtaaatgcagatgtgtgataaagcatttagtcagtcccccaaacagtcatgccaactgtgaaggaatgtcccacaaaacatttccattccctgaggaaaaacattttctttcctacatgtatctctggtatttagaattgtcactaataaccttttcaagtgattttggctattctctaatgaagatatggtccatttgtttttcttcctgcaatgtggtgtgcagagatgctgcatatcctttttatgggattgcgtgtgaatttgaaccatgagacattcctaataatttgttgtgagatataccaagcatggatgataagtgtgtttttagtggtgtgttgtttttttaaagaggtgattcaagtaccgttgctaagctgtcaacataccaagctgttgaaaaaattgaccatttctttcagaagtaattctcagcctgtggaataatagcaggtgaagacttcatagaaggcgacagattgatagggaggctattgaagcagtttttctgaagcctgcattttgagttagtttatagtgctaatagattctatataactgtgagagtttggtagtaaaccagtagggattgttttctctcctaaaaatttgcacactacttcattgtctaccaactttttacatattggaaaatagaaattgcaaatacatacatgtatggaaacatattcagattgggaaaaacaatggacattagtttttaaaaagttacgtggaagcaagatttctatatttgtttttttaaaggaagcagtcattctttctactaaatccatttcaagctagttctctgaaaattttgccatttatctacagaaatttgattataaatatgttcctttttcaaagaaactttattctagaacaaaatagtctatatggtacttgatctacatttaagtggaaaaattagcagtatttgaaagctcagtttatgtcattgtcttaacttcagatacaaataactgaacagaaagttttaacctttaatatctcatgttctgttttttattcagtattttcctttatgttaattcaattatatacttctgaatggcaccttactttttggaaacaaatcttctgttatttacaaaataataatttttaaaaaacatttaaaaaaaatccaaagctgctctcgataatagtcaacatttgcatatatatggaatttcttactttttttctcccaaactctatttaataaacttattttaatgtttgtgtatttcatgtataattgtgatctcaattataaaagtttaattcagcatgtctttgagccaatataattactgcacacccactaaattgggatcagccattataaataatgtagttttagaataataaaacatgacacatatatatatatataaatatatagtatatattggcacatcggtgaaagtttatatgtgcagaagtttttttctttctcaagttaaaaattattttttgccatatgtaattttgtgttgcaggctgtcgagagataaaaatgattttaaatctgtgtactgatgattctttcggtgttaagaaacacagggttgtgtacttccctttttatgggcttatggattctatttatattaagacctgtttataattgttttctgccaaagggaattgtctaacttcagatttctacattgggttcatacttactgttttatatcagaaataaaaaaatagcttctgctttttcatatgaaatcttggtacatcagaaagaattcctgaaaatttataatagaatgaattttattaatgcagaaaaataccccagggtgttaaaatatatgaagtgtgggatatattcttatagtttgtaaaatgtagtcaaccaatactgtcttctaatttggtaatttatttataaaattacttaaacattaggtaattatatttgttaggatttgaaattatttgtagttaaattgtcatgctgtttgaaataattgatacttgtctacgtaatacattttactgtatgttttgaagatggttataatttcactttcaaaatttaaaaaatcaattttaaatgttttaaaaacatatagcttagggattttttttaaaaaggttttcttagtaaaaacataaatttaaaagcccctgagttctaggagagggcttattgaattgctataagaaagctggagttactttgataagtaataaattataaatagcactgatctataatgctttatttctatcggaaggtactttttcttctttcatcatcagttttagccagttagtaaatgggaatactcagttttagggatttgatttttgtttggtttaattttctttcaaaaattaaaagtatatttctaaaagttttccccagaggccagatacagtggctcatgcctataatcccagcactttgggagcctgagataggagtattgcttgaggctaggagtttgagaccaacctggcaacatggcaagaccctatctctacaaaaattttaaaacttagccaggtgtggtagtgcacctgtagtcccagctagtcagtaggctgaggtgggagtattgcttgaggctgcagtgaggtgtgatcacgccactgcactccggcctgacagaatgagatcctgtctcaaaaagaaaattccccagaagaagaattctaattttatcaagctgaattaaagtttgagagtcttttttttaaaatcttactgtgtcaaaagaggcattatgttgcttgtgtgatatagtgaatagtgtccctccaaatttcatgtacacctggaatgtcacaatgtgacttaacagtagccacccctcacccccgcccttatctgtggtggatacatttgcaagatccccagtggatgcctgaaaccgcagatagtactgaaccttatatatactgtttgttttcctatgcatacatatccctatgataaagtttatgaatttggcacttaacagcagaactaataagatgaaagagttgtaacaatatactctaataaaagttatttaaaatgta

SEQ ID NO: 28145 - DNA, 3628 bp, Homo sapiens
  source 1..3628: mol_type = unassigned DNA
ggcagggtgactggggtcccatgacagctgctgtgaccccagcaccttcctcaggatgtgggggcctggcagagggctgggcccacagttggggctacttcctgtgctgaaggaagtcctcttgccattcctgctgccctgccgctgcctccctgggaacccatgtgtccttgtggcccctctgagcagccccctcctccttcagggcaggaactgctgccacaacctcaggctgggcaccaaacacccgtgcccgccaatgcggcccagcccccggagagtcaggcccacagagcatgcccatgtgggccggcggtgtggggagccctcggcggggcatggcccctgcgtccacagatgacctctttgcccgcaagctgcgccagccagcaaggcccccgctgacaccgcacaccttcgagccgaggccagtccggggcccactcctgcgcagcggcagcgatgcaggcgaggccaggccccccacgccagccagcccccgtgcccgtgcccacagccacgaagaggccagccgacctgcagccacttccacccggctcttcactgacccgctggcactgctggggctgccagcagaggaaccagagcctgccttcccaccagtgcttgagcctcgatggtttgcccactatgacgtgcaaagcctgctctttgattgggctccgaggtctcaggggatggggagccactcagaggccagctctgggaccctggcttcagccgaggaccaggctgccagctcggacctgctgcatggggcacctggctttgtgtgtgagctcgggggtgagggtgagctaggcctgggtggaccagcatccccacctgtgccccctgcactgcccaacgcggccgtgtccatcctggaggagccacagaaccgaacctcggcctacagcctggagcacgcagacctgggtgctggctactaccgcaaatacttctatggcaaagaacatcagaacttcttcgggatggacgagtcgctgggcccggtggcagtgagcctgcggcgggaggagaaggagggcagcggagggggcaccctgcacagctaccgcgtcatcgtgcggaccacgcagctccggacactccgtggcaccatctcggaggacgcgctgccgccggggcccccacggggtctgtccccaaggaaacttctggagcacgtggcgccgcagctgagccccagctgcctgcgcctgggctcagcttcacccaaggtaccacggacgctgctcacactggatgagcaagtgctgagcttccaacgcaaggtgggcatcctgtactgccgggcgggccagggctcggaggaggagatgtacaacaaccaggaggcgggaccggccttcatgcagtttctcaccttgctgggcgatgtggtgcggctcaaaggctttgagagttaccgggcccagctagacaccaaaacggattccacaggcacgcactccctctacaccacataccaggaccacgagatcatgttccacgtgtccacgatgctgccttacacccctaataaccagcagcagctcctccggaagcgccacattggcaacgacattgtgaccatcgtgttccaggagcctggcagcaagcccttctgccccaccaccatccgctcgcacttccagcacgtgttcctagtggtgcgggcacacacaccctgcacgccacacaccacctacagggtggccgtgagccgcacccaggacacccctgccttcgggccagctctgcctgctggcggaggccccttcgcagccaacgccgacttccgggccttcctgctggccaaagcgctgaatggtgagcaggcggccggccacgcgcgccagttccacgccatggccacgcgcacccgccagcagtacctgcaagacctggccaccaacgaggtgaccactacgtcgctggactcggcttcacgcttcggcctgccctccctgggtgggaggcgccgggcggcccctcggggcccaggcgccgagctgcaggcagcgggctcactggtgtggggagtgcgcgcggcgcccggggcgcgggtcgccgccggggctcaggcgagcggccccgaaggcatcgaggtgccctgcctgctgggcatctcggccgaggctctggtgctggtggcgccgcgcgacggccgcgtagtgttcaattgcgcctgtcgcgacgtgctggcctggaccttctccgagcagcagctggacctgtaccacggccgcggggaggcgatcacgctgcgcttcgacgggtcccccggccaagccgtgggcgaggtggtggcgcgcctgcagctggtgagccgtggctgcgagacccgcgagctggcgctgccccgcgacggtcaaggccgcctgggcttcgaggtggacgccgagggattcgtcacgcacgtggagcgcttcacattcgccgagacggcggggctgcggcccggggcgcgcctcctgcgcgtgtgcggccagactctgcccagcctccggcccgaggccgctgcccagctcctgcgctcggcgcccaaggtctgcgtcaccgtcctgccccccgacgagagcggccggccccgcaggagtttttcggagctgtacacgctgtcgctgcaggagcctagccggcggggggccccagatcctgtgcaggatgaggtccagggggtgaccctgctgcccaccacaaagcagctgctgcacctgtgcctgcaagatggtggcagtcctccagggcctggggatctggccgaggagaggactgagttcctgcacagccagaactcgctgtcaccacgcagctctctgtcggatgaggccccagtcctgcccaacaccaccccggacctcctcctggccaccacagccaagccatcagtacccagtgctgacagtgagacacccctgacccaggacaggccaggcagtcccagtggctctgaggacaagggcaacccggcgccggagctgagggcctcctttctgccacgtaccttgtctctgcggaactccatcagcaggatcatgtcggaggcgggcagtgggaccctggaggacgagtggcaggccatctcggagattgcctctacttgcaacaccattctggagtcgctgtcccgagagggacagcccatcccagagagtggagaccctaagggaactccaaaatctgatgctgagccagagcctgggaacctctcagagaaggtctctcacttggagtccatgctcaggaagctgcaggaggacctgcagaaggagaaggcggacagggcggccctggaggaggaggtgcggagcctgagacacaacaaccggcggctgcaggcggagtctgagagtgcagccacacgcctcctcctggcctccaagcagctgggctcacccaccgccgacctggcctgagccgtctggaaccacctgggcccctgagggcactgtggtcacactgggccctcctcaggaactctccctgcgcagaggcgtgtcttagcactgcccccctccctagccccttatttggtggcggaagtggcctccaccccttccctgtttgtaaatattctgtggagaaaagaggacttcagggagtaaaaaagccactgatg

SEQ ID NO: 28146 - DNA, 3082 bp, Homo sapiens
  source 1..3082: mol_type = unassigned DNA
cagggcaggaactgctgccacaacctcaggctgggcaccaaacacccgtgcccgccaatgcggcccagcccccggagagtcaggcccacagagcatgcccatgtgggccggcggtgtggggagccctcggcggggcatggcccctgcgtccacagatgacctctttgcccgcaagctgcgccagccagcaaggcccccgctgacaccgcacaccttcgagccgaggccagtccggggcccactcctgcgcagcggcagcgatgcaggcgaggccaggccccccacgccagccagcccccgtgcccgtgcccacagccacgaagaggccagccgacctgcagccacttccacccggctcttcactgacccgctggcactgctggggctgccagcagaggaaccagagcctgccttcccaccagtgcttgagcctcgatggtttgcccactatgacgtgcaaagcctgctctttgattgggctccgaggtctcaggggatggggagccactcagaggccagctctgggaccctggcttcagccgaggaccaggctgccagctcggacctgctgcatggggcacctggctttgtgtgtgagctcgggggtgagggtgagctaggcctgggtggaccagcatccccacctgtgccccctgcactgcccaacgcggccgtgtccatcctggaggagccacagaaccgaacctcggcctacagcctggagcacgcagacctgggtgctggctactaccgcaaatacttctatggcaaagaacatcagaacttcttcgggatggacgagtcgctgggcccggtggcagtgagcctgcggcgggaggagaaggagggcagcggagggggcaccctgcacagctaccgcgtcatcgtgcggaccacgcagctccggacactccgtggcaccatctcggaggacgcgctgccgccggggcccccacggggtctgtccccaaggaaacttctggagcacgtggcgccgcagctgagccccagctgcctgcgcctgggctcagcttcacccaaggtaccacggacgctgctcacactggatgagcaagtgctgagcttccaacgcaaggtgggcatcctgtactgccgggcgggccagggctcggaggaggagatgtacaacaaccaggaggcgggaccggccttcatgcagtttctcaccttgctgggcgatgtggtgcggctcaaaggctttgagagttaccgggcccagctagacaccaaaacggattccacaggcacgcactccctctacaccacataccaggaccacgagatcatgttccacgtgtccacgatgctgccttacacccctaataaccagcagcagctcctccggaagcgccacattggcaacgacattgtgaccatcgtgttccaggagcctggcagcaagcccttctgccccaccaccatccgctcgcacttccagcacgtgttcctagtggtgcgggcacacacaccctgcacgccacacaccacctacagggtggccgtgagccgcacccaggacacccctgccttcgggccagctctgcctgctggcggaggccccttcgcagccaacgccgacttccgggccttcctgctggccaaagcgctgaatggtgagcaggcggccggccacgcgcgccagttccacgccatggccacgcgcacccgccagcagtacctgcaagacctggccaccaacgagcagctggacctgtaccacggccgcggggaggcgatcacgctgcgcttcgacgggtcccccggccaagccgtgggcgaggtggtggcgcgcctgcagctggtgagccgtggctgcgagacccgcgagctggcgctgccccgcgacggtcaaggccgcctgggcttcgaggtggacgccgagggattcgtcacgcacgtggagcgcttcacattcgccgagacggcggggctgcggcccggggcgcgcctcctgcgcgtgtgcggccagactctgcccagcctccggcccgaggccgctgcccagctcctgcgctcggcgcccaaggtctgcgtcaccgtcctgccccccgacgagagcggccggccccgcaggagtttttcggagctgtacacgctgtcgctgcaggagcctagccggcggggggccccagatcctgtgcaggatgaggtccagggggtgaccctgctgcccaccacaaagcagctgctgcacctgtgcctgcaagatggtggcagtcctccagggcctggggatctggccgaggagaggactgagttcctgcacagccagaactcgctgtcaccacgcagctctctgtcggatgaggccccagtcctgcccaacaccaccccggacctcctcctggccaccacagccaagccatcagtacccagtgctgacagtgagacacccctgacccaggacaggccaggcagtcccagtggctctgaggacaagggcaacccggcgccggagctgagggcctcctttctgccacgtaccttgtctctgcggaactccatcagcaggatcatgtcggaggcgggcagtgggaccctggaggacgagtggcaggccatctcggagattgcctctacttgcaacaccattctggagtcgctgtcccgagagggacagcccatcccagagagtggagaccctaagggaactccaaaatctgatgctgagccagagcctgggaacctctcagagaaggtctctcacttggagtccatgctcaggaagctgcaggaggacctgcagaaggagaaggcggacagggcggccctggaggaggaggtgcggagcctgagacacaacaaccggcggctgcaggcggagtctgagagtgcagccacacgcctcctcctggcctccaagcagctgggctcacccaccgccgacctggcctgagccgtctggaaccacctgggcccctgagggcactgtggtcacactgggccctcctcaggaactctccctgcgcagaggcgtgtcttagcactgcccccctccctagccccttatttggtggcggaagtggcctccaccccttccctgtttgtaaatattctgtgg

SEQ ID NO: 28147 - DNA, 379 bp, Homo sapiens
  source 1..379: mol_type = unassigned DNA
gggcggcggcggctgggcgggagccccagaggtactggcgggagcaggggacgggaggcactactgtcgggcccgacaggggagaggtggcctagccgtgggcccgggtgatgtgtatgggagtggggtcctcgccacgttcgccgccagcaccctcccaacttccctccgggctccagctcagtcccgagtcaatatgtccagccccctgtctctgaccagccgttcctactctctctgtgtgacggcttagcctggccagccagccgggcaggaactgctgccacaacctcaggctgggcaccaaacacccgtgcccgccaatgcggcccagcccccggagagtcaggcccacagagcatgcccatgtgggccggcg

SEQ ID NO: 28148 - DNA, 562 bp, Homo sapiens
  source 1..562: mol_type = unassigned DNA
agcgggaccccagcgcgggcggcggcggctgggcgggagccccagagtctcactctgtcccgcaggctggagttcagtggcgcgatctcggctcactgcaacctctgcctcccaggtttaagcgattctcctgcctcagcctcctgagtggctgggactacagggcaggaactgctgccacaacctcaggctgggcaccaaacacccgtgcccgccaatgcggcccagcccccggagagtcaggcccacagagcatgcccatgtgggccggcggtgtggggagccctcggcggggcatggcccctgcgtccacagatgacctctttgcccgcaagctgcgccagccagcaaggcccccgctgacaccgcacaccttcgagccgaggccagtccggggcccactcctgcgcagcggcagcgatgcaggcgaggccaggccccccacgccagccagcccccgtgcccgtgcccacagccacgaagaggccagccgacctgcagccacttccacccggctcttcactgacccgctggcactgctggggctgccagcagaggaacc

SEQ ID NO: 28149 - DNA, 3521 bp, Homo sapiens
  source 1..3521: mol_type = unassigned DNA
aggcggagccggcgccgggagcggtagcgggagagcggcagcgggaccccagcgcgggcggcggcggctgggcgggagccccagagggcaggaactgctgccacaacctcaggctgggcaccaaacacccgtgcccgccaatgcggcccagcccccggagagtcaggcccacagagcatgcccatgtgggccggcggtgtggggagccctcggcggggcatggcccctgcgtccacagatgacctctttgcccgcaagctgcgccagccagcaaggcccccgctgacaccgcacaccttcgagccgaggccagtccggggcccactcctgcgcagcggcagcgatgcaggcgaggccaggccccccacgccagccagcccccgtgcccgtgcccacagccacgaagaggccagccgacctgcagccacttccacccggctcttcactgacccgctggcactgctggggctgccagcagaggaaccagagcctgccttcccaccagtgcttgagcctcgatggtttgcccactatgacgtgcaaagcctgctctttgattgggctccgaggtctcaggggatggggagccactcagaggccagctctgggaccctggcttcagccgaggaccaggctgccagctcggacctgctgcatggggcacctggctttgtgtgtgagctcgggggtgagggtgagctaggcctgggtggaccagcatccccacctgtgccccctgcactgcccaacgcggccgtgtccatcctggaggagccacagaaccgaacctcggcctacagcctggagcacgcagacctgggtgctggctactaccgcaaatacttctatggcaaagaacatcagaacttcttcgggatggacgagtcgctgggcccggtggcagtgagcctgcggcgggaggagaaggagggcagcggagggggcaccctgcacagctaccgcgtcatcgtgcggaccacgcagctccggacactccgtggcaccatctcggaggacgcgctgccgccggggcccccacggggtctgtccccaaggaaacttctggagcacgtggcgccgcagctgagccccagctgcctgcgcctgggctcagcttcacccaaggtaccacggacgctgctcacactggatgagcaagtgctgagcttccaacgcaaggtgggcatcctgtactgccgggcgggccagggctcggaggaggagatgtacaacaaccaggaggcgggaccggccttcatgcagtttctcaccttgctgggcgatgtggtgcggctcaaaggctttgagagttaccgggcccagctagacaccaaaacggattccacaggcacgcactccctctacaccacataccaggaccacgagatcatgttccacgtgtccacgatgctgccttacacccctaataaccagcagcagctcctccggaagcgccacattggcaacgacattgtgaccatcgtgttccaggagcctggcagcaagcccttctgccccaccaccatccgctcgcacttccagcacgtgttcctagtggtgcgggcacacacaccctgcacgccacacaccacctacagggtggccgtgagccgcacccaggacacccctgccttcgggccagctctgcctgctggcggaggccccttcgcagccaacgccgacttccgggccttcctgctggccaaagcgctgaatggtgagcaggcggccggccacgcgcgccagttccacgccatggccacgcgcacccgccagcagtacctgcaagacctggccaccaacgaggtgaccactacgtcgctggactcggcttcacgcttcggcctgccctccctgggtgggaggcgccgggcggcccctcggggcccaggcgccgagctgcaggcagcgggctcactggtgtggggagtgcgcgcggcgcccggggcgcgggtcgccgccggggctcaggcgagcggccccgaaggcatcgaggtgccctgcctgctgggcatctcggccgaggctctggtgctggtggcgccgcgcgacggccgcgtagtgttcaattgcgcctgtcgcgacgtgctggcctggaccttctccgagcagcagctggacctgtaccacggccgcggggaggcgatcacgctgcgcttcgacgggtcccccggccaagccgtgggcgaggtggtggcgcgcctgcagctggtgagccgtggctgcgagacccgcgagctggcgctgccccgcgacggtcaaggccgcctgggcttcgaggtggacgccgagggattcgtcacgcacgtggagcgcttcacattcgccgagacggcggggctgcggcccggggcgcgcctcctgcgcgtgtgcggccagactctgcccagcctccggcccgaggccgctgcccagctcctgcgctcggcgcccaaggtctgcgtcaccgtcctgccccccgacgagagcggccggccccgcaggagtttttcggagctgtacacgctgtcgctgcaggagcctagccggcggggggccccagatcctgtgcaggatgaggtccagggggtgaccctgctgcccaccacaaagcagctgctgcacctgtgcctgcaagatggtggcagtcctccagggcctggggatctggccgaggagaggactgagttcctgcacagccagaactcgctgtcaccacgcagctctctgtcggatgaggccccagtcctgcccaacaccaccccggacctcctcctggccaccacagccaagccatcagtacccagtgctgacagtgagacacccctgacccaggacaggccaggcagtcccagtggctctgaggacaagggcaacccggcgccggagctgagggcctcctttctgccacgtaccttgtctctgcggaactccatcagcaggatcatgtcggaggcgggcagtgggaccctggaggacgagtggcaggccatctcggagattgcctctacttgcaacaccattctggagtcgctgtcccgagagggacagcccatcccagagagtggagaccctaagggaactccaaaatctgatgctgagccagagcctgggaacctctcagagaaggtctctcacttggagtccatgctcaggaagctgcaggaggacctgcagaaggagaaggcggacagggcggccctggaggaggaggtgcggagcctgagacacaacaaccggcggctgcaggcggagtctgagagtgcagccacacgcctcctcctggcctccaagcagctgggctcacccaccgccgacctggcctgagccgtctggaaccacctgggcccctgagggcactgtggtcacactgggccctcctcaggaactctccctgcgcagaggcgtgtcttagcactgcccccctccctagccccttatttggtggcggaagtggcctccaccccttccctgtttgtaaatattctgtggagaaaagaggacttcagggagtaaaaaagccactgatgtctgtgtctgaa

SEQ ID NO: 28150 - DNA, 6555 bp, Homo sapiens
  source 1..6555: mol_type = unassigned DNA
cttttgaaaagaacagaggcgtacaacattattacgacaacagagaagcaagttggctttgaagaaactgtattctgaggatgttgtttgctttgggctaagaaaagaaaaaatacaactacagacaaagcctttatatctgcaagtattatggcgtggtcggtagcaatgtaattagatttacatcagtcttcctggtgagacttggaggctcttcctcggtagacatgagtgacccaaggcagtcacaagaagagaagcacaagctaggcagagcctcttcaaagttcaaggatccccctagaatcatgcagtcagatgattattttgctcggaaatttaaagccattaatggcaacatgggacccactacttctttaaatgcctcgaattccaatgagactggcggtggtggtccggctaatggtaccccagctgtgcccaagatgggtgtgagagcaagggtgtctgaatggcctcctaaaaaggactgttccaaggagctaacatgcaaggcactgtgggaaagccggtctcagaccagttatgaaagcatcacttctgtcctgcagaatgggcagagtgaccagagtgaaggtcagcaagatgaacagctcgatctggacttcgtggaggccaagtacacaatcggagacatctttgtccattccccccaaagaggacttcaccccataagacagaggagcaatagtgatgtcactatcagtgacattgatgccgaagatgtcttagaccaaaatgcagtcaaccccaacaccggggctgccctgcacagggagtatggaagtacttcatccatcgacaggcaaggcttatctggtgaaaacttttttgctatgctcagagggtaccgagtagaaaattatgaccacaaagcaatggtcccttttgggttccctgaatttttccgctgtgaccctgcaatctctccgagccttcatgcagcagcacagatttctaggggagaatttgtccgcatctcaggattagattatgtggacagtgccctcctgatggggagagacagggacaagcctttcaaacggaggttgaaatcagagtcggtggaaacatctctcttccgaaagcttcgaactgttaaaagtgagcacgaaactttcaagttcacgtctgagctggaggagagccgactggagaggggcattcgcccttggaattgtcagcgatgttttgcacattatgatgtccagagcattttgtttaatatcaacgaagccatggctacgagggctaatgtggggaaaaggaaaaacataaccactggggcatctgcagcatcccagactcagatgcctacgggccagacaggcaactgtgagtcccctttagggagcaaggaggacctcaactccaaagagaacctggatgccgatgagggtgatgggaaaagtaacgacctcgtccttagttgtccttactttagaaatgagactggaggggaaggcgacaggcggattgcgctctctcgagccaactcatcctctttcagttctggggaaagctgctctttcgaatcgtcactcagctctcactgcacaaatgcaggtgtctccgtcttggaagtgcccagagaaaaccagcctattcacagggagaaagtgaagcgctacatcatagaacacattgaccttggggcctattattaccgcaaattcttctatgggaaagagcaccaaaactactttggaatagatgaaaaccttggtccagtagcagtcagcatccggagagagaaggtggaagatgccaaggagaaagaaggatcccagttcaactacagggtggctttcaggacaagtgagcttacaacactgagaggagcaattttagaagatgctataccctctactgctaggcatggtaccgcacgaggactacctctcaaagaagttttggaatacgtcattccagagctgagcattcagtgtttgcgacaggcttccaactcacccaaggtctcagagcagctgctcaagcttgatgaacaagggctgagctttcagcacaagatcgggatcctttattgcaaagcaggccagagcacagaggaagagatgtataacaatgagacggcgggaccagcttttgaagaattccttgatcttctgggccagagagtccgactgaaaggatttagtaaatatcgagctcagctagacaataagactgattccacgggcacgcactctctctataccacatacaaagactacgaactcatgttccacgtgtcaaccctgcttccctacatgcccaacaacagacaacagctactgaggaaaaggcacataggaaatgacatcgtcaccatcgtcttccaggagcctggggcacttccttttactccaaaaagcatccggtctcactttcagcatgtctttgtcatagtcaaagtgcataatccatgtaccgaaaatgtgtgttatagtgttggagtttccagatcaaaagatgtgccaccatttggcccaccgattcccaaaggtgtaacttttccaaagtcagccgtgttccgggacttccttttagccaaagtaatcaatgcagaaaatgcagcccataaatcagaaaagtttcgagcaatggccactcgaacgaggcaggagtacttgaaagatctggcggagaactttgtcacaaccgccaccgtggatacctctgtgaagttcagcttcattacgctgggtgcgaagaaaaaggagaaggtaaagccaaggaaggatgcccacttgtttagcattggggccatcatgtggcacgtgatagcccgggacttcggccagtctgctgacattgaatgtcttctcgggatctccaatgagttcatcatgttgattgaaaaggattccaagaatgttgtattcaactgttcctgcagggatgtgattgggtggacatctggattagtgagtatcaaagtgttttacgaaagaggagaatgtgtcctcctgtcctcggtagacaactgtgctgaagacatcagggaaattgttcagcgattagtaatagtgacgagaggctgcgagactgtggaaatgaccctgaggaggaacgggctgggccagcttggcttccatgtgaattttgaaggaattgtcgcagatgtggaaccttttggctttgcctggaaggctggccttcgccaagggagccgcctcgtggagatctgcaaagtagccgtggccactctgacccacgagcagatgatcgacctgctccgtacttctgtgactgtgaaggtggtcatcatccagccccatgatgacggctcgccccgaagagggtgttcagagctctgccggatccctatggtggaatataaactcgacagcgagggcaccccctgcgagtataaaacccccttcaggaggaacaccacgtggcaccgggtgcccactcctgccctgcagcccctctctagagcttcccccatccccggcacgcccgaccggctgccgtgccaacagctgctccagcaggcccaggctgccattcctcgaagcacctccttcgaccggaagctgcccgatggcacgagaagctcacccagcaaccagtcatcctccagcgaccctggacccggcgggagcggaccctggagaccacaagtgggctacgacgggtgccagtcccctctactgctcgaacaccagggctcaggccctttggaatgtgacggagccagggagagggaagacaccatggaagcaagcaggcacccggaaaccaaatggcatggcccaccttccaaagtcctgggttcctataaagaaagagctctgcagaaagatggaagttgcaaagattcccccaataagctttctcacattggggataaaagttgctccagtcactccagcagcaacacgctctccagcaacacctccagcaacagtgacgacaagcactttgggtctggcgacctgatggaccccgaattactggggctgacctacatcaaaggggcctccaccgacagtggcatcgacacggccccctgcatgcctgccaccatcctcggccctgtgcacctggcaggcagcaggtccctgatccacagccgggccgagcagtgggctgatgctgccgacgtctctgggcctgacgacgagccagccaagttatattctgtgcatggctacgcgtccaccatctccgccggcagtgctgcggaaggcagcatgggcgatctcagtgagatatcctctcattccagtggttctcaccattcaggaagcccttcagctcactgttcaaaaagtagtgggtctctggattcatccaaagtctacatcgtgtctcacagcagcggacaacaggttcccgggtccatgtccaagccctaccacagacaaggggcagtgaacaaatatgtcatcggctggaagaaatcggagggcagcccaccgcccgaggagcctgaagtgactgaatgtcccgggatgtatagtgagatggatgtcatgtccacagcaactcagcatcagacagtggtgggagatgctgttgcagagactcaacatgttctgtctaaagaagattttctgaaattgatgcttcctgacagccccttagtggaggaggggcgaagaaagttttcgttctatgggaacctgtctccaaggaggtcgctttaccgcacgctgtctgacgagagcatctgcagcaacaggagggggtcctcctttggcagttcccggagttccgtgcttgaccaggccctgcccaacgacattctgttcagcaccaccccaccctaccacagcacgctgcctccgcgggcccaccccgcacccagcatggggagcctgagaaatgagttctggttctccgatgggtccttatcagataagtccaagtgcgcagatcctggcctgatgcccctcccggacacagccacagggttagattggacccacctcgtggatgctgcacgggcatttgaaggtcttgactcagatgaagaactggggctgctctgtcaccacacgtcctatctagaccagagggtggcatccttctgcaccctgacagatatgcagcatgggcaggacctggaaggggcccaagagctgcccttatgtgtagatccaggcagtggcaaagagttcatggacacaactggggagcgttctccatcaccactgaccgggaaagtcaatcagctggaattaattcttcgacaactccagaccgaccttcggaaggaaaaacaagacaaggccgttctccaagcagaagtgcagcacctgagacaggacaacatgagactgcaggaggagtcccagaccgcgacagctcagctgcggaaattcacagaatggtttttcaccaccatcgacaaaaaatcttagccaatccgcacctcatcaagggaccactgggaaatgccccttgtccctttgaagtcacaaacatgtggtttttctgtgtgctttcaaccaatcgtagatgtttttgctgttccattctgtgtagcaccattcaccacagcaggatagggagcctcgactctttctcggtaaccacggcagagagcagcgccgatgtgaagatgaatgaatgtaactcctggtgtgaagatgaatgtaaaccctggcgacagttgagacctttttcttttagactctgctaaaacagtgctctggcttgggcttacctcaagagggaagatagttgagttttatttcctgtatatcaggtgacctggtagagatgtaaagcaatttaccatagtttgggctttagtattgtaaaataaacatgagaacaaataatcagacatatactttaatgttaaaggtgctctatttttttggatgtacagtagttttatttccacagccacattaccatagcaataagaaaggaggcatagtacatagttggaaaagctttgtggggggattaaaaaaaaaaaaaagcactgttgtgtttaacactagttcagatgcagttaccttagagacttatttatttgcaggaacaaatggtgcctgaatattaacagtgttctgattaaaaacaaaaaaaagatacatatgccttgtaaatggctcaccgagtggtcagtagtcacttcaactcttagttcacttttgtatagttgctctgctggaaagaaatgagagtgaatctgcttactcactagaacttccctgtgtgctgtgagccagcggaaccacttgtacaatgccagatttgtttatctttgtacagaagctttgatgaagtgtcttgtatttaacacccttatttaagcttatttaaccttaaattgttaattttataaaatttggtttggcctgcactacgatgagggatggaggtagctgcaggctcagaagagactgagcttgcacagatcagaccgagaagcagggtgagagattctaacgactggatgctgctagtaacacattgtttgtattgctttaccatttttaactgttagatttgagatgaacatacattttgcttttttaataaatgtttaaaagaagtccacataag

SEQ ID NO: 28151 - DNA, 2937 bp, Homo sapiens
  source 1..2937: mol_type = unassigned DNA
acttactgtcataggtcttattaaataggtatctatgtagtcagagcatgtttcatagaaatggagtgttcattaaactgaaacttcatacattgcctctgggcttttggggataggagtatgatacctcccaacttgaaattcccacagataggtgaggtcatagtcatcgggtgatacttaatgagcccatgtttttctttcattggatgtaaactatgctcgatagtgacgagaggctgcgagactgtggaaatgaccctgaggaggaacgggctgggccagcttggcttccatgtgaattttgaaggaattgtcgcagatgtggaaccttttggctttgcctggaaggctggccttcgccaagggagccgcctcgtggagatctgcaaagtagccgtggccactctgacccacgagcagatgatcgacctgctccgtacttctgtgactgtgaaggtggtcatcatccagccccatgatgacggctcgccccgaagagggtgttcagagctctgccggatccctatggtggaatataaactcgacagcgagggcaccccctgcgagtataaaacccccttcaggaggaacaccacgtggcaccgggtgcccactcctgccctgcagcccctctctagagcttcccccatccccggcacgcccgaccggctgccgtgccaacagctgctccagcaggcccaggctgccattcctcgaagcacctccttcgaccggaagctgcccgatggcacgagaagctcacccagcaaccagtcatcctccagcgaccctggacccggcgggagcggaccctggagaccacaagtgggctacgacgggtgccagtcccctctactgctcgaacaccagggctcaggccctttggaatgtgacggagccagggagagggaagacaccatggaagcaagcaggcacccggaaaccaaatggcatggcccaccttccaaagtcctgggttcctataaagaaagagctctgcagaaagatggaagttgcaaagattcccccaataagctttctcacattggggataaaagttgctccagtcactccagcagcaacacgctctccagcaacacctccagcaacagtgacgacaagcactttgggtctggcgacctgatggaccccgaattactggggctgacctacatcaaaggggcctccaccgacagtggcatcgacacggccccctgcatgcctgccaccatcctcggccctgtgcacctggcaggcagcaggtccctgatccacagccgggccgagcagtgggctgatgctgccgacgtctctgggcctgacgacgagccagccaagttatattctgtgcatggctacgcgtccaccatctccgccggcagtgctgcggaaggcagcatgggcgatctcagtgagatatcctctcattccagtggttctcaccattcaggaagcccttcagctcactgttcaaaaagtagtgggtctctggattcatccaaagtctacatcgtgtctcacagcagcggacaacaggttcccgggtccatgtccaagccctaccacagacaaggggcagtgaacaaatatgtcatcggctggaagaaatcggagggcagcccaccgcccgaggagcctgaagtgactgaatgtcccgggatgtatagtgagatggatgtcatgtccacagcaactcagcatcagacagtggtgggagatgctgttgcagagactcaacatgttctgtctaaagaagattttctgaaattgatgcttcctgacagccccttagtggaggaggggcgaagaaagttttcgttctatgggaacctgtctccaaggaggtcgctttaccgcacgctgtctgacgagagcatctgcagcaacaggagggggtcctcctttggcagttcccggagttccgtgcttgaccaggccctgcccaacgacattctgttcagcaccaccccaccctaccacagcacgctgcctccgcgggcccaccccgcacccagcatggggagcctgagaaatgagttctggttctccgatgggtccttatcagataagtccaagtgcgcagatcctggcctgatgcccctcccggacacagccacagggttagattggacccacctcgtggatgctgcacgggcatttgaagaccagagggtggcatccttctgcaccctgacagatatgcagcatgggcaggacctggaaggggcccaagagctgcccttatgtgtagatccaggcagtggcaaagagttcatggacacaactggggagcgttctccatcaccactgaccgggaaagtcaatcagctggaattaattcttcgacaactccagaccgaccttcggaaggaaaaacaagacaaggccgttctccaagcagaagtgcagcacctgagacaggacaacatgagactgcaggaggagtcccagaccgcgacagctcagctgcggaaattcacagaatggtttttcaccaccatcgacaaaaaatcttagccaatccgcacctcatcaagggaccactgggaaatgccccttgtccctttgaagtcacaaacatgtggtttttctgtgtgctttcaaccaatcgtagatgtttttgctgttccattctgtgtagcaccattcaccacagcaggatagggagcctcgactctttctcggtaaccacggcagagagcagcgccgatgtgaagatgaatgaatgtaactcctggtgtgaagatgaatgtaaaccctggcgacagttgagacctttttcttttagactctgctaaaacagtgctctggcttgggcttacctcaagagggaagatagttgagttttatttcctgtatatcaggtgacctggtagagatgtaaagcaatttaccatagtttgggctttagtattgtaaaataaacatgagaac

SEQ ID NO: 28152 - DNA, 6690 bp, Homo sapiens
  source 1..6690: mol_type = unassigned DNA
actaggggtgggcattgtgtgtggctcccctgtggtagagaaggacatcggatgaacatgtgatctgtgtatccagctccaacccaaaaggtgaaggaaatactcatgaccagccagatgtcttaaggaatgcttttgaaaagaacagaggcgtacaacattattacgacaacagagaagcaagttggctttgaagaaactgtattctgaggatgttgtttgctttgggctaagaaaagaaaaaatacaactacagacaaagcctttatatctgcaagtattatggcgtggtcggtagcaatgtaattagatttacatcagtcttcctggtgagacttggaggctcttcctcggtagacatgagtgacccaaggcagtcacaagaagagaagcacaagctaggcagagcctcttcaaagttcaaggatccccctagaatcatgcagtcagatgattattttgctcggaaatttaaagccattaatggcaacatgggacccactacttctttaaatgcctcgaattccaatgagactggcggtggtggtccggctaatggtaccccagctgtgcccaagatgggtgtgagagcaagggtgtctgaatggcctcctaaaaaggactgttccaaggagctaacatgcaaggcactgtgggaaagccggtctcagaccagttatgaaagcatcacttctgtcctgcagaatgggcagagtgaccagagtgaaggtcagcaagatgaacagctcgatctggacttcgtggaggccaagtacacaatcggagacatctttgtccattccccccaaagaggacttcaccccataagacagaggagcaatagtgatgtcactatcagtgacattgatgccgaagatgtcttagaccaaaatgcagtcaaccccaacaccggggctgccctgcacagggagtatggaagtacttcatccatcgacaggcaaggcttatctggtgaaaacttttttgctatgctcagagggtaccgagtagaaaattatgaccacaaagcaatggtcccttttgggttccctgaatttttccgctgtgaccctgcaatctctccgagccttcatgcagcagcacagatttctaggggagaatttgtccgcatctcaggattagattatgtggacagtgccctcctgatggggagagacagggacaagcctttcaaacggaggttgaaatcagagtcggtggaaacatctctcttccgaaagcttcgaactgttaaaagtgagcacgaaactttcaagttcacgtctgagctggaggagagccgactggagaggggcattcgcccttggaattgtcagcgatgttttgcacattatgatgtccagagcattttgtttaatatcaacgaagccatggctacgagggctaatgtggggaaaaggaaaaacataaccactggggcatctgcagcatcccagactcagatgcctacgggccagacaggcaactgtgagtcccctttagggagcaaggaggacctcaactccaaagagaacctggatgccgatgagggtgatgggaaaagtaacgacctcgtccttagttgtccttactttagaaatgagactggaggggaaggcgacaggcggattgcgctctctcgagccaactcatcctctttcagttctggggaaagctgctctttcgaatcgtcactcagctctcactgcacaaatgcaggtgtctccgtcttggaagtgcccagagaaaaccagcctattcacagggagaaagtgaagcgctacatcatagaacacattgaccttggggcctattattaccgcaaattcttctatgggaaagagcaccaaaactactttggaatagatgaaaaccttggtccagtagcagtcagcatccggagagagaaggtggaagatgccaaggagaaagaaggatcccagttcaactacagggtggctttcaggacaagtgagcttacaacactgagaggagcaattttagaagatgctataccctctactgctaggcatggtaccgcacgaggactacctctcaaagaagttttggaatacgtcattccagagctgagcattcagtgtttgcgacaggcttccaactcacccaaggtctcagagcagctgctcaagcttgatgaacaagggctgagctttcagcacaagatcgggatcctttattgcaaagcaggccagagcacagaggaagagatgtataacaatgagacggcgggaccagcttttgaagaattccttgatcttctgggccagagagtccgactgaaaggatttagtaaatatcgagctcagctagacaataagactgattccacgggcacgcactctctctataccacatacaaagactacgaactcatgttccacgtgtcaaccctgcttccctacatgcccaacaacagacaacagctactgaggaaaaggcacataggaaatgacatcgtcaccatcgtcttccaggagcctggggcacttccttttactccaaaaagcatccggtctcactttcagcatgtctttgtcatagtcaaagtgcataatccatgtaccgaaaatgtgtgttatagtgttggagtttccagatcaaaagatgtgccaccatttggcccaccgattcccaaaggtgtaacttttccaaagtcagccgtgttccgggacttccttttagccaaagtaatcaatgcagaaaatgcagcccataaatcagaaaagtttcgagcaatggccactcgaacgaggcaggagtacttgaaagatctggcggagaactttgtcacaaccgccaccgtggatacctctgtgaagttcagcttcattacgctgggtgcgaagaaaaaggagaaggtaaagccaaggaaggatgcccacttgtttagcattggggccatcatgtggcacgtgatagcccgggacttcggccagtctgctgacattgaatgtcttctcgggatctccaatgagttcatcatgttgattgaaaaggattccaagaatgttgtattcaactgttcctgcagggatgtgattgggtggacatctggattagtgagtatcaaagtgttttacgaaagaggagaatgtgtcctcctgtcctcggtagacaactgtgctgaagacatcagggaaattgttcagcgattagtaatagtgacgagaggctgcgagactgtggaaatgaccctgaggaggaacgggctgggccagcttggcttccatgtgaattttgaaggaattgtcgcagatgtggaaccttttggctttgcctggaaggctggccttcgccaagggagccgcctcgtggagatctgcaaagtagccgtggccactctgacccacgagcagatgatcgacctgctccgtacttctgtgactgtgaaggtggtcatcatccagccccatgatgacggctcgccccgaagagggtgttcagagctctgccggatccctatggtggaatataaactcgacagcgagggcaccccctgcgagtataaaacccccttcaggaggaacaccacgtggcaccgggtgcccactcctgccctgcagcccctctctagagcttcccccatccccggcacgcccgaccggctgccgtgccaacagctgctccagcaggcccaggctgccattcctcgaagcacctccttcgaccggaagctgcccgatggcacgagaagctcacccagcaaccagtcatcctccagcgaccctggacccggcgggagcggaccctggagaccacaagtgggctacgacgggtgccagtcccctctactgctcgaacaccagggctcaggccctttggaatgtgacggagccagggagagggaagacaccatggaagcaagcaggcacccggaaaccaaatggcatggcccaccttccaaagtcctgggttcctataaagaaagagctctgcagaaagatggaagttgcaaagattcccccaataagctttctcacattggggataaaagttgctccagtcactccagcagcaacacgctctccagcaacacctccagcaacagtgacgacaagcactttgggtctggcgacctgatggaccccgaattactggggctgacctacatcaaaggggcctccaccgacagtggcatcgacacggccccctgcatgcctgccaccatcctcggccctgtgcacctggcaggcagcaggtccctgatccacagccgggccgagcagtgggctgatgctgccgacgtctctgggcctgacgacgagccagccaagttatattctgtgcatggctacgcgtccaccatctccgccggcagtgctgcggaaggcagcatgggcgatctcagtgagatatcctctcattccagtggttctcaccattcaggaagcccttcagctcactgttcaaaaagtagtgggtctctggattcatccaaagtctacatcgtgtctcacagcagcggacaacaggttcccgggtccatgtccaagccctaccacagacaaggggcagtgaacaaatatgtcatcggctggaagaaatcggagggcagcccaccgcccgaggagcctgaagtgactgaatgtcccgggatgtatagtgagatggatgtcatgtccacagcaactcagcatcagacagtggtgggagatgctgttgcagagactcaacatgttctgtctaaagaagattttctgaaattgatgcttcctgacagccccttagtggaggaggggcgaagaaagttttcgttctatgggaacctgtctccaaggaggtcgctttaccgcacgctgtctgacgagagcatctgcagcaacaggagggggtcctcctttggcagttcccggagttccgtgcttgaccaggccctgcccaacgacattctgttcagcaccaccccaccctaccacagcacgctgcctccgcgggcccaccccgcacccagcatggggagcctgagaaatgagttctggttctccgatgggtccttatcagataagtccaagtgcgcagatcctggcctgatgcccctcccggacacagccacagggttagattggacccacctcgtggatgctgcacgggcatttgaaggtcttgactcagatgaagaactggggctgctctgtcaccacacgtcctatctagaccagagggtggcatccttctgcaccctgacagatatgcagcatgggcaggacctggaaggggcccaagagctgcccttatgtgtagatccaggcagtggcaaagagttcatggacacaactggggagcgttctccatcaccactgaccgggaaagtcaatcagctggaattaattcttcgacaactccagaccgaccttcggaaggaaaaacaagacaaggccgttctccaagcagaagtgcagcacctgagacaggacaacatgagactgcaggaggagtcccagaccgcgacagctcagctgcggaaattcacagaatggtttttcaccaccatcgacaaaaaatcttagccaatccgcacctcatcaagggaccactgggaaatgccccttgtccctttgaagtcacaaacatgtggtttttctgtgtgctttcaaccaatcgtagatgtttttgctgttccattctgtgtagcaccattcaccacagcaggatagggagcctcgactctttctcggtaaccacggcagagagcagcgccgatgtgaagatgaatgaatgtaactcctggtgtgaagatgaatgtaaaccctggcgacagttgagacctttttcttttagactctgctaaaacagtgctctggcttgggcttacctcaagagggaagatagttgagttttatttcctgtatatcaggtgacctggtagagatgtaaagcaatttaccatagtttgggctttagtattgtaaaataaacatgagaacaaataatcagacatatactttaatgttaaaggtgctctatttttttggatgtacagtagttttatttccacagccacattaccatagcaataagaaaggaggcatagtacatagttggaaaagctttgtggggggattaaaaaaaaaaaaaagcactgttgtgtttaacactagttcagatgcagttaccttagagacttatttatttgcaggaacaaatggtgcctgaatattaacagtgttctgattaaaaacaaaaaaaagatacatatgccttgtaaatggctcaccgagtggtcagtagtcacttcaactcttagttcacttttgtatagttgctctgctggaaagaaatgagagtgaatctgcttactcactagaacttccctgtgtgctgtgagccagcggaaccacttgtacaatgccagatttgtttatctttgtacagaagctttgatgaagtgtcttgtatttaacacccttatttaagcttatttaaccttaaattgttaattttataaaatttggtttggcctgcactacgatgagggatggaggtagctgcaggctcagaagagactgagcttgcacagatcagaccgagaagcagggtgagagattctaacgactggatgctgctagtaacacattgtttgtattgctttaccatttttaactgttagatttgagatgaacatacattttgcttttttaataaatgtttaaaagaagtccacataagaaa

SEQ ID NO: 28153 - DNA, 1910 bp, Homo sapiens
  source 1..1910: mol_type = unassigned DNA
acagctaaggaaagaagctggggcgcatgtttctgcccaaagccgggttttggccgaggtgactacacaccccctttcctggctcccataggctaagtgcctggcttcttgagaagcctgcttcttgagaacaaaaaagtgatttaaagcctcatgggagatgagcaatcctcaagacacaagcagaaaaagtcccagtgatacaggaagcgggttcaggaacctgctggttcctgatacataaatcagacagcctctgctgcatgacacgaagcttgcttctgcctggcatctgtgagcagctgccaggctccggccaggatcccttccttctcctcattggctgatggatcccaaggggctcctctccttgaccttcgtgctgtttctctccctggcttttggggcaagctacggaacaggtgggcgcatgatgaactgcccaaagattctccggcagttgggaagcaaagtgctgctgcccctgacatatgaaaggataaataagagcatgaacaaaagcatccacattgtcgtcacaatggcaaaatcactggagaacagtgtcgagaacaaaatagtgtctcttgatccatccgaagcaggccctccacgttatctaggagatcgctacaagttttatctggagaatctcaccctggggatacgggaaagcaggaaggaggatgagggatggtaccttatgaccctggagaaaaatgtttcagttcagcgcttttgcctgcagttgaggctttatgagcaggtctccactccagaaattaaagttttaaacaagacccaggagaacgggacctgcaccttgatactgggctgcacagtggagaagggggaccatgtggcttacagctggagtgaaaaggcgggcacccacccactgaacccagccaacagctcccacctcctgtccctcaccctcggcccccagcatgctgacaatatctacatctgcaccgtgagcaaccctatcagcaacaattcccagaccttcagcccgtggcccggatgcaggacagacccctcaggtaaaacgaaccattaccagacaacagtggaaaaaaaaagccttacgatctatgcccaagtccagaaaccaggtcctcttcagaagaaacttgactccttcccagctcaggacccttgcaccaccatatatgttgctgccacagagcctgtcccagagtctgtccaggaaacaaattccatcacagtctatgctagtgtgacacttccagagagctgacaccagagaccaacaaagggactttctgaaggaaaatggaaaaaccaaaatgaacactgaacttggccacaggccccaagtttcctctggcagacatgctgcacgtctgtacccttctcagatcaactccctggtgatgtttcttccacatacatctgtgaaatgaacaaggaagtgaggcttcccaagaatttagcttgctgtgcagtggctgcaggcgcagaacagagcgttacttgataacagcgttccatctttgtgttgtagcagatgaaatggacagtaatgtgagttcagactttgggcatcttgctcttggctggaactggataataaaaatcagactgaaagccaggacatctgagtacctatctcacacactggaccaccagtcacaaagtctggaaaagtttacattttggctatctttactttgttctgggagctgatcatgataacctgcagacctgatcaagcctctgtgcctcagtttctctctcaggataaagagtgaatagaggctgaagggtgaatttcttattatacataaaacactctgatattattgtataaaggaagctaagaatattattttatttgcaaaacccagaagctaaaaagtcaataaacagaaagaatgattttg

SEQ ID NO: 28154 - DNA, 4006 bp, Homo sapiens
  source 1..4006: mol_type = unassigned DNA
ggagacagctaaggaaagaagctggggcgcatgtttctgcccaaagccgggttttggccgaggtgactacacaccccctttcctggctcccataggctaagtgcctggcttcttgagaagcctgcttcttgagaacaaaaaagtgatttaaagcctcatgggagatgagcaatcctcaagacacaagcagaaaaagtcccagtgatacaggaagcgggttcaggaacctgctggttcctgatacataaatcagacagcctctgctgcatgacacgaagcttgcttctgcctggcatctgtgagcagctgccaggctccggccaggatcccttccttctcctcattggctgatggatcccaaggggctcctctccttgaccttcgtgctgtttctctccctggcttttggggcaagctacggaacaggtgggcgcatgatgaactgcccaaagattctccggcagttgggaagcaaagtgctgctgcccctgacatatgaaaggataaataagagcatgaacaaaagcatccacattgtcgtcacaatggcaaaatcactggagaacagtgtcgagaacaaaatagtgtctcttgatccatccgaagcaggccctccacgttatctaggagatcgctacaagttttatctggagaatctcaccctggggatacgggaaagcaggaaggaggatgagggatggtaccttatgaccctggagaaaaatgtttcagttcagcgcttttgcctgcagttgaggctttatgagcaggtctccactccagaaattaaagttttaaacaagacccaggagaacgggacctgcaccttgatactgggctgcacagtggagaagggggaccatgtggcttacagctggagtgaaaaggcgggcacccacccactgaacccagccaacagctcccacctcctgtccctcaccctcggcccccagcatgctgacaatatctacatctgcaccgtgagcaaccctatcagcaacaattcccagaccttcagcccgtggcccggatgcaggacagacccctcagaaacaaaaccatgggcagtgtatgctgggctgttagggggtgtcatcatgattctcatcatggtggtaatactacagttgagaagaagaggtaaaacgaaccattaccagacaacagtggaaaaaaaaagccttacgatctatgcccaagtccagaaaccaggtcctcttcagaagaaacttgactccttcccagctcaggacccttgcaccaccatatatgttgctgccacagagcctgtcccagagtctgtccaggaaacaaattccatcacagtctatgctagtgtgacacttccagagagctgacaccagagaccaacaaagggactttctgaaggaaaatggaaaaaccaaaatgaacactgaacttggccacaggccccaagtttcctctggcagacatgctgcacgtctgtacccttctcagatcaactccctggtgatgtttcttccacatacatctgtgaaatgaacaaggaagtgaggcttcccaagaatttagcttgctgtgcagtggctgcaggcgcagaacagagcgttacttgataacagcgttccatctttgtgttgtagcagatgaaatggacagtaatgtgagttcagactttgggcatcttgctcttggctggaactggataataaaaatcagactgaaagccaggacatctgagtacctatctcacacactggaccaccagtcacaaagtctggaaaagtttacattttggctatctttactttgttctgggagctgatcatgataacctgcagacctgatcaagcctctgtgcctcagtttctctctcaggataaagagtgaatagaggctgaagggtgaatttcttattatacataaaacactctgatattattgtataaaggaagctaagaatattattttatttgcaaaacccagaagctaaaaagtcaataaacagaaagaatgattttgagatctctgagttttgaacagtggactggaaaccatgtaagagccttaaaagtacagttctgtgcaaatggcattcagttttaaagaaaaacgtagcaaatgtttgatggtgctgttacaaaggagcttggaatactcagaggaacttgtcccatggtgatttttcacttctcaaaatgatgtttaaatcccagttctctgttgattcccttgaacaacaaacctggaacctcagctaagactctctgtgaccagattctgaacctcttatatccagggcttcaaggggtattgcaggtcaaggtctttcctaggcactttctactccctgcatacctctcctcacactaaatttatcctctagtagaaaattaagttattttggtctaacagcttcaaatctttgaatgctcaataacttattttgcaagctgcaggcagaaagagactttttaagtaaagtcctttgttttttcctattctctgcttttagacaggctgtcctcaatttaagccctgctttttcttattgtttcttatataaacttggtaagtactgtaagaaacagccactatcataccattgcataataaggagcaccaacttcccagctcaaaactcaggtccttattgccttgtatcttacctcctctatgaggtcaattcacattgtaagcctgttgcttagtgcatctcgtttcctggtaccagcttctttaatagagttcttagttgcaatcaacagaagctggctttggcttttttatgtagaaaaggaacctattgaaaagatactgattggttccaataactgctagaagtttctgcaaaaccatgctttgaaagtgagcaggaaaagaagagactaggctgtggctgggagcacagccaaaattacaaaaccagcccagggatgatgatcctgttcatgcacagccactgtccccagcactaggcacagactctaccactgcctcactgtctctgctggacttggaaacttgatattactgttactgctgcactgtctgccatgaaaatgaattctccagggtcccttcttcatcctttcatctctagcttataattcaaagtctgggattgagtggccaatcctaggtcacatgtccatgtcctatctccaaggggggctgggaattgaatatctggcattttccactttcacttcttatgaattaaggaattctacaaataatagaagtgggattcaggtggtaggcagacaaaaaagcctcacaattatccactacgccacccttgtataaccttaccctcattcactgtctactctcaaaactgtggagctactaatgaagatttgtaaacccgggcttatgagcacccattcctttactacaactcagattgctctagaagctcagttcccagcacttggatttttccagtagctgaattctacctgaaggaagggcagaaacaaagggtgaagaagaggctatcacttccaagtatcctgcacccctgggctcaagacctcactggggagggagtcttttgggccacccaccaaacagcactggcattatgcctctcaccctagaccatggttacacgtggtaaaacaaccccttctggtgatacattcacaactctctagtttcccccaaatggcactatggggagcgggagcttgccttttcctcagacttaaaacaataagttttccccgtgtttcccctctaatgctgttttcttttgaccaagcatgtctgaattctagagaagtcaggaggaacacacccattctcggtttgaagggactgatgttctgaagtacaactgggcacagtcccaggctcttcaggacgcttcctccattcacacagcggggatgtgattgttacagcgggtggtgtgtgctggctgagaagccactgtgaattgattcttcttctgaagtttatgtttctactttttggaaatgaataaattacagccagtccatcaaggaaattgcaa

SEQ ID NO: 28155 - DNA, 1243 bp, Homo sapiens
  source 1..1243: mol_type = unassigned DNA
acagctaaggaaagaagctggggcgcatgtttctgcccaaagccgggttttggccgaggtgactacacaccccctttcctggctcccataggctaagtgcctggcttcttgagaagcctgcttcttgagaacaaaaaagtgatttaaagcctcatgggagatgagcaatcctcaagacacaagcagaaaaagtcccagtgatacaggaagcgggttcaggaacctgctggttcctgatacataaatcagacagcctctgctgcatgacacgaagcttgcttctgcctggcatctgtgagcagctgccaggctccggccaggatcccttccttctcctcattggctgatggatcccaaggggctcctctccttgaccttcgtgctgtttctctccctggcttttggggcaagctacggaacaggtgggcgcatgatgaactgcccaaagattctccggcagttgggaagcaaagtgctgctgcccctgacatatgaaaggataaataagagcatgaacaaaagcatccacattgtcgtcacaatggcaaaatcactggagaacagtgtcgagaacaaaatagtgtctcttgatccatccgaagcaggccctccacgttatctaggagatcgctacaagttttatctggagaatctcaccctggggatacgggaaagcaggaaggaggatgagggatggtaccttatgaccctggagaaaaatgtttcagttcagcgcttttgcctgcagttgaggctttatgagcaggtctccactccagaaattaaagttttaaacaagacccaggagaacgggacctgcaccttgatactgggctgcacagtggagaagggggaccatgtggcttacagctggagtgaaaaggcgggcacccacccactgaacccagccaacagctcccacctcctgtccctcaccctcggcccccagcatgctgacaatatctacatctgcaccgtgagcaaccctatcagcaacaattcccagaccttcagcccgtggcccggatgcaggacagacccctcagaaacaaaaccatgggcagtgtatgctgggctgttagggggtgtcatcatgattctcatcatggtggtaatactacagttgagaagaagaggtaaaacgaaccattaccagacaacagtggaaaaaaaaagccttacgatctatgcccaagtccagaaaccaggtgacagtcatcatcagacttcggacttattctaa

SEQ ID NO: 28156 - DNA, 883 bp, Homo sapiens
  source 1..883: mol_type = unassigned DNA
ggagacagctaaggaaagaagctggggcgcatgtttctgcccaaagccgggttttggccgaggtgactacacaccccctttcctggctcccataggctaagtgcctggcttcttgagaagcctgcttcttgagaacaaaaaagtgatttaaagcctcatgggagatgagcaatcctcaagacacaagcagaaaaagtcccagtgatacaggaagcgggttcaggaacctgctggttcctgatacataaatcagacagcctctgctgcatgacacgaagcttgcttctgcctggcatctgtgagcagctgccaggctccggccaggatcccttccttctcctcattggctgatggatcccaaggggctcctctccttgaccttcgtgctgtttctctccctggcttttggggcaagctacggaacaggtgggcgcatgatgaactgcccaaagattctccggcagttgggaagcaaagtgctgctgcccctgacatatgaaaggataaataagagcatgaacaaaagcatccacattgtcgtcacaatggcaaaatcactggagaacagtgtcgagaacaaaatagtgtctcttgatccatccgaagcaggccctccacgttatctaggagatcgctacaagttttatctggagaatctcaccctggggatacgggaaagcaggaaggaggatgagggatggtaccttatgaccctggagaaaagtttacattttggctatctttactttgttctgggagctgatcatgataacctgcagacctgatcaagcctctgtgcctcagtttctctctcaggataaagagtgaatagaggctgaagggtgaatttcttattatacataaaacactctgatattattgt

SEQ ID NO: 28157 - DNA, 1021 bp, Homo sapiens
  source 1..1021: mol_type = unassigned DNA
gaagcttgcttctgcctggcatctgtgagcagctgccaggctccggccaggatcccttccttctcctcattggctgatggatcccaaggggctcctctccttgaccttcgtgctgtttctctccctggcttttggggcaagctacggaacaggtgggcgcatgatgaactgcccaaagattctccggcagttgggaagcaaagtgctgctgcccctgacatatgaaaggataaataagagcatgaacaaaagcatccacattgtcgtcacaatggcaaaatcactggagaacagtgtcgagaacaaaatagtgtctcttgatccatccgaagcaggccctccacgttatctaggagatcgctacaagttttatctggagaatctcaccctggggatacgggaaagcaggaaggaggatgagggatggtaccttatgaccctggagaaaaatgtttcagttcagcgcttttgcctgcagttgaggctttatgagcaggtctccactccagaaattaaagttttaaacaagacccaggagaacgggacctgcaccttgatactgggctgcacagtggagaagggggaccatgtggcttacagctggagtgaaaaggcgggcacccacccactgaacccagccaacagctcccacctcctgtccctcaccctcggcccccagcatgctgacaatatctacatctgcaccgtgagcaaccctatcagcaacaattcccagaccttcagcccgtggcccggatgcaggacagacccctcagaaacaaaaccatgggcagtgtatgctgggctgttagggggtgtcatcatgattctcatcatggtggtaatactacagttgagaagaagagcctcttcagaagaaacttgactccttcccagctcaggacccttgcaccaccatatatgttgctgccacagagcctgtcccagagtctgtccaggaaacaaattccatcacagtctatgctagtgtgacacttccagagagctgacaccagagacc

SEQ ID NO: 28158 - DNA, 2642 bp, Homo sapiens
  source 1..2642: mol_type = unassigned DNA
agaggagccccaagtcttggggaccacagaagatgccatgtgctccacgatgtcggcccccacctgcctggcccacttgcctccctgcttcctgctgctggcactggtccttgtcccctcagatgcctctgggcagagcagcaggaatgactggcaggtgctacagcccgagggccccatgctggtggcagaaggtgagacacttctactgaggtgtatggtggtcggctcctgcactgatggtatgataaaatgggtgaaggtgagcactcaggaccaacaggaaatttataactttaaacgtggctccttccctggggtaatgcccatgatccaacggacatcagaaccactgaattgtgattattccatctatatccacaatgtcaccagggagcacactggaacctaccactgtgtgaggtttgatggtttgagtgaacactcagaaatgaaatcggatgaaggcacctcagtgcttgtgaagggagctggggaccctgaaccagacctgtggatcatccagccccaggaattggtgttggggaccactggagacactgtctttctgaactgcacagtgcttggagacggtccccctggacccatcaggtggttccagggagctggtctgagccgggaggccatttacaactttggaggcatctcccaccccaaggagacagcggtgcaggcctccaacaatgacttcagcattcttctgcaaaacgtctccagtgaggatgcaggcacctattactgtgtaaagtttcagaggaaacccaacaggcaatacctgtctggacagggcaccagcctgaaagtgaaagcaaaatctacctcttccaaagaggcagaattcaccagtgaacctgcaactgagatgtctccaacaggcctcctggttgtgttcgcacctgtggtcctggggctgaaggcaattaccttggctgcactcctactggccctggctacctctcggaggagccctgggcaagaagatgtcaagaccacaggcccagcaggagccatgaacaccttagcatggagcaagggtcaagagtgaggggtcagccccagagtgaggaccctctgagttggagaggagccagggctcctcaaccatttccctacctccagtcccagcctctaggtgcccccaggcctcatgacaaactcctagatccctacatctggttttggtccacctagtgaaattcccttctttgcaccgggcttccctctaaaatgtctccctttctctttttggcctgttcaagacctccttgcttttcagtccctggctcagtctctcctcaacacccttgcccctgctgcagccctttctggtgcgccctgcccctttccccacctcgctacatccttcttggcctccaacatccaactcagagtcttcttcccaggagatgtctgtaagaatctctgaactcaaccagccagaccatctgtgcccctccatctacacctttctccccactccttcctgccttccttccatccccctcatggctggcttgggcaggtataatattagaatgcaggttcagcaactataacaaagctcttaaataacagtggcttaaaccagtggaaatcaaccagaaagttgaccatcagcaggccaagcaatacagagactccctggtattgagacccaggattcactgatctcattgctaccaggtccaccttctaggcagccagactggaaaagagggcaggaaaggggagcaggaccctcccctttaagtgcacagtcaggaacttggccacctcacttatctctacttggctggaatgtggtcacatggtcacacctagctgcaagaaacactgggagatgtagtctttatttctggcagcaatgcgcccagctgcaagttttcactagagaaaccagatggcagatatcaggggataaccagttatctccaccacagcagcatacagacagcctctcacctgccctgtgggacacctgagttcaatgcccagctagctagccagcacttcttcccactatcacctcccctggggcagcatgatgtggggcagtagttcccaagatgagtgattttgcccccactggacttttggcaatgtctagagatgtttttggttggcacaacctgggggggtgctaccaccatctagtggactgagaagccctgacatggggaagagtgtgcatgcccaggagtcagacacacctgcctttaaccctgaggcctctgcctcctccctgtgcaccctcagtgactaatcagagtcccttcccatcacggaacatccaggatactaatgtggacttctctgcattgtgtaagaaccaattcaagaccaggcacggtggcttatgcatgtaatcccagcactttgggaggccgaggtgggtggatcacctgagttcaggagtttgagaccagcctggctaacatggtgaaacctcgtctctactaaaaatacaaaaaattagccaggcgtggtggtgtgcacctgtaatcccagctacttgggaggatggggcaggagaaccgcttgaactgggaggcagaggctgcagtgagctgagatcgcgccattgcactccagcctgggcaacaagagcaaaactccgtctc

SEQ ID NO: 28159 - DNA, 852 bp, Homo sapiens
  source 1..852: mol_type = unassigned DNA
ttagcacagtgactacaggaatcacagcccagacacaaaagcaggaaaccctttgaccgggctccttcctattgcaccaacagccttgtgttgctgcaatgaaaacacttccccaagcagctgtggccaagagacgcagaaactgccttgtccacgggccccgcctcagactccaacactcacaagagagcagaggagccccaagtcttggggaccacagaagatgccatgtgctccacgatgtcggcccccacctgcctggcccacttgcctccctgcttcctgctgctggcactggtccttgtcccctcagatgcctctgggcagagcagcaggaatgactggcaggtgctacagcccgagggccccatgctggtggcagaaggagctggggaccctgaaccagacctgtggatcatccagccccaggaattggtgttggggaccactggagacactgtctttctgaactgcacagtgcttggagacggtccccctggacccatcaggtggttccagggagctggtctgagccgggaggccatttacaactttggaggcatctcccaccccaaggagacagcggtgcaggcctccaacaatgacttcagcattcttctgcaaaacgtctccagtgaggatgcaggcacctattactgtgtaaagtttcagaggaaacccaacaggcaatacctgtctggacagggcaccagcctgaaagtgaaagagcaaaatctacctcttccaaagaggcagaattcaccagtgaacctgcaactgagatgtctccaacaggtgagcgtacccacctcagtggagtcaatgagtcccccacaggcaagggggccatga

SEQ ID NO: 28160 - DNA, 1124 bp, Homo sapiens
  source 1..1124: mol_type = unassigned DNA
gtcttggggaccacagaagatgccatgtgctccacgatgtcggcccccacctgcctggcccacttgcctccctgcttcctgctgctggcactggtccttgtcccctcagatgcctctgggcagagcagcaggaatgactggcaggtgctacagcccgagggccccatgctggtggcagaaggagctggggaccctgaaccagacctgtggatcatccagccccaggaattggtgttggggaccactggagacactgtctttctgaactgcacagtgcttggagacggtccccctggacccatcaggtggttccagggagctggtctgagccgggaggccatttacaactttggaggcatctcccaccccaaggagacagcggtgcaggcctccaacaatgacttcagcattcttctgcaaaacgtctccagtgaggatgcaggcacctattactgtgtaaagtttcagaggaaacccaacaggcaatacctgtctggacagggcaccagcctgaaagtgaaagagcaaaatctacctcttccaaagaggcagaattcaccagtgaacctgcaactgagatgtctccaacaggtgagcgtacccacctcagtggagtcaatgagtcccccacaggcaagggggccatgaatggcttggtcatgggaagggagcagtcccagactcctggggctaacctgccaccaagaatgctcccaggacttcatctcaactgcagaactaggaccccagagaaccatgttataacagctcagctataacgaactttctcatagccagggccatgtaactgtttagtgggaaatgttgtttgagaggtggtgagctccctgtgattctgagtgtagggacacactgtgaggctatgcacagcgacactggagaacatggctttgtagctaagcctcctggatggagccccttcctagtgtaatgggcaggttctcgccccttgagtctggtatctgactctatgaactagcggggaggggacaagaatcagagaccctacttcatggggttgtgtgtgcactcaaggagatcacacatgccaggtgtccagaactgtgcctagcacatctcatgttaacattcaaggactctca

SEQ ID NO: 28161 - DNA, 2539 bp, Homo sapiens
  source 1..2539: mol_type = unassigned DNA
ttagcacagtgactacaggaatcacagcccagacacaaaagcaggaaaccctttgaccgggctccttcctattgcaccaacagccttgtgttgctgcaatgaaaacacttccccaagcagctgtggccaagagacgcagaaactgccttgtccacgggccccgcctcagactccaacactcacaagagagcagaggagccccaagtcttggggaccacagaagatgccatgtgctccacgatgtcggcccccacctgcctggcccacttgcctccctgcttcctgctgctggcactggtccttgtcccctcagatgcctctgggcagagcagcaggaatgactggcaggtgctacagcccgagggccccatgctggtggcagaaggagctggggaccctgaaccagacctgtggatcatccagccccaggaattggtgttggggaccactggagacactgtctttctgaactgcacagtgcttggagacggtccccctggacccatcaggtggttccagggagctggtctgagccgggaggccatttacaactttggaggcatctcccaccccaaggagacagcggtgcaggcctccaacaatgacttcagcattcttctgcaaaacgtctccagtgaggatgcaggcacctattactgtgtaaagtttcagaggaaacccaacaggcaatacctgtctggacagggcaccagcctgaaagtgaaagcaaaatctacctcttccaaagaggcagaattcaccagtgaacctgcaactgagatgtctccaacaggcctcctggttgtgttcgcacctgtggtcctggggctgaaggcaattaccttggctgcactcctactggccctggctacctctcggaggagccctgggcaagaagatgtcaagaccacaggcccagcaggagccatgaacaccttagcatggagcaagggtcaagagtgaggggtcagccccagagtgaggaccctctgagttggagaggagccagggctcctcaaccatttccctacctccagtcccagcctctaggtgcccccaggcctcatgacaaactcctagatccctacatctggttttggtccacctagtgaaattcccttctttgcaccgggcttccctctaaaatgtctccctttctctttttggcctgttcaagacctccttgcttttcagtccctggctcagtctctcctcaacacccttgcccctgctgcagccctttctggtgcgccctgcccctttccccacctcgctacatccttcttggcctccaacatccaactcagagtcttcttcccaggagatgtctgtaagaatctctgaactcaaccagccagaccatctgtgcccctccatctacacctttctccccactccttcctgccttccttccatccccctcatggctggcttgggcaggtataatattagaatgcaggttcagcaactataacaaagctcttaaataacagtggcttaaaccagtggaaatcaaccagaaagttgaccatcagcaggccaagcaatacagagactccctggtattgagacccaggattcactgatctcattgctaccaggtccaccttctaggcagccagactggaaaagagggcaggaaaggggagcaggaccctcccctttaagtgcacagtcaggaacttggccacctcacttatctctacttggctggaatgtggtcacatggtcacacctagctgcaagaaacactgggagatgtagtctttatttctggcagcaatgcgcccagctgcaagttttcactagagaaaccagatggcagatatcaggggataaccagttatctccaccacagcagcatacagacagcctctcacctgccctgtgggacacctgagttcaatgcccagctagctagccagcacttcttcccactatcacctcccctggggcagcatgatgtggggcagtagttcccaagatgagtgattttgcccccactggacttttggcaatgtctagagatgtttttggttggcacaacctgggggggtgctaccaccatctagtggactgagaagccctgacatggggaagagtgtgcatgcccaggagtcagacacacctgcctttaaccctgaggcctctgcctcctccctgtgcaccctcagtgactaatcagagtcccttcccatcacggaacatccaggatactaatgtggacttctctgcattgtgtaagaaccaattcaagaccaggcacggtggcttatgcatgtaatcccagcactttgggaggccgaggtgggtggatcacctgagttcaggagtttgagaccagcctggctaacatggtgaaacctcgtctctactaaaaatacaaaaaattagccaggcgtggtggtgtgcacctgtaatcccagctacttgggaggatggggcaggagaaccgcttgaactgggaggcagaggctgcagtgagctgagatcgcgccattgcactccagcctgggcaacaagagcaaaactccgtctc

SEQ ID NO: 28162 - DNA, 1480 bp, Homo sapiens
  source 1..1480: mol_type = unassigned DNA
aacactcacaagagagcagaggagccccaagtcttggggaccacagaagatgccatgtgctccacgatgtcggcccccacctgcctggcccacttgcctccctgcttcctgctgctggcactggtccttgtcccctcagatgcctctgggcagagcagcaggaatgactggcaggtgctacagcccgagggccccatgctggtggcagaaggtgagacacttctactgaggtgtatggtggtcggctcctgcactgatggtatgataaaatgggtgaagggagcacactggaacctaccactgtgtgaggtttgatggtttgagtgaacactcagaaatgaaatcggatgaaggcacctcagtgcttgtgaagggagctggggaccctgaaccagacctgtggatcatccagccccaggaattggtgttggggaccactggagacactgtctttctgaactgcacagtgcttggagacggtccccctggacccatcaggtggttccagggagctggtctgagccgggaggccatttacaactttggaggcatctcccaccccaaggagacagcggtgcaggcctccaacaatgacttcagcattcttctgcaaaacgtctccagtgaggatgcaggcacctattactgtgtaaagtttcagaggaaacccaacaggcaatacctgtctggacagggcaccagcctgaaagtgaaagcaaaatctacctcttccaaagaggcagaattcaccagtgaacctgcaactgagatgtctccaacaggtgagcgtacccacctcagtggagtcaatgagtcccccacaggcaagggggccatgaatggcttggtcatgggaagggagcagtcccagactcctggggctaacctgccaccaagaatgctcccaggacttcatctcaactgcagaactaggaccccagagaaccatgttataacagctcagctataacgaactttctcatagccagggccatgtaactgtttagtgggaaatgttgtttgagaggtggtgagctccctgtgattctgagtgtagggacacactgtgaggctatgcacagcgacactggagaacatggctttgtagctaagcctcctggatggagccccttcctagtgtaatgggcaggttctcgccccttgagtctggtatctgactctatgaactagcggggaggggacaagaatcagagaccctacttcatggggttgtgtgtgcactcaaggagatcacacatgccaggtgtccagaactgtgcctagcacatctcatgttaacattcaaggactctcagtatctggtgggagcttgtgatagatgtggtcagatttgccttcctgatgctcggccctgctcctgccattcatgggggccagacggcctgggtcccgtgacttctttaacacatgtggccctgagaaaatcatttccccactctgggtctgtctccttatctat

SEQ ID NO: 28163 - DNA, 831 bp, Homo sapiens
  source 1..831: mol_type = unassigned DNA
atgcctgtcccagcctcctggccccatcctcctggtcctttcctgcttctgactctactgctgggacttacagaagtggcaggtgaggaggagctacagatgattcagcctgagaagctcctgttggtcacagttggaaagacagccactctgcactgcactgtgacctccctgcttcccgtgggacccgtcctgtggttcagaggagttggaccaggccgggaattaatctacaatcaaaaagaaggccacttccccagggtaacaacagtttcagacctcacaaagagaaacaacatggacttttccatccgcatcagtagcatcaccccagcagatgtcggcacatactactgtgtgaagtttcgaaaagggagccctgagaacgtggagtttaagtctggaccaggcactgagatggctttgggtgccaaaccctctgcccccgtggtattgggccctgcggcgaggaccacacctgagcatacagtgagtttcacctgtgagtcccatggcttctctcccagagacatcaccctgaaatggttcaaaaatgggaatgagctctcagacttccagaccaacgtggaccccacaggacagagtgtggcctacagcatccgcagcacagccagggtggtactggacccctgggacgttcgctctcaggtcatctgcgaggtggcccatgtcaccttgcagggggaccctcttcgtgggactgccaacttgtctgaggccatccgaggcccggcatcatcccttactgcgctgctcctcatagctgtcctcctgggccccatctacgtcccctggaagcagaagacctga

SEQ ID NO: 28164 - DNA, 1716 bp, Homo sapiens
  source 1..1716: mol_type = unassigned DNA
agagcagggcctgacatctccccagaacagacgtttgaacagagcaggcttctgaggtctccaaaatgcctgtcccagcctcctggccccatcctcctggtcctttcctgcttctgactctactgctgggacttacagaagtggcaggtgaggaggagctacagatgattcagcctgagaagctcctgttggtcacagttggaaagacagccactctgcactgcactgtgacctccctgcttcccgtgggacccgtcctgtggttcagaggagttggaccaggccgggaattaatctacaatcaaaaagaaggccacttccccagggtaacaacagtttcagacctcacaaagagaaacaacatggacttttccatccgcatcagtagcatcaccccagcagatgtcggcacatactactgtgtgaagtttcgaaaagggagccctgagaacgtggagtttaagtctggaccaggcactgagatggctttgggtgccaaaccctctgcccccgtggtattgggccctgcggcgaggaccacacctgagcatacagtgagtttcacctgtgagtcccatggcttctctcccagagacatcaccctgaaatggttcaaaaatgggaatgagctctcagacttccagaccaacgtggaccccacaggacagagtgtggcctacagcatccgcagcacagccagggtggtactggacccctgggacgttcgctctcaggtcatctgcgaggtggcccatgtcaccttgcagggggaccctcttcgtgggactgccaacttgtctgaggccatccgagttccacccaccttggaggttactcaacagcccatgagggtggggaaccaggtaaacgtcacctgccaggtgaggaagttctacccccagagcctacagctgacctggtcggagaatggaaacgtgtgccagagagaaacagcctcgacccttacagagaacaaggatggtacctacaactggacaagctggttcctggtgaacatatctgaccaaagggatgatgtggtcctcacctgccaggtgaagcatgatgggcagctggcggtcagcaaacgccttgccctagaggtcacagtccaccagaaggaccagagctcagatgctacccctggcccggcatcatcccttactgcgctgctcctcatagctgtcctcctgggccccatctacgtcccctggaagcagaagacctgactctccttccttcctcccctgccacgtgggaccctcatctctgctgcctccttcctttcctgagaggctcagcttgagagaatgagccagtgagaagcttctctagacttggctccaaacatctcccctcccaagacatctgcctgcccacaggctcctgttgctccttcacacagacctggatgccccagagcaaggtcttcattcatggtcctgagcaggtgccatgggattgggctctgggcactgacttaacggcacctccctagaaggcgagaaacatgccaaatctaaacacaccaggactcccatccatcgccttgagactgaccgtaaaccacagacgctctccaggttctcaagagttatcctgccttccagattcctgcctatcccaactccccagccttgttgaggttctctattgcctcttgaatacaaatgcactcccaaagtggttttaagaaaataaaaagattatccttcc

SEQ ID NO: 28165 - DNA, 1042 bp, Homo sapiens
  source 1..1042: mol_type = unassigned DNA
agaacagacgtttgaacagagcaggcttctgaggtctccaaaatgcctgtcccagcctcctggccccatcctcctggtcctttcctgcttctgactctactgctgggacttacagaagtggcaggtgaggaggagctacagatgattcagcctgagaagctcctgttggtcacagttggaaagacagccactctgcactgcactgtgacctccctgcttcccgtgggacccgtcctgtggttcagaggagttggaccaggccgggaattaatctacaatcaaaaagaaggccacttccccagggtaacaacagtttcagacctcacaaagagaaacaacatggacttttccatccgcatcagtagcatcaccccagcagatgtcggcacatactactgtgtgaagtttcgaaaagggagccctgagaacgtggagtttaagtctggaccaggcactgagatggctttgggtggcccggcatcatcccttactgcgctgctcctcatagctgtcctcctgggccccatctacgtcccctggaagcagaagacctgactctccttccttcctcccctgccacgtgggaccctcatctctgctgcctccttcctttcctgagaggctcagcttgagagaatgagccagtgagaagcttctctagacttggctccaaacatctcccctcccaagacatctgcctgcccacaggctcctgttgctccttcacacagacctggatgccccagagcaaggtcttcattcatggtcctgagcaggtgccatgggattgggctctgggcactgacttaacggcacctccctagaaggcgagaaacatgccaaatctaaacacaccaggactcccatccatcgccttgagactgaccgtaaaccacagacgctctccaggttctcaagagttatcctgccttccagattcctgcctatcccaactccccagccttgttgaggttctctattgcctcttgaatacaaatgcactcccaaagtggttttaagaaaataaaaagattatccttcc

SEQ ID NO: 28166 - DNA, 1732 bp, Homo sapiens
  source 1..1732: mol_type = unassigned DNA
aagcatgatgggttttactagaacgtttcagtgtcactaagtcacagaagaggaggacaagaagaggaattatggcagggaccagctttatcacagtggtgtacctggtttggcagggtgctcacaacttgtttgtgggatgtggaggtatcagaagtggcaggtgaggaggagctacagatgattcagcctgagaagctcctgttggtcacagttggaaagacagccactctgcactgcactgtgacctccctgcttcccgtgggacccgtcctgtggttcagaggagttggaccaggccgggaattaatctacaatcaaaaagaaggccacttccccagggtaacaacagtttcagacctcacaaagagaaacaacatggacttttccatccgcatcagtagcatcaccccagcagatgtcggcacatactactgtgtgaagtttcgaaaagggagccctgagaacgtggagtttaagtctggaccaggcactgagatggctttgggtgccaaaccctctgcccccgtggtattgggccctgcggcgaggaccacacctgagcatacagtgagtttcacctgtgagtcccatggcttctctcccagagacatcaccctgaaatggttcaaaaatgggaatgagctctcagacttccagaccaacgtggaccccacaggacagagtgtggcctacagcatccgcagcacagccagggtggtactggacccctgggacgttcgctctcaggtcatctgcgaggtggcccatgtcaccttgcagggggaccctcttcgtgggactgccaacttgtctgaggccatccgagttccacccaccttggaggttactcaacagcccatgagggtggggaaccaggtaaacgtcacctgccaggtgaggaagttctacccccagagcctacagctgacctggtcggagaatggaaacgtgtgccagagagaaacagcctcgacccttacagagaacaaggatggtacctacaactggacaagctggttcctggtgaacatatctgaccaaagggatgatgtggtcctcacctgccaggtgaagcatgatgggcagctggcggtcagcaaacgccttgccctagaggtcacagtccaccagaaggaccagagctcagatgctacccctggcccggcatcatcccttactgcgctgctcctcatagctgtcctcctgggccccatctacgtcccctggaagcagaagacctgactctccttccttcctcccctgccacgtgggaccctcatctctgctgcctccttcctttcctgagaggctcagcttgagagaatgagccagtgagaagcttctctagacttggctccaaacatctcccctcccaagacatctgcctgcccacaggctcctgttgctccttcacacagacctggatgccccagagcaaggtcttcattcatggtcctgagcaggtgccatgggattgggctctgggcactgacttaacggcacctccctagaaggcgagaaacatgccaaatctaaacacaccaggactcccatccatcgccttgagactgaccgtaaaccacagacgctctccaggttctcaagagttatcctgccttccagattcctgcctatcccaactccccagccttgttgaggttctctattgcctcttgaatacaaatgcactcccaaagtggttttaagaaaataaaaagattatccttcc

SEQ ID NO: 28167 - DNA, 1383 bp, Homo sapiens
  source 1..1383: mol_type = unassigned DNA
agagcagggcctgacatctccccagaacagacgtttgaacagagcaggcttctgaggtctccaaaatgcctgtcccagcctcctggccccatcctcctggtcctttcctgcttctgactctactgctgggacttacagaagtggcaggtgaggaggagctacagatgattcagcctgagaagctcctgttggtcacagttggaaagacagccactctgcactgcactgtgacctccctgcttcccgtgggacccgtcctgtggttcagaggagttggaccaggccgggaattaatctacaatcaaaaagaaggccacttccccagggtaacaacagtttcagacctcacaaagagaaacaacatggacttttccatccgcatcagtagcatcaccccagcagatgtcggcacatactactgtgtgaagtttcgaaaagggagccctgagaacgtggagtttaagtctggaccaggcactgagatggctttgggtgccaaaccctctgcccccgtggtattgggccctgcggcgaggaccacacctgagcatacagtgagtttcacctgtgagtcccatggcttctctcccagagacatcaccctgaaatggttcaaaaatgggaatgagctctcagacttccagaccaacgtggaccccacaggacagagtgtggcctacagcatccgcagcacagccagggtggtactggacccctgggacgttcgctctcaggtcatctgcgaggtggcccatgtcaccttgcagggggaccctcttcgtgggactgccaacttgtctgaggccatccgaggcccggcatcatcccttactgcgctgctcctcatagctgtcctcctgggccccatctacgtcccctggaagcagaagacctgactctccttccttcctcccctgccacgtgggaccctcatctctgctgcctccttcctttcctgagaggctcagcttgagagaatgagccagtgagaagcttctctagacttggctccaaacatctcccctcccaagacatctgcctgcccacaggctcctgttgctccttcacacagacctggatgccccagagcaaggtcttcattcatggtcctgagcaggtgccatgggattgggctctgggcactgacttaacggcacctccctagaaggcgagaaacatgccaaatctaaacacaccaggactcccatccatcgccttgagactgaccgtaaaccacagacgctctccaggttctcaagagttatcctgccttccagattcctgcctatcccaactccccagccttgttgaggttctctattgcctcttgaatacaaatgcactcccaaagtggttttaagaaaataaaaagattatccttcc

SEQ ID NO: 28168 - DNA, 1895 bp, Homo sapiens
  source 1..1895: mol_type = unassigned DNA
ctggaattgtgggagttgtgtctgccactcggctgccggaggccgaaggccagctattacttctctactgaggccaactgtgagccctggtgtgtttcattggcaggagaagaggctaattaagtgaaactgaaaggtccctgactatggctccccagagcctgccttcatctaggatggctcctctgggcatgctgcttgggctgctgatggccgcctgcttcaccttctgcctcagtcatcagaacctgaaggagtttgccctgaccaacccagagaagagcagcaccaaagaaacagagagaaaagaaaccaaagccgaggaggagctggatgccgaagtcctggaggtgttccacccgacgcatgagtggcaggcccttcagccagggcaggctgtccctgcaggatcccacgtacggctgaatcttcagactggggaaagagaggcaaaactccaatatgaggacaagttccgaaataatttgaaaggcaaaaggctggatatcaacaccaacacctacacatctcaggatctcaagagtgcactggcaaaattcaaggagggggcagagatggagagttcaaaggaagacaaggcaaggcaggctgaggtaaagcggctcttccgccccattgaggaactgaagaaagactttgatgagctgaatgttgtcattgagactgacatgcagatcatggtacggctgatcaacaagttcaatagttccagctccagtttggaagagaagattgctgcgctctttgatcttgaatattatgtccatcagatggacaatgcgcaggacctgctttcctttggtggtcttcaagtggtgatcaatgggctgaacagcacagagcccctcgtgaaggagtatgctgcgtttgtgctgggcgctgccttttccagcaaccccaaggtccaggtggaggccatcgaagggggagccctgcagaagctgctggtcatcctggccacggagcagccgctcactgcaaagaagaaggtcctgtttgcactgtgctccctgctgcgccacttcccctatgcccagcggcagttcctgaagctcggggggctgcaggtcctgaggaccctggtgcaggagaagggcacggaggtgctcgccgtgcgcgtggtcacactgctctacgacctggtcacggagaagatgttcgccgaggaggaggctgagctgacccaggagatgtccccagagaagctgcagcagtatcgccaggtacacctcctgccaggcctgtgggaacagggctggtgcgagatcacggcccacctcctggcgctgcccgagcatgatgcccgtgagaaggtgctgcagacactgggcgtcctcctgaccacctgccgggaccgctaccgtcaggacccccagctcggcaggacactggccagcctgcaggctgagtaccaggtgctggccagcctggagctgcaggatggtgaggacgagggctacttccaggagctgctgggctctgtcaacagcttgctgaaggagctgagatgaggccccacaccaggactggactgggatgccgctagtgaggctgaggggtgccagcgtgggtgggcttctcaggcaggaggacatcttggcagtgctggcttggccattaaatggaaacctgaaggccatcctctttctgctgtgtgtctgtgtagactgggcacagccctgtggccggggggtcaggtgagtggttgggtgatgggctctgctgacgtgcagggctcagcccagggcatccaggaacaggctccagggcaggaacctgggcccaggagttgcaagtctctgcttcttaccaagcagcagctctgtaccttgggaagtcgcttaattgctctgagcttgtttcctcatctgtca

SEQ ID NO: 28169 - DNA, 1923 bp, Homo sapiens
  source 1..1923: mol_type = unassigned DNA
gcggcgtgacagctgccagctcaccggctcagacggtcgccgccgcgtttgcgcagggggagctggtcgccgccgcggccgcctggaattgtgggagttgtgtctgccactcggctgccggaggccgaaggtccctgactatggctccccagagcctgccttcatctaggatggctcctctgggcatgctgcttgggctgctgatggccgcctgcttcaccttctgcctcagtcatcagaacctgaaggagtttgccctgaccaacccagagaagagcagcaccaaagaaacagagagaaaagaaaccaaagccgaggaggagctggatgccgaagtcctggaggtgttccacccgacgcatgagtggcaggcccttcagccagggcaggctgtccctgcaggatcccacgtacggctgaatcttcagactggggaaagagaggcaaaactccaatatgaggacaagttccgaaataatttgaaaggcaaaaggctggatatcaacaccaacacctacacatctcaggatctcaagagtgcactggcaaaattcaaggagggggcagagatggagagttcaaaggaagacaaggcaaggcaggctgaggtaaagcggctcttccgccccattgaggaactgaagaaagactttgatgagctgaatgttgtcattgagactgacatgcagatcatggtacggctgatcaacaagttcaatagttccagctccagtttggaagagaagattgctgcgctctttgatcttgaatattatgtccatcagatggacaatgcgcaggacctgctttcctttggtggtcttcaagtggtgatcaatgggctgaacagcacagagcccctcgtgaaggagtatgctgcgtttgtgctgggcgctgccttttccagcaaccccaaggtccaggtggaggccatcgaagggggagccctgcagaagctgctggtcatcctggccacggagcagccgctcactgcaaagaagaaggtcctgtttgcactgtgctccctgctgcgccacttcccctatgcccagcggcagttcctgaagctcggggggctgcaggtcctgaggaccctggtgcaggagaagggcacggaggtgctcgccgtgcgcgtggtcacactgctctacgacctggtcacggagaagatgttcgccgaggaggaggctgagctgacccaggagatgtccccagagaagctgcagcagtatcgccaggtacacctcctgccaggcctgtgggaacagggctggtgcgagatcacggcccacctcctggcgctgcccgagcatgatgcccgtgagaaggtgctgcagacactgggcgtcctcctgaccacctgccgggaccgctaccgtcaggacccccagctcggcaggacactggccagcctgcaggctgagtaccaggtgctggccagcctggagctgcaggatggtgaggacgagggctacttccaggagctgctgggctctgtcaacagcttgctgaaggagctgagatgaggccccacaccaggactggactgggatgccgctagtgaggctgaggggtgccagcgtgggtgggcttctcaggcaggaggacatcttggcagtgctggcttggccattaaatggaaacctgaaggccatcctctttctgctgtgtgtctgtgtagactgggcacagccctgtggccggggggtcaggtgagtggttgggtgatgggctctgctgacgtgcagggctcagcccagggcatccaggaacaggctccagggcaggaacctgggcccaggagttgcaagtctctgcttcttaccaagcagcagctctgtaccttgggaagtcgcttaattgctctgagcttgtttcctcatctgtcaggagtgccattaaaggagaaaaatcacgtagaaa

SEQ ID NO: 28170 - DNA, 442 bp, Homo sapiens
  source 1..442: mol_type = unassigned DNA
ctctctctctctctctctcactctgtgtacgtgtgtgtgtatactgaggaaaggccatgtgaagacatggcaagagggcagccatctgcaagctaagatgagagtcttcagctggaaccttgatcttggacttctggccttcagaattgtccctgactatggctccccagagcctgccttcatctaggatggctcctctgggcatgctgcttgggctgctgatggccgcctgcttcaccttctgcctcagtcatcagaacctgaaggagtttgccctgaccaacccagagaagagcagcaccaaagaaacagagagaaaagaaaccaaagccgaggaggagctggatgccgaagtcctggaggtgttccacccgacgcatgagtggcaggcccttcagccagggcaggctgtccctgcaggatcccacgtacggctgaatct

SEQ ID NO: 28171 - DNA, 675 bp, Homo sapiens
  source 1..675: mol_type = unassigned DNA
gggagttgtgtctgccactcggctgccggaggccgaagggcccaatccccacccccagtcttgtctgaattgtgtggaagacatgaggcactgagagaggtgggggccgagtggcctcctcccacctgctccccaaacatctgctctgggctgcagtaagctggcaatacagattggtccctgactatggctccccagagcctgccttcatctaggatggctcctctgggcatgctgcttgggctgctgatggccgcctgcttcaccttctgcctcagtcatcagaacctgaaggagtttgccctgaccaacccagagaagagcagcaccaaagaaacagagagaaaagaaaccaaagccgaggaggagctggatgccgaagtcctggaggtgttccacccgacgcatgagtggcaggcccttcagccagggcaggctgtccctgcaggatcccacgtacggctgaatcttcagactggggaaagagaggcaaaactccaatatgaggacaagttccgaaataatttgaaaggcaaaaggctggatatcaacaccaacacctacacatctcaggatctcaagagtgcactggcaaaattcaaggagggggcagagatggagagttcaaaggaagacaaggcaaggcaggctgaggtaaagcggctcttccgcccc

SEQ ID NO: 28172 - DNA, 572 bp, Homo sapiens
  source 1..572: mol_type = unassigned DNA
cacacccagggatggccagtcacctatccagagcctggtgtggtgctgtgaactcaatccctgtctttcagtgtgattggtgccccagggagccaggttgctgggggaagctctcgtggcactcagccgttccattttgtcggcaaaaaaagagggggggagctggcagaaagctaaggcttttgctgctgggtccctgactatggctccccagagcctgccttcatctaggatggctcctctgggcatgctgcttgggctgctgatggccgcctgcttcaccttctgcctcagtcatcagaacctgaaggagtttgccctgaccaacccagagaagagcagcaccaaagaaacagagagaaaagaaaccaaagccgaggaggagctggatgccgaagtcctggaggtgttccacccgacgcatgagtggcaggcccttcagccagggcaggctgtccctgcaggatcccacgtacggctgaatcttcagactggggaaagagaggcaaaactccaatatgaggacaagttccgaaataatttgaaaggcaaaaggctggatatcaacacca

SEQ ID NO: 28173 - DNA, 1431 bp, Homo sapiens
  source 1..1431: mol_type = unassigned DNA
agacggtcgccgccgcgtttgcgcagggggagctggtcgccgccgcggccgcctggaattgtgggagttgtgtctgccactcggctgccggaggccgaaggtccctgactatggctccccagagcctgccttcatctaggatggctcctctgggcatgctgcttgggctgctgatggccgcctgcttcaccttctgcctcagtcatcagaacctgaaggagtttgccctgaccaacccagagaagagcagcaccaaagaaacagagagaaaagaaaccaaagccgaggaggagctggatgccgaagtcctggaggtgttccacccgacgcatgagtggcaggcccttcagccagggcaggctgtccctgcaggatcccacgtacggctgaatcttcagactggggaaagagaggcaaaactccaatatgaggacaagttccgaaataatttgaaaggcaaaaggctggatatcaacaccaacacctacacatctcaggatctcaagagtgcactggcaaaattcaaggagggggcagagatggagagttcaaaggaagacaagatggacaatgcgcaggacctgctttcctttggtggtcttcaagtggtgatcaatgggctgaacagcacagagcccctcgtgaaggagtatgctgcgtttgtgctgggcgctgccttttccagcaaccccaaggtccaggtggaggccatcgaagggggagccctgcagaagctgctggtcatcctggccacggagcagccgctcactgcaaagaagaaggtcctgtttgcactgtgctccctgctgcgccacttcccctatgcccagcggcagttcctgaagctcggggggctgcaggtcctgaggaccctggtgcaggagaagggcacggaggtgctcgccgtgcgcgtggtcacactgctctacgacctggtcacggagaagatgttcgccgaggaggaggctgagctgacccaggagatgtccccagagaagctgcagcagtatcgccaggtacacctcctgccaggcctgtgggaacagggctggtgcgagatcacggcccacctcctggcgctgcccgagcatgatgcccgtgagaaggtgctgcagacactgggcgtcctcctgaccacctgccgggaccgctaccgtcaggacccccagctcggcaggacactggccagcctgcaggctgagtaccaggtgctggccagcctggagctgcaggatggtgaggacgagggctacttccaggagctgctgggctctgtcaacagcttgctgaaggagctgagatgaggccccacaccaggactggactgggatgccgctagtgaggctgaggggtgccagcgtgggtgggcttctcaggcaggaggacatcttggcagtgctggcttggccattaaatggaaacctgaaggcc

SEQ ID NO: 28174 - DNA, 5050 bp, Homo sapiens
  source 1..5050: mol_type = unassigned DNA
gttaaacagctgcttttaatttggtccccccaatctcaggcgtttggggggctagtccgccggccgctcggtctggccggcccgacgtggtgtgggccctgcgggccctgggaccgagctgaggggaggctcggagttccgcggccgaggttttgtagtgcatccctgagcatgagcacagaatgaagcggcgtttggatgaccaggagtcaccggtgtatgcagcccagcagcgtcggatccctggcagcacagaggcttttcctcaccagcaccgggtgcttgcccctgcccctcctgtgtatgaagcagtgtctgagaccatgcagtcagctacgggaattcagtactctgtaacacccagctaccaggtttcagccatgccacagagctccggcagtcatgggcccgctatagcagcagttcatagcagccatcatcacccaacagcggtgcagccccacggaggccaggtggtccagagtcatgctcatccagccccaccagttgcaccagtgcagggacagcagcaatttcagaggctgaaggtggaggatgcgctatcttatcttgaccaggtgaagctgcagtttggtagtcagcctcaggtctacaatgatttccttgacatcatgaaggaatttaaatctcagagcatcgacaccccaggagtgattagtcgtgtgtcccagctattcaaaggccaccccgatctgataatgggattcaacaccttcttgccccctggctacaaaattgaggtgcaaaccaatgacatggtgaatgtgacaactcctggccaggttcatcagattcccacccatggcatccagccacagcctcaaccaccaccccaacatccttcccagccttcagcccagtcagccccagctcctgcccagccagctcctcagcccccacctgccaaagtcagcaagccctcccaactgcaagcacatactccggccagtcagcagactcccccacttccaccgtatgcatccccacgttctccgccggtccagcctcacacaccagtgacaatctcgttgggaacggccccatccttgcagaacaatcaacctgtggagtttaatcatgccatcaactatgttaataagatcaagaacagatttcagggccaaccagacatctacaaagcattcctggagattttgcacacatatcagaaagagcagagaaatgccaaggaagctggaggaaactacactccagcattgacagagcaggaggtgtatgcccaggttgctcgtctctttaaaaaccaggaagatttgttgtcagagtttggacaattcctaccagatgccaacagctccgtgcttttaagcaaaacaactgctgagaaggttgattctgtgagaaatgatcatggaggcactgtcaagaagccccaactgaacaacaagccgcagaggcccagccagaatggctgccagatccgcagacatcctacaggaaccacccctccagttaagaagaaacccaaactgctcaatctgaaggattcttctatggcagatgccagcaaacatggtggtggaacagaatcgttattttttgataaggtccgaaaggctcttcggagtgcagaagcctacgaaaatttcctacgctgtcttgttatttttaaccaggaggtgatctctcgtgctgagcttgtgcaactagtctctcctttcctggggaaattccctgagttgtttaattggtttaaaaactttctgggctataaggagtctgtacatctggaaacttatccaaaggagcgagccacagagggcattgctatggagatagattatgcttcttgtaaacgattgggctccagctatcgagccttaccaaagagttaccagcagcccaagtgtacaggacggactcctctctgtaaagaggttttaaatgatacctgggtttccttcccttcgtggtctgaggactctacctttgtgagttccaagaagactcaatatgaagaacatatttatcgttgtgaagatgaacgctttgagcttgatgtagttttagagaccaatctggcaacaatccgggttctggaagcaatacagaagaagctttcccgcttgtctgctgaagaacaagccaaatttcgcttggacaacacccttgggggcacatcagaagtcatccatagaaaagcactccagaggatatatgctgataaagcagctgacatcattgatggtctgagaaagaatccctccattgctgttccaattgtccttaaaaggttgaagatgaaagaggaagaatggcgagaagctcagagaggctttaacaaagtatggcgagaacaaaatgagaaatactacttgaagtctctggaccaccaggggatcaactttaaacagaatgacaccaaggtcctgaggtctaagagcttactcaatgagattgagagtatctatgatgagaggcaagagcaggctacggaggagaatgctggtgtacctgttggcccacacctctcacttgcgtatgaagacaaacaaatactggaagatgctgctgctctgattatccaccatgtgaagaggcagacaggcattcagaaggaggacaaatataagataaaacaaatcatgcatcattttattccagatttgctctttgcccaaagaggtgatctctcagatgtggaggaagaggaagaagaagagatggatgtagatgaagccacaggggcagttaagaagcacaatggtgttgggggcagtccccctaagtccaagttactgtttagtaacacagcagctcaaaaattaagaggaatggatgaagtatacaacctcttctatgtcaacaacaactggtatatttttatgcgactgcaccagattctctgcctgaggctgctacggatttgttcccaagccgaacggcaaattgaagaagaaaaccgagagagagaatgggaacgggaagtgctgggcataaagcgagacaagagtgacagccctgccattcagctacgtctcaaagaacctatggatgttgatgtagaagattattacccagctttcctggacatggtgcggagcctgctggatggcaacatagactcatcacagtatgaagattcactgagagagatgttcaccattcatgcctacattgcctttaccatggacaaactgatccagagcattgtcagacagctgcagcatatcgtgagtgatgagatctgtgtgcaggtgactgacctttacctggcagaaaataataatggggccaccggaggccagctgaacacacagaactcaaggagcctcctggagtcaacgtatcagcggaaagctgagcagctaatgtcagatgagaattgctttaagcttatgtttattcagagccaaggccaggtccagctgactattgagcttctggacacagaagaggagaattcggatgaccctgtggaagcagagcgctggtcagactacgtggagcgatacatgaattcagatactacctcgcctgagcttcgtgaacatctagcacagaaaccagtatttctccccaggaatctacggcggatccggaagtgtcaacgtggtcgagagcagcaggaaaaggaagggaaggaaggaaacagcaagaagaccatggagaatgtggatagtctggataagctggagtgtagattcaagctgaattcctacaagatggtgtatgtgatcaaatcagaggactatatgtatcggaggaccgccctgctccgggctcatcagtcccatgagcgtgtaagcaagcgtctacatcagagattccaggcctgggtagataaatggaccaaggagcatgtgccccgtgaaatggcagcagagaccagcaagtggctcatgggtgaggggctggagggcctggtgccctgtaccaccacctgtgatacagagaccctgcattttgtgagcattaacaagtatcgtgtcaaatacggcacagtattcaaagccccttaactgcaaagccagagcagataacttggggtgtgtgtggggatgtgtgtgtgggcctatgcactcacacactgaagaaacaaggaagatgcctttcaagcctcactgggcctctctgggacatggccacctgacctgtgtgtggctggtgcagcctggcaccaagtgggctacctgttaggaacatgaataccttacaaagctgaagctggaacttttcccaaagggttttgggtatagcctgccctggaggggaaggaagtccatgcaagcaaagacatgcagtttgcttgcacacaccagcagagctaagactggagtctcctgtggcctaactttcaatgagggaaccggatgctgttcacactttgactggatggagatgcatttacaaaacagactggagaaggacttaatactcagatggattggaactatcatggtcactgctcctctcccctccccacaaaaggaaaaaaaagctggatttgattttttttttctggtcactcgagcacatctaagatcacccattaggttttatctgggacctgcagtttggctttgggattgatcatcttgtggattttattcctgacgattcccttgctgcctacccttttctctcctctggttctcaacctcaacgagttcaaatcagttgtcctttttagctcccgtggaactgttttgtatctgcctctttactagtctaccttagtgccatccaccagctttactctctgacacacacacgcacacacacacacaattttaacttgtttttttgtacataatgtacatactgtcaattttttattaaaagaaatatgctttgatgtgctagcataactgctctagcttcttgtgtaccatagtactgtggcttcagatttagtacctatgaacagatgtacaagacatttattacactttttaccaaagggagttaccattgtagtacttttgtgtaaaacttgtcttcccctttgcccccaacttttttttttttttttttgtaaataaataaagcttggttcttacttaag

SEQ ID NO: 28175 - DNA, 6737 bp, Homo sapiens
  source 1..6737: mol_type = unassigned DNA
gggatttcccgggtaacagagaagcggccgcggcggtagaggcggcggagacggtttctccatcttcccccctccccttcccccctcggagtttccctccctccctccctccctccttcccagtctgggcaccggagcctgtgaccgcttcgttagtggagaggtagctggcagtccgcttcggcgggcctgtgccccgcgccgttctcggggcctccctgctgagctcgcggctcacgctgagagggacacgcagtgacgagcggccgaagcagctttgcggttttgtagtgcatccctgagcatgagcacagaatgaagcggcgtttggatgaccaggagtcaccggtgtatgcagcccagcagcgtcggatccctggcagcacagaggcttttcctcaccagcaccgggtgcttgcccctgcccctcctgtgtatgaagcagtgtctgagaccatgcagtcagctacgggaattcagtactctgtaacacccagctaccaggtttcagccatgccacagagctccggcagtcatgggcccgctatagcagcagttcatagcagccatcatcacccaacagcggtgcagccccacggaggccaggtggtccagagtcatgctcatccagccccaccagttgcaccagtgcagggacagcagcaatttcagaggctgaaggtggaggatgcgctatcttatcttgaccaggtgaagctgcagtttggtagtcagcctcaggtctacaatgatttccttgacatcatgaaggaatttaaatctcagagcatcgacaccccaggagtgattagtcgtgtgtcccagctattcaaaggccaccccgatctgataatgggattcaacaccttcttgccccctggctacaaaattgaggtgcaaaccaatgacatggtgaatgtgacaactcctggccaggttcatcagattcccacccatggcatccagccacagcctcaaccaccaccccaacatccttcccagccttcagcccagtcagccccagctcctgcccagccagctcctcagcccccacctgccaaagtcagcaagccctcccaactgcaagcacatactccggccagtcagcagactcccccacttccaccgtatgcatccccacgttctccgccggtccagcctcacacaccagtgacaatctcgttgggaacggccccatccttgcagaacaatcaacctgtggagtttaatcatgccatcaactatgttaataagatcaagaacagatttcagggccaaccagacatctacaaagcattcctggagattttgcacacatatcagaaagagcagagaaatgccaaggaagctggaggaaactacactccagcattgacagagcaggaggtgtatgcccaggttgctcgtctctttaaaaaccaggaagatttgttgtcagagtttggacaattcctaccagatgccaacagctccgtgcttttaagcaaaacaactgctgagaaggttgattctgtgagaaatgatcatggaggcactgtcaagaagccccaactgaacaacaagccgcagaggcccagccagaatggctgccagatccgcagacatcctacaggaaccacccctccagttaagaagaaacccaaactgctcaatctgaaggattcttctatggcagatgccagcaaacatggtggtggaacagaatcgttattttttgataaggtccgaaaggctcttcggagtgcagaagcctacgaaaatttcctacgctgtcttgttatttttaaccaggaggtgatctctcgtgctgagcttgtgcaactagtctctcctttcctggggaaattccctgagttgtttaattggtttaaaaactttctgggctataaggagtctgtacatctggaaacttatccaaaggagcgagccacagagggcattgctatggagatagattatgcttcttgtaaacgattgggctccagctatcgagccttaccaaagagttaccagcagcccaagtgtacaggacggactcctctctgtaaagaggttttaaatgatacctgggtttccttcccttcgtggtctgaggactctacctttgtgagttccaagaagactcaatatgaagaacatatttatcgttgtgaagatgaacgctttgagcttgatgtagttttagagaccaatctggcaacaatccgggttctggaagcaatacagaagaagctttcccgcttgtctgctgaagaacaagccaaatttcgcttggacaacacccttgggggcacatcagaagtcatccatagaaaagcactccagaggatatatgctgataaagcagctgacatcattgatggtctgagaaagaatccctccattgctgttccaattgtccttaaaaggttgaagatgaaagaggaagaatggcgagaagctcagagaggctttaacaaagtatggcgagaacaaaatgagaaatactacttgaagtctctggaccaccaggggatcaactttaaacagaatgacaccaaggtcctgaggtctaagagcttactcaatgagattgagagtatctatgatgagaggcaagagcaggctacggaggagaatgctggtgtacctgttggcccacacctctcacttgcgtatgaagacaaacaaatactggaagatgctgctgctctgattatccaccatgtgaagaggcagacaggcattcagaaggaggacaaatataagataaaacaaatcatgcatcattttattccagatttgctctttgcccaaagaggtgatctctcagatgtggaggaagaggaagaagaagagatggatgtagatgaagccacaggggcagttaagaagcacaatggtgttgggggcagtccccctaagtccaagttactgtttagtaacacagcagctcaaaaattaagaggaatggatgaagtatacaacctcttctatgtcaacaacaactggtatatttttatgcgactgcaccagattctctgcctgaggctgctacggatttgttcccaagccgaacggcaaattgaagaagaaaaccgagagagagaatgggaacgggaagtgctgggcataaagcgagacaagagtgacagccctgccattcagctacgtctcaaagaacctatggatgttgatgtagaagattattacccagctttcctggacatggtgcggagcctgctggatggcaacatagactcatcacagtatgaagattcactgagagagatgttcaccattcatgcctacattgcctttaccatggacaaactgatccagagcattgtcagacagctgcagcatatcgtgagtgatgagatctgtgtgcaggtgactgacctttacctggcagaaaataataatggggccaccggaggccagctgaacacacagaactcaaggagcctcctggagtcaacgtatcagcggaaagctgagcagctaatgtcagatgagaattgctttaagcttatgtttattcagagccaaggccaggtccagctgactattgagcttctggacacagaagaggagaattcggatgaccctgtggaagcagagcgctggtcagactacgtggagcgatacatgaattcagatactacctcgcctgagcttcgtgaacatctagcacagaaaccagtatttctccccaggaatctacggcggatccggaagtgtcaacgtggtcgagagcagcaggaaaaggaagggaaggaaggaaacagcaagaagaccatggagaatgtggatagtctggataagctggagtgtagattcaagctgaattcctacaagatggtgtatgtgatcaaatcagaggactatatgtatcggaggaccgccctgctccgggctcatcagtcccatgagcgtgtaagcaagcgtctacatcagagattccaggcctgggtagataaatggaccaaggagcatgtgccccgtgaaatggcagcagagaccagcaagtggctcatgggtgaggggctggagggcctggtgccctgtaccaccacctgtgatacagagaccctgcattttgtgagcattaacaagtatcgtgtcaaatacggcacagtattcaaagccccttaactgcaaagccagagcagataacttggggtgtgtgtggggatgtgtgtgtgggcctatgcactcacacactgaagaaacaaggaagatgcctttcaagcctcactgggcctctctgggacatggccacctgacctgtgtgtggctggtgcagcctggcaccaagtgggctacctgttaggaacatgaataccttacaaagctgaagctggaacttttcccaaagggttttgggtatagcctgccctggaggggaaggaagtccatgcaagcaaagacatgcagtttgcttgcacacaccagcagagctaagactggagtctcctgtggcctaactttcaatgagggaaccggatgctgttcacactttgactggatggagatgcatttacaaaacagactggagaaggacttaatactcagatggattggaactatcatggtcactgctcctctcccctccccacaaaaggaaaaaaaagctggatttgattttttttttctggtcactcgagcacatctaagatcacccattaggttttatctgggacctgcagtttggctttgggattgatcatcttgtggattttattcctgacgattcccttgctgcctacccttttctctcctctggttctcaacctcaacgagttcaaatcagttgtcctttttagctcccgtggaactgttttgtatctgcctctttactagtctaccttagtgccatccaccagctttactctctgacacacacacgcacacacacacacaattttaacttgtttttttgtacataatgtacatactgtcaattttttattaaaagaaatatgctttgatgtgctagcataactgctctagcttcttgtgtaccatagtactgtggcttcagatttagtacctatgaacagatgtacaagacatttattacactttttaccaaagggagttaccattgtagtacttttgtgtaaaacttgtcttcccctttgcccccaacttttttttttttttttttgtaaataaataaagcttggttcttacttaaggaataaactctcaacccacgtcccttgtcctcaccagaaaatactgtgaagcagggattttgacttcagttccttatccagggtagaaacaggattttgcttaaaatacttgttacttgtcccaaatcaaaatattccaaaatcttagaatacttaagtcttttagtacgtgtttttttcccttgttcaaataatctgaaaatattttatatttgggtaagttgtcaagctatgtagtttgtatttctatatattttttcttattcacattggtgatggatgggggtgagcaacttaaataccaaaccagtgtttgaaaaaaaagtgtgcataaggcatgtggtataccttataaatggagttgggagggagagaatttgaaatgggatacctatttttttaattacataaatttaaactagcagacatttaaacatgaatgattaggatttttctatgtggttaacctggactttctgaacaaagaccaactgagcccctcccagtactctggtggatttttcttcagcaaccattacgcaagtcttagttgtaaccagcaatgttctgtgtgttttatgtttgctttttagttaaaaatcaccaccaccaccaaaaagaaaaacaaaattttttggctcctggattttcaaaacacatggtagacctctctgattttaggcttttattgtttaaagacagtgtctcgctttatgacccacactggagtgcagtgccacgatcatagctcactgcaggcttgacctcccaggctcaagcagtcctcccacctcggcctcctgagtagctgcatgccaccacgcccagctaattttttaactttttgtagagacagggtcttgctatgctgcccaggttggtctcaaactcctggcctcaagctgtcctcccacctcggcctcgcaaagtgctgagattacaggtgtgagccaccctggcctgattttaggctttttttgtactggggagaagagactgtgagccaaagtgtagggtgccaaaaagagctttgtgggatgagattttagggcaaagctggggcagtgtctgacttggcggtggtcatgtgtactgatttaggggaaagatcttgaggttttctcaaataattcacctatccccgtgttccctcaagaaaggtcatgttgacctggaaccataggggaaattggtggggtgtgatcagggtcagccccagctgttgctgcccctgcagtgttttgtccagagcacttgcctgcaggtcaggataggatttcaaggccagttcaggagaaagtcccaacccaccagtgcaaccaacaaaagagtaagttttacctacagcctgggttttcacaagtagcatttttattcctcctgctgtctgacatctgagctccaagctctaaacccaacctgtattatatgcagcagcaggttatctttgttttaaatcacatttgttattctgtacttagtcacctttccgtgtgatctgcatttgaaatgttgtaaacttggtcagtatttccattaaaatatcagggctaa

SEQ ID NO: 28176 - DNA, 6679 bp, Homo sapiens
  source 1..6679: mol_type = unassigned DNA
ccagtctgggcaccggagcctgtgaccgcttcgttagtggagaggtagctggcagtccgcttcggcgggcctgtgccccgcgccgttctcggggcctccctgctgagctcgcggctcacgctgagagggacacgcagtgacgagcggccgaagcagctttgcggtgagagcacgctgggccgggggccgggcgggagcctggtggcgggtaacgccggactcgagggttttgtagtgcatccctgagcatgagcacagaatgaagcggcgtttggatgaccaggagtcaccggtgtatgcagcccagcagcgtcggatccctggcagcacagaggcttttcctcaccagcaccgggtgcttgcccctgcccctcctgtgtatgaagcagtgtctgagaccatgcagtcagctacgggaattcagtactctgtaacacccagctaccaggtttcagccatgccacagagctccggcagtcatgggcccgctatagcagcagttcatagcagccatcatcacccaacagcggtgcagccccacggaggccaggtggtccagagtcatgctcatccagccccaccagttgcaccagtgcagggacagcagcaatttcagaggctgaaggtggaggatgcgctatcttatcttgaccaggtgaagctgcagtttggtagtcagcctcaggtctacaatgatttccttgacatcatgaaggaatttaaatctcagagcatcgacaccccaggagtgattagtcgtgtgtcccagctattcaaaggccaccccgatctgataatgggattcaacaccttcttgccccctggctacaaaattgaggtgcaaaccaatgacatggtgaatgtgacaactcctggccaggttcatcagattcccacccatggcatccagccacagcctcaaccaccaccccaacatccttcccagccttcagcccagtcagccccagctcctgcccagccagctcctcagcccccacctgccaaagtcagcaagccctcccaactgcaagcacatactccggccagtcagcagactcccccacttccaccgtatgcatccccacgttctccgccggtccagcctcacacaccagtgacaatctcgttgggaacggccccatccttgcagaacaatcaacctgtggagtttaatcatgccatcaactatgttaataagatcaagaacagatttcagggccaaccagacatctacaaagcattcctggagattttgcacacatatcagaaagagcagagaaatgccaaggaagctggaggaaactacactccagcattgacagagcaggaggtgtatgcccaggttgctcgtctctttaaaaaccaggaagatttgttgtcagagtttggacaattcctaccagatgccaacagctccgtgcttttaagcaaaacaactgctgagaaggttgattctgtgagaaatgatcatggaggcactgtcaagaagccccaactgaacaacaagccgcagaggcccagccagaatggctgccagatccgcagacatcctacaggaaccacccctccagttaagaagaaacccaaactgctcaatctgaaggattcttctatggcagatgccagcaaacatggtggtggaacagaatcgttattttttgataaggtccgaaaggctcttcggagtgcagaagcctacgaaaatttcctacgctgtcttgttatttttaaccaggaggtgatctctcgtgctgagcttgtgcaactagtctctcctttcctggggaaattccctgagttgtttaattggtttaaaaactttctgggctataaggagtctgtacatctggaaacttatccaaaggagcgagccacagagggcattgctatggagatagattatgcttcttgtaaacgattgggctccagctatcgagccttaccaaagagttaccagcagcccaagtgtacaggacggactcctctctgtaaagaggttttaaatgatacctgggtttccttcccttcgtggtctgaggactctacctttgtgagttccaagaagactcaatatgaagaacatatttatcgttgtgaagatgaacgctttgagcttgatgtagttttagagaccaatctggcaacaatccgggttctggaagcaatacagaagaagctttcccgcttgtctgctgaagaacaagccaaatttcgcttggacaacacccttgggggcacatcagaagtcatccatagaaaagcactccagaggatatatgctgataaagcagctgacatcattgatggtctgagaaagaatccctccattgctgttccaattgtccttaaaaggttgaagatgaaagaggaagaatggcgagaagctcagagaggctttaacaaagtatggcgagaacaaaatgagaaatactacttgaagtctctggaccaccaggggatcaactttaaacagaatgacaccaaggtcctgaggtctaagagcttactcaatgagattgagagtatctatgatgagaggcaagagcaggctacggaggagaatgctggtgtacctgttggcccacacctctcacttgcgtatgaagacaaacaaatactggaagatgctgctgctctgattatccaccatgtgaagaggcagacaggcattcagaaggaggacaaatataagataaaacaaatcatgcatcattttattccagatttgctctttgcccaaagaggtgatctctcagatgtggaggaagaggaagaagaagagatggatgtagatgaagccacaggggcagttaagaagcacaatggtgttgggggcagtccccctaagtccaagttactgtttagtaacacagcagctcaaaaattaagaggaatggatgaagtatacaacctcttctatgtcaacaacaactggtatatttttatgcgactgcaccagattctctgcctgaggctgctacggatttgttcccaagccgaacggcaaattgaagaagaaaaccgagagagagaatgggaacgggaagtgctgggcataaagcgagacaagagtgacagccctgccattcagctacgtctcaaagaacctatggatgttgatgtagaagattattacccagctttcctggacatggtgcggagcctgctggatggcaacatagactcatcacagtatgaagattcactgagagagatgttcaccattcatgcctacattgcctttaccatggacaaactgatccagagcattgtcagacagctgcagcatatcgtgagtgatgagatctgtgtgcaggtgactgacctttacctggcagaaaataataatggggccaccggaggccagctgaacacacagaactcaaggagcctcctggagtcaacgtatcagcggaaagctgagcagctaatgtcagatgagaattgctttaagcttatgtttattcagagccaaggccaggtccagctgactattgagcttctggacacagaagaggagaattcggatgaccctgtggaagcagagcgctggtcagactacgtggagcgatacatgaattcagatactacctcgcctgagcttcgtgaacatctagcacagaaaccagtatttctccccaggaatctacggcggatccggaagtgtcaacgtggtcgagagcagcaggaaaaggaagggaaggaaggaaacagcaagaagaccatggagaatgtggatagtctggataagctggagtgtagattcaagctgaattcctacaagatggtgtatgtgatcaaatcagaggactatatgtatcggaggaccgccctgctccgggctcatcagtcccatgagcgtgtaagcaagcgtctacatcagagattccaggcctgggtagataaatggaccaaggagcatgtgccccgtgaaatggcagcagagaccagcaagtggctcatgggtgaggggctggagggcctggtgccctgtaccaccacctgtgatacagagaccctgcattttgtgagcattaacaagtatcgtgtcaaatacggcacagtattcaaagccccttaactgcaaagccagagcagataacttggggtgtgtgtggggatgtgtgtgtgggcctatgcactcacacactgaagaaacaaggaagatgcctttcaagcctcactgggcctctctgggacatggccacctgacctgtgtgtggctggtgcagcctggcaccaagtgggctacctgttaggaacatgaataccttacaaagctgaagctggaacttttcccaaagggttttgggtatagcctgccctggaggggaaggaagtccatgcaagcaaagacatgcagtttgcttgcacacaccagcagagctaagactggagtctcctgtggcctaactttcaatgagggaaccggatgctgttcacactttgactggatggagatgcatttacaaaacagactggagaaggacttaatactcagatggattggaactatcatggtcactgctcctctcccctccccacaaaaggaaaaaaaagctggatttgattttttttttctggtcactcgagcacatctaagatcacccattaggttttatctgggacctgcagtttggctttgggattgatcatcttgtggattttattcctgacgattcccttgctgcctacccttttctctcctctggttctcaacctcaacgagttcaaatcagttgtcctttttagctcccgtggaactgttttgtatctgcctctttactagtctaccttagtgccatccaccagctttactctctgacacacacacgcacacacacacacaattttaacttgtttttttgtacataatgtacatactgtcaattttttattaaaagaaatatgctttgatgtgctagcataactgctctagcttcttgtgtaccatagtactgtggcttcagatttagtacctatgaacagatgtacaagacatttattacactttttaccaaagggagttaccattgtagtacttttgtgtaaaacttgtcttcccctttgcccccaacttttttttttttttttttgtaaataaataaagcttggttcttacttaaggaataaactctcaacccacgtcccttgtcctcaccagaaaatactgtgaagcagggattttgacttcagttccttatccagggtagaaacaggattttgcttaaaatacttgttacttgtcccaaatcaaaatattccaaaatcttagaatacttaagtcttttagtacgtgtttttttcccttgttcaaataatctgaaaatattttatatttgggtaagttgtcaagctatgtagtttgtatttctatatattttttcttattcacattggtgatggatgggggtgagcaacttaaataccaaaccagtgtttgaaaaaaaagtgtgcataaggcatgtggtataccttataaatggagttgggagggagagaatttgaaatgggatacctatttttttaattacataaatttaaactagcagacatttaaacatgaatgattaggatttttctatgtggttaacctggactttctgaacaaagaccaactgagcccctcccagtactctggtggatttttcttcagcaaccattacgcaagtcttagttgtaaccagcaatgttctgtgtgttttatgtttgctttttagttaaaaatcaccaccaccaccaaaaagaaaaacaaaattttttggctcctggattttcaaaacacatggtagacctctctgattttaggcttttattgtttaaagacagtgtctcgctttatgacccacactggagtgcagtgccacgatcatagctcactgcaggcttgacctcccaggctcaagcagtcctcccacctcggcctcctgagtagctgcatgccaccacgcccagctaattttttaactttttgtagagacagggtcttgctatgctgcccaggttggtctcaaactcctggcctcaagctgtcctcccacctcggcctcgcaaagtgctgagattacaggtgtgagccaccctggcctgattttaggctttttttgtactggggagaagagactgtgagccaaagtgtagggtgccaaaaagagctttgtgggatgagattttagggcaaagctggggcagtgtctgacttggcggtggtcatgtgtactgatttaggggaaagatcttgaggttttctcaaataattcacctatccccgtgttccctcaagaaaggtcatgttgacctggaaccataggggaaattggtggggtgtgatcagggtcagccccagctgttgctgcccctgcagtgttttgtccagagcacttgcctgcaggtcaggataggatttcaaggccagttcaggagaaagtcccaacccaccagtgcaaccaacaaaagagtaagttttacctacagcctgggttttcacaagtagcatttttattcctcctgctgtctgacatctgagctccaagctctaaacccaacctgtattatatgcagcagcaggttatctttgttttaaatcacatttgttattctgtacttagtcacctttccgtgtgatctgcatttgaaatgttgtaaacttggtcagtatttccattaaaatatcagggct

SEQ ID NO: 28177 - DNA, 5033 bp, Homo sapiens
  source 1..5033: mol_type = unassigned DNA
ctccgacttcggacatggcgcacgctggcggtggcagcggtggcagcggtgccggcggccccgcgggccgggggctgagcggcgcccgctggggtcgctcgggctccgcaggccacgagaagctgccggtgcacgtagaagacgccctcacctatctggaccaggtgaagatccgctttggcagcgaccctgccacctacaacggcttcctggagatcatgaaggagttcaaaagccagagcatcgatactcctggagtcatcagacgtgtctcgcagctcttccacgagcaccctgacctcattgttggattcaacgcttttcttcccctcggatatagaatagacattcccaagaatggcaagttaaacatacagtcgcctctgacaagccaggagaattcgcacaaccacggggacggtgcagaggacttcaagcagcaggtgccgtataaagaggacaaaccccaggtgcccctggagtccgattccgtggaattcaacaacgccatcagctatgtgaataagattaaaacccgcttcctagaccacccagaaatctacaggtcattcctggagatcctgcacacgtaccagaaggagcagctgaacacgaggggccggccattccgaggcatgtctgaagaggaggtgttcaccgaggtggccaacctcttccggggccaggaggacctgctctcagagtttggacagttcctgcccgaagccaagcggtctctgttcacaggaaacgggccgtgcgagatgcacagcgtgcagaagaacgagcacgacaagaccccggagcacagcaggaagcgctcccggccctcgctcctccgccccgtgtctgcacccgccaagaaaaaaatgaaacttcgtggtaccaaagacctgtccatcgctgcagtggggaagtacgggactctgcaggaattttctttctttgacaaggtccgccgggtgctgaagagccaggaggtgtatgaaaacttcctccgctgcatcgcactcttcaaccaggagctggtgtctggctctgagctcctgcagctcgtcagcccatttctggggaaatttccagaactctttgcacagttcaagtccttcctgggggtaaaagagctgtccttcgcgccacccatgagcgacagatccggggacgggataagccgggaaattgattatgcatcctgcaagcgcataggatccagctaccgggcactccccaaaacctaccagcagcccaagtgcagtgggaggacagccatctgcaaggaggtactgaacgacacctgggtctccttcccttcctggtctgaggactccacgttcgtcagctccaagaagacaccgtacgaggagcagcttcaccgctgtgaggacgagcgcttcgagttagacgttgtcctggagacgaacctggccacaatccgtgtgttggaaagtgtgcagaagaagctatctcggatggcgccggaagaccaggagaagttccggctggacgactccctgggaggcacgtcggaggtgatccagcgccgtgccatttatcgcatctatggcgacaaggccccggagatcatcgagagcctcaagaagaaccctgtcaccgctgtccccgttgtcctgaaaagactgaaggccaaggaagaggagtggcgggaggcccagcagggcttcaacaagatctggcgggagcagtatgagaaggcgtacctcaagtcccttgaccaccaggctgtgaacttcaagcagaacgacaccaaggccctgcgctccaagagcttgctcaacgagatcgagagcgtctacgacgagcaccaggagcagcactcggagggccgcagtgccccctctagcgagccgcacctcatctttgtgtacgaggaccggcagatcctggaggacgcagcagcgctcatcagctactacgtgaagcggcagccggccatccagaaggaggaccagggcaccatccaccagctgctgcaccagttcgtgcccagcctcttcttctctcagcagctggacctgggcgcctccgaggagtcagctgatgaggaccgggacagcccccaggggcagaccacagaccccagtgagcggaagaagccggcgccaggaccccacagtagccccccagaggagaagggggccttcggggatgccccggccactgagcagccacccctgccgcccccagccccgcacaagcccctggacgatgtctacagcctattttttgccaacaacaactggtacttcttcctgcgcctgcaccagaccctgtgctccaggctgctgaagatctaccgccaggcgcagaagcagcttctggagtatcggaccgagaaggagcgggagaagctgctgtgtgagggccgcagggagaagggcagcgaccccgccatggagctgcggctgaagcagcccagtgaagtggagctggaggagtactacccggccttcctggacatggtgcggagcctgctggagggcagcatcgaccccacgcagtacgaggacaccctacgcgagatgttcaccatccatgcctacgtgggcttcaccatggacaagctggtgcagaacattgcgcggcagctgcaccacctcgtgagcgatgacgtctgcctgaaggtggtggagctctacctgaacgagaagaagcggggtgccgctggtgggaacctgtcctcccgctgcgtccgcgctgctagggagaccagctaccagtggaaggctgagcgctgcatggccgacgagaactgcttcaaggtgatgttcctgcagcgcaaagggcaggtgatcatgaccatcgagctcctggacaccgaggaggcccagacggaggaccctgtggaggtccagcacctggctcggtacgtggagcagtatgtggggaccgagggcgcgtccagctcgcccactgagggcttcctcctgaaacctgtgttcctgcagaggaacctcaagaagttccgccgccggtggcagagcgagcaggcgcgggccctgcgcggtgaggccaggagctcctggaagcggctggtgggcgtggagagcgcctgcgacgtggactgccgcttcaagctcagcactcacaagatggtgttcatcgtgaactccgaggactacatgtaccgtcgcgggaccctctgccgggccaagcaggtgcagcccctggtcctgctccgccaccaccagcactttgaggagtggcacagccgctggctggaggacaatgtgacggtggaggcggctagcctggtgcaggactggctgatgggtgaggaggacgaggacatggtaccctgcaagacgctgtgtgagacagtgcacgtgcacggcctgcccgtgacccgctaccgcgtgcagtacagccgccgcccggcctcgccctgacccgccctcatgggcaccgggcaggcgcctcacagagcacagacgtgccctcggccttggtcgtgtcggggccgttttcttgaacgacgtgagaggcatctcccagcccctctgctgccggacagcgcactccagggcaggacgccgcccccgtggctcccggtctcctgtgggcctgctgtgtgccaaacctgagctacctgcacccgagccctggggctcagccccaccacaggggcgggtggacgtgctggccgaggaacaagcaatcatgtttgcgtccccgtccgtcacatgtgccaaatccctggcaggcagatggctcctgccccatattcttgccgtgtcttggaaaagtcacaggtgacagccctcctgaggcccacactttggagggggtccatgtccaagagaccctgacaaggaaggagttgagccctgggtaggcttgcttgaaaagtgagtccttccagaatattctcagagctgccagaaacatcatctgagggtttgggcatcagctctgcctggctggtgttcaggccctcagtcactttggaagtgagaagaacccttcagccaaacctttgggatcccattttgaagtccagagctggagcaggcgggcagtgccctgggagaccccgctctggataagacacccaaccccaactccagcagctggactctgggcccacaaggggagggaccccagccagtattccctcagagccggcacgaccctgctgtggggcggcgggcccagtcgtgttcctgcagtgggcaccctaggcgtatgtgtatacacgcacagatatttattcctttcgcttttagtggttgttatttctgtagcagccaagtcctgcggctccctggggctgagatctccctttgtggaactccgagagccgccctgacagtcccagccgccacccaaggagccccatccgcccacccaccctgggacccacgcggccactccagggatcattgttgtccttttgtgaggggctgaggcgactgtcccatggaggcatccaaggctttctgtgccaagaatcccaagtgactggggctggggaccacttctccaggcctctctccccgaccatgagagcccctggccctggcccctgcacaccagtaggcccagaataaccgccacccttgccatcctgcaacagctggactcaagtttccaggaagtggagatgtgtttctagaagtttcctgtggaacctggaggctcctgatgcctttgactccaggctgggcgattccgatgctgacccgtcctcctgggctccccacccccgctccccaagtgtcacacaggcactttgtacacatcctggttttctaagaagggaacttgccatcaagattcctgtaccaggcccacggccgtctcgggcagagccacctgggccccgggtgcagccggagaccccgccgagcccctcctcccagtattcccatccccgcatgcttctagggagcgcctcttttccgttcttgaggaatttctgttctggggcttgtccttcctttgcagctgttttgaatgtagttttccttttctatttatttgcacattaaagttaataattgaatattgacatc

SEQ ID NO: 28178 - DNA, 5129 bp, Homo sapiens
  source 1..5129: mol_type = unassigned DNA
ctccgacttcggacatggcgcacgctggcggtggcagcggtggcagcggtgccggcggccccgcgggccgggggctgagcggcgcccgctggggtcgctcgggctccgcaggccacgagaagctgccggtgcacgtagaagacgccctcacctatctggaccaggtgaagatccgctttggcagcgaccctgccacctacaacggcttcctggagatcatgaaggagttcaaaagccagagcatcgatactcctggagtcatcagacgtgtctcgcagctcttccacgagcaccctgacctcattgttggattcaacgcttttcttcccctcggatatagaatagacattcccaagaatggcaagttaaacatacagtcgcctctgacaagccaggagaattcgcacaaccacggggacggtgcagaggacttcaagcagcaggtgccgtataaagaggacaaaccccaggtgcccctggagtccgattccgtggaattcaacaacgccatcagctatgtgaataagattaaaacccgcttcctagaccacccagaaatctacaggtcattcctggagatcctgcacacgtaccagaaggagcagctgaacacgaggggccggccattccgaggcatgtctgaagaggaggtgttcaccgaggtggccaacctcttccggggccaggaggacctgctctcagagtttggacagttcctgcccgaagccaagcggtctctgttcacaggaaacgggccgtgcgagatgcacagcgtgcagaagaacgagcacgacaagaccccggagcacagcaggaagcgctcccggccctcgctcctccgccccgtgtctgcacccgccaagaaaaaaatgaaacttcgtggtaccaaagacctgtccatcgctgcagtggggaagtacgggactctgcaggaattttctttctttgacaaggtccgccgggtgctgaagagccaggaggtgtatgaaaacttcctccgctgcatcgcactcttcaaccaggagctggtgtctggctctgagctcctgcagctcgtcagcccatttctggggaaatttccagaactctttgcacagttcaagtccttcctgggggtaaaagagctgtccttcgcgccacccatgagcgacagatccggggacgggataagccgggaaattgattatgcatcctgcaagcgcataggatccagctaccgggcactccccaaaacctaccagcagcccaagtgcagtgggaggacagccatctgcaaggagcttgaccattggacacttctccagggttcgtggacagacgattactgcatgtccaagttcaagaatacctgctggattccaggatatagtgcaggggtactgaacgacacctgggtctccttcccttcctggtctgaggactccacgttcgtcagctccaagaagacaccgtacgaggagcagcttcaccgctgtgaggacgagcgcttcgagttagacgttgtcctggagacgaacctggccacaatccgtgtgttggaaagtgtgcagaagaagctatctcggatggcgccggaagaccaggagaagttccggctggacgactccctgggaggcacgtcggaggtgatccagcgccgtgccatttatcgcatctatggcgacaaggccccggagatcatcgagagcctcaagaagaaccctgtcaccgctgtccccgttgtcctgaaaagactgaaggccaaggaagaggagtggcgggaggcccagcagggcttcaacaagatctggcgggagcagtatgagaaggcgtacctcaagtcccttgaccaccaggctgtgaacttcaagcagaacgacaccaaggccctgcgctccaagagcttgctcaacgagatcgagagcgtctacgacgagcaccaggagcagcactcggagggccgcagtgccccctctagcgagccgcacctcatctttgtgtacgaggaccggcagatcctggaggacgcagcagcgctcatcagctactacgtgaagcggcagccggccatccagaaggaggaccagggcaccatccaccagctgctgcaccagttcgtgcccagcctcttcttctctcagcagctggacctgggcgcctccgaggagtcagctgatgaggaccgggacagcccccaggggcagaccacagaccccagtgagcggaagaagccggcgccaggaccccacagtagccccccagaggagaagggggccttcggggatgccccggccactgagcagccacccctgccgcccccagccccgcacaagcccctggacgatgtctacagcctattttttgccaacaacaactggtacttcttcctgcgcctgcaccagaccctgtgctccaggctgctgaagatctaccgccaggcgcagaagcagcttctggagtatcggaccgagaaggagcgggagaagctgctgtgtgagggccgcagggagaagggcagcgaccccgccatggagctgcggctgaagcagcccagtgaagtggagctggaggagtactacccggccttcctggacatggtgcggagcctgctggagggcagcatcgaccccacgcagtacgaggacaccctacgcgagatgttcaccatccatgcctacgtgggcttcaccatggacaagctggtgcagaacattgcgcggcagctgcaccacctcgtgagcgatgacgtctgcctgaaggtggtggagctctacctgaacgagaagaagcggggtgccgctggtgggaacctgtcctcccgctgcgtccgcgctgctagggagaccagctaccagtggaaggctgagcgctgcatggccgacgagaactgcttcaaggtgatgttcctgcagcgcaaagggcaggtgatcatgaccatcgagctcctggacaccgaggaggcccagacggaggaccctgtggaggtccagcacctggctcggtacgtggagcagtatgtggggaccgagggcgcgtccagctcgcccactgagggcttcctcctgaaacctgtgttcctgcagaggaacctcaagaagttccgccgccggtggcagagcgagcaggcgcgggccctgcgcggtgaggccaggagctcctggaagcggctggtgggcgtggagagcgcctgcgacgtggactgccgcttcaagctcagcactcacaagatggtgttcatcgtgaactccgaggactacatgtaccgtcgcgggaccctctgccgggccaagcaggtgcagcccctggtcctgctccgccaccaccagcactttgaggagtggcacagccgctggctggaggacaatgtgacggtggaggcggctagcctggtgcaggactggctgatgggtgaggaggacgaggacatggtaccctgcaagacgctgtgtgagacagtgcacgtgcacggcctgcccgtgacccgctaccgcgtgcagtacagccgccgcccggcctcgccctgacccgccctcatgggcaccgggcaggcgcctcacagagcacagacgtgccctcggccttggtcgtgtcggggccgttttcttgaacgacgtgagaggcatctcccagcccctctgctgccggacagcgcactccagggcaggacgccgcccccgtggctcccggtctcctgtgggcctgctgtgtgccaaacctgagctacctgcacccgagccctggggctcagccccaccacaggggcgggtggacgtgctggccgaggaacaagcaatcatgtttgcgtccccgtccgtcacatgtgccaaatccctggcaggcagatggctcctgccccatattcttgccgtgtcttggaaaagtcacaggtgacagccctcctgaggcccacactttggagggggtccatgtccaagagaccctgacaaggaaggagttgagccctgggtaggcttgcttgaaaagtgagtccttccagaatattctcagagctgccagaaacatcatctgagggtttgggcatcagctctgcctggctggtgttcaggccctcagtcactttggaagtgagaagaacccttcagccaaacctttgggatcccattttgaagtccagagctggagcaggcgggcagtgccctgggagaccccgctctggataagacacccaaccccaactccagcagctggactctgggcccacaaggggagggaccccagccagtattccctcagagccggcacgaccctgctgtggggcggcgggcccagtcgtgttcctgcagtgggcaccctaggcgtatgtgtatacacgcacagatatttattcctttcgcttttagtggttgttatttctgtagcagccaagtcctgcggctccctggggctgagatctccctttgtggaactccgagagccgccctgacagtcccagccgccacccaaggagccccatccgcccacccaccctgggacccacgcggccactccagggatcattgttgtccttttgtgaggggctgaggcgactgtcccatggaggcatccaaggctttctgtgccaagaatcccaagtgactggggctggggaccacttctccaggcctctctccccgaccatgagagcccctggccctggcccctgcacaccagtaggcccagaataaccgccacccttgccatcctgcaacagctggactcaagtttccaggaagtggagatgtgtttctagaagtttcctgtggaacctggaggctcctgatgcctttgactccaggctgggcgattccgatgctgacccgtcctcctgggctccccacccccgctccccaagtgtcacacaggcactttgtacacatcctggttttctaagaagggaacttgccatcaagattcctgtaccaggcccacggccgtctcgggcagagccacctgggccccgggtgcagccggagaccccgccgagcccctcctcccagtattcccatccccgcatgcttctagggagcgcctcttttccgttcttgaggaatttctgttctggggcttgtccttcctttgcagctgttttgaatgtagttttccttttctatttatttgcacattaaagttaataattgaatattgacatc

SEQ ID NO: 28179 - DNA, 4140 bp, Homo sapiens
  source 1..4140: mol_type = unassigned DNA
aatagacgggaggctcgttacggcggcggaagcagcggcgctggagtgaggggtggggggcagagtgctagctccccggcggtggctgcgggtccggagcctggggacgtcggccccacagacggagagcgcgcgggagcgagctcaaggcggcgcggcggccactgggcgcagcacccaggtggaaatgagttctcaacagtttcctcggttaggagccccttctaccgggctgagccaggccccttctcagattgcaaacagtggttctgctggattgataaacccagctgctacagtcaatgatgaatctggtcgagattctgaagtcagtgccagggagcacatgagttccagcagctccctccagtcccgggaggagaagcaagagcctgttgtggtaaggccctatccacaggtgcagatgttgtcgacacaccatgctgtcgcatcagccacacctgttgcagtgacagccccgccagcacacctgacgccagcagtgccactttcattttcggagggacttatgaagccgcccccgaagcccaccatgcctagccgtcccattgctcctgctccaccttctaccctgtcacttccccccaaggttccagggcaggttaccgttaccatggagagtagcatccctcaagcttcagccattcctgtggcaacaatcagtggacaacagggccatcccagtaacctgcatcacatcatgactacaaatgtgcaaatgtctatcatccgcagcaatgctcctgggccccctcttcacattggagcttctcatttacctcgaggtgcagctgctgctgctgtgatgtccagttctaaagtaaccacagtcctgaggccgacctcacagctgccaaatgctgctactgctcagccagcagtacagcacatcattcaccaaccaatccagtctcggccacctgtgaccacctccaatgccatccctcctgctgtggtagcaactgtctcagccaccagagctcagtctccagtcatcactacgacagcggcgcatgctactgattcagcacttagtaggccaaccttgtctatccagcatcctccatctgcagcaatcagtattcagcgtcctgcccagtcacgagatgtcacaacaagaatcacactaccatctcaccctgcattagggacgccaaaacagcagcttcatacaatggctcagaaaacaatcttcagtactggcacgccagtggctgcagccacagtagcacctattttggcaaccaacaccattccttcagcgaccacagctggatctgtgtcacacacgcaagctcccacaagtaccattgttaccatgacagtaccctcccattcctcccatgctactgctgtgaccacctcaaacatcccagtcgccaaggtggtgccccagcagatcacgcacacttctcctcggatccagccagactaccctgccgagaggagtagcctgattcccatctccggacatcgggcctctcccaatcctgtggccatggaaacccgaagtgacaacagaccgtctgttcccgttcagttccaatattttttgccaacttaccccccttctgcatacccactggcggcacatacctacaccccaatcaccagttccgtgtccactatccgacagtatccagtttcagctcaggctccaaactctgccatcacagctcagactggtgttggggtagcgtctaccgtccacctaaaccccatgcagttgatgacagtggatgcatcgcatgctcgacatattcaagggatccagccagcacccatcagtacccagggtatccagccggcccccattgggaccccagggatacagcctgcaccacttggcacacagggaattcactcagcaaccccaatcaacacacaagggcttcagcctgcacctatgggtactcagcagcctcagcctgaaggaaagacttcagtggtgttggcagatggagccacaattgtggccaaccctattagcaatccattcagtgctgctccagcagcaacaaccgtggtgcagacccacagccagagtgctagcaccaacgctcccgcccagggctcatcgccacggccaagcatactccggaagaaacctgccacagatggaatggcagttcggaaaaccctcattcctcctcagcctcctgatgttgctagtcctcgagtggaaagctctatgcggagtacgtctgggtcacctaggcctgcaggtgccaaacccaagtctgaaatccacgtgtctatggccactccggtcactgtgtccatggagactgtatccaatcaaaataatgatcagcctaccattgccgtccctccaactgcccagcagcccccaccgaccattccaactatgattgcagcagccagtcccccgtcacaaccagccgttgccctttcaaccattcctggagcggtccccatcactccacccatcaccaccattgcagctgcaccacctccatcagtcactgtgggtggcagtctttcctccgtcttgggccctcccgttcctgaaattaaagtgaaagaagaagtagaaccaatggatatcatgaggccagtttctgcagttcctccactggctaccaacactgtgtctccatctcttgcattgctggcaaacaacttgtccatgcctacaagtgacctaccacctggtgcctccccaaggaaaaagcctcgaaagcaacagcatgtgatctcaacagaagaaggtgacatgatggagacaaacagcactgatgatgagaagtccactgccaagagtcttctggtgaaggctgagaagcgcaagtctcctcccaaggagtatattgatgaggaaggtgtgagatatgtcccagtgcgtccaagaccccccattactttgcttcgtcactatcggaacccctggaaagctgcttaccaccactttcagaggtacagtgacgtccgggtcaaagaggagaagaaagctatgctgcaggaaatagctaatcagaaaggagtatcctgtcgtgctcaaggctggaaagtccacctctgtgctgcccagttactacagctgacgaatctagaacatgatgtctatgaaagacttactaacctgcaggaagggattatcccaaagaaaaaagcagcaacagatgatgatctccaccgaataaacgaactgatacagggaaatatgcagaggtgtaaacttgtgatggatcaaatcagtgaagccagagactccatgcttaaggttttagatcataaagaccgtgtcctgaagctgcttaacaagaacgggactgtcaaaaaagtgtccaaattgaagcgaaaggaaaaagtctagacccagaacaatcaggagattggaagcaaatttatgaagaatgatggtgggggtggggggagggttttggttttttccaaagtggaacattgaaataaaggaagtgttccttagttcccgtgtgaaagcagaggaacccatgacatccaagggcgtgaaaggatcagagctgactggacatagtgagctgccttcttgcgttcgggtgcacccctgttaaacctgatctgtgtcataagtgactccggatgcatcagtgtccaccagttggaagcaatgacaaggatggctggctggtgtttttcagccttccggtttatagactgtatttatctagtggattcctgcaggccccatactgagcctggactgaaagtatccactcggaccatctgttatctctctacactgaaaataaaacctcttccacccaccccattcggttcttctgcctgaccttcaaatgcccatgttggccttttacagcagtgccacggcaccaagcgagctgccacatctcacactctaaagggtttgaactattagttcttgtcattttttaaaaaaaaccattcccaagtgaaattgttatatcgtctgtcttgcgtgtgtcagaactgggtttttgtggaggttcagagcaggcaacaccataagttgctctcagatccttgttctgaagtacattcttggttatctgtacttctgtagctggtgtgatgctgttaattgtatgtaccacacatctccagacgttaataaaggactcaaagaggtttttg

SEQ ID NO: 28180 - DNA, 4065 bp, Homo sapiens
  source 1..4065: mol_type = unassigned DNA
gaggactgcgagcacagcggcggccgggtggcgggggtgagtggggccagcggggctggacagcagcgggccccgggcgccgccgccgcgatccctccccgcgcccgccgagcacatcgccgccgccgagatgggccctccgcggcacccccaggccggcgagatagaagcgggcggtgcgggcggcgggcggcggctacaggtggaaatgagttctcaacagtttcctcggttaggagccccttctaccgggctgagccaggccccttctcagattgcaaacagtggttctgctggattgataaacccagctgctacagtcaatgatgaatctggtcgagattctgaagtcagtgccagggagcacatgagttccagcagctccctccagtcccgggaggagaagcaagagcctgttgtggtaaggccctatccacaggtgcagatgttgtcgacacaccatgctgtcgcatcagccacacctgttgcagtgacagccccgccagcacacctgacgccagcagtgccactttcattttcggagggacttatgaagccgcccccgaagcccaccatgcctagccgtcccattgctcctgctccaccttctaccctgtcacttccccccaaggttccagggcaggttaccgttaccatggagagtagcatccctcaagcttcagccattcctgtggcaacaatcagtggacaacagggccatcccagtaacctgcatcacatcatgactacaaatgtgcaaatgtctatcatccgcagcaatgctcctgggccccctcttcacattggagcttctcatttacctcgaggtgcagctgctgctgctgtgatgtccagttctaaagtaaccacagtcctgaggccgacctcacagctgccaaatgctgctactgctcagccagcagtacagcacatcattcaccaaccaatccagtctcggccacctgtgaccacctccaatgccatccctcctgctgtggtagcaactgtctcagccaccagagctcagtctccagtcatcactacgacagcggcgcatgctactgattcagcacttagtaggccaaccttgtctatccagcatcctccatctgcagcaatcagtattcagcgtcctgcccagtcacgagatgtcacaacaagaatcacactaccatctcaccctgcattagggacgccaaaacagcagcttcatacaatggctcagaaaacaatcttcagtactggcacgccagtggctgcagccacagtagcacctattttggcaaccaacaccattccttcagcgaccacagctggatctgtgtcacacacgcaagctcccacaagtaccattgttaccatgacagtaccctcccattcctcccatgctactgctgtgaccacctcaaacatcccagtcgccaaggtggtgccccagcagatcacgcacacttctcctcggatccagccagactaccctgccgagaggagtagcctgattcccatctccggacatcgggcctctcccaatcctgtggccatggaaacccgaagtgacaacagaccgtctgttcccgttcagttccaatattttttgccaacttaccccccttctgcatacccactggcggcacatacctacaccccaatcaccagttccgtgtccactatccgacagtatccagtttcagctcaggctccaaactctgccatcacagctcagactggtgttggggtagcgtctaccgtccacctaaaccccatgcagttgatgacagtggatgcatcgcatgctcgacatattcaagggatccagccagcacccatcagtacccagggtatccagccggcccccattgggaccccagggatacagcctgcaccacttggcacacagggaattcactcagcaaccccaatcaacacacaagggcttcagcctgcacctatgggtactcagcagcctcagcctgaaggaaagacttcagcagtggtgttggcagatggagccacaattgtggccaaccctattagcaatccattcagtgctgctccagcagcaacaaccgtggtgcagacccacagccagagtgctagcaccaacgctcccgcccagggctcatcgccacggccaagcatactccggaagaaacctgccacagatggtgccaaacccaagtctgaaatccacgtgtctatggccactccggtcactgtgtccatggagactgtatccaatcaaaataatgatcagcctaccattgccgtccctccaactgcccagcagcccccaccgaccattccaactatgattgcagcagccagtcccccgtcacaaccagccgttgccctttcaaccattcctggagcggtccccatcactccacccatcaccaccattgcagctgcaccacctccatcagtcactgtgggtggcagtctttcctccgtcttgggccctcccgttcctgaaattaaagtgaaagaagaagtagaaccaatggatatcatgaggccagtttctgcagttcctccactggctaccaacactgtgtctccatctcttgcattgctggcaaacaacttgtccatgcctacaagtgacctaccacctggtgcctccccaaggaaaaagcctcgaaagcaacagcatgtgatctcaacagaagaaggtgacatgatggagacaaacagcactgatgatgagaagtccactgccaagagtcttctggtgaaggctgagaagcgcaagtctcctcccaaggagtatattgatgaggaaggtgtgagatatgtcccagtgcgtccaagaccccccattactttgcttcgtcactatcggaacccctggaaagctgcttaccaccactttcagaggtacagtgacgtccgggtcaaagaggagaagaaagctatgctgcaggaaatagctaatcagaaaggagtatcctgtcgtgctcaaggctggaaagtccacctctgtgctgcccagttactacagctgacgaatctagaacatgatgtctatgaaagacttactaacctgcaggaagggattatcccaaagaaaaaagcagcaacagatgatgatctccaccgaataaacgaactgatacagggaaatatgcagaggtgtaaacttgtgatggatcaaatcagtgaagccagagactccatgcttaaggttttagatcataaagaccgtgtcctgaagctgcttaacaagaacgggactgtcaaaaaagtgtccaaattgaagcgaaaggaaaaagtctagacccagaacaatcaggagattggaagcaaatttatgaagaatgatggtgggggtggggggagggttttggttttttccaaagtggaacattgaaataaaggaagtgttccttagttcccgtgtgaaagcagaggaacccatgacatccaagggcgtgaaaggatcagagctgactggacatagtgagctgccttcttgcgttcgggtgcacccctgttaaacctgatctgtgtcataagtgactccggatgcatcagtgtccaccagttggaagcaatgacaaggatggctggctggtgtttttcagccttccggtttatagactgtatttatctagtggattcctgcaggccccatactgagcctggactgaaagtatccactcggaccatctgttatctctctacactgaaaataaaacctcttccacccaccccattcggttcttctgcctgaccttcaaatgcccatgttggccttttacagcagtgccacggcaccaagcgagctgccacatctcacactctaaagggtttgaactattagttcttgtcattttttaaaaaaaaccattcccaagtgaaattgttatatcgtctgtcttgcgtgtgtcagaactgggtttttgtggaggttcagagcaggcaacaccataagttgctctcagatccttgttctgaagtacattcttggttatctgtacttctgtagctggtgtgatgctgttaattgtatgtaccacacatctccagacgttaataaaggactcaaagaggtttttgtacttg

SEQ ID NO: 28181 - DNA, 4173 bp, Homo sapiens
  source 1..4173: mol_type = unassigned DNA
aagaggactgcgagcacagcggcggccgggtggcgggggtgagtggggccagcggggctggacagcagcgggccccgggcgccgccgccgcgatccctccccgcgcccgccgagcacatcgccgccgccgagatgggccctccgcggcacccccaggccggcgagatagaagcgggcggtgcgggcggcgggcggcggctacaggtggaaatgagttctcaacagtttcctcggttaggagccccttctaccgggctgagccaggccccttctcagattgcaaacagtggttctgctggattgataaacccagctgctacagtcaatgatgaatctggtcgagattctgaagtcagtgccagggagcacatgagttccagcagctccctccagtcccgggaggagaagcaagagcctgttgtggtaaggccctatccacaggtgcagatgttgtcgacacaccatgctgtcgcatcagccacacctgttgcagtgacagccccgccagcacacctgacgccagcagtgccactttcattttcggagggacttatgaagccgcccccgaagcccaccatgcctagccgtcccattgctcctgctccaccttctaccctgtcacttccccccaaggttccagggcaggttaccgttaccatggagagtagcatccctcaagcttcagccattcctgtggcaacaatcagtggacaacagggccatcccagtaacctgcatcacatcatgactacaaatgtgcaaatgtctatcatccgcagcaatgctcctgggccccctcttcacattggagcttctcatttacctcgaggtgcagctgctgctgctgtgatgtccagttctaaagtaaccacagtcctgaggccgacctcacagctgccaaatgctgctactgctcagccagcagtacagcacatcattcaccaaccaatccagtctcggccacctgtgaccacctccaatgccatccctcctgctgtggtagcaactgtctcagccaccagagctcagtctccagtcatcactacgacagcggcgcatgctactgattcagcacttagtaggccaaccttgtctatccagcatcctccatctgcagcaatcagtattcagcgtcctgcccagtcacgagatgtcacaacaagaatcacactaccatctcaccctgcattagggacgccaaaacagcagcttcatacaatggctcagaaaacaatcttcagtactggcacgccagtggctgcagccacagtagcacctattttggcaaccaacaccattccttcagcgaccacagctggatctgtgtcacacacgcaagctcccacaagtaccattgttaccatgacagtaccctcccattcctcccatgctactgctgtgaccacctcaaacatcccagtcgccaaggtggtgccccagcagatcacgcacacttctcctcggatccagccagactaccctgccgagaggagtagcctgattcccatctccggacatcgggcctctcccaatcctgtggccatggaaacccgaagtgacaacagaccgtctgttcccgttcagttccaatattttttgccaacttaccccccttctgcatacccactggcggcacatacctacaccccaatcaccagttccgtgtccactatccgacagtatccagtttcagctcaggctccaaactctgccatcacagctcagactggtgttggggtagcgtctaccgtccacctaaaccccatgcagttgatgacagtggatgcatcgcatgctcgacatattcaagggatccagccagcacccatcagtacccagggtatccagccggcccccattgggaccccagggatacagcctgcaccacttggcacacagggaattcactcagcaaccccaatcaacacacaagggcttcagcctgcacctatgggtactcagcagcctcagcctgaaggaaagacttcagcagtggtgttggcagatggagccacaattgtggccaaccctattagcaatccattcagtgctgctccagcagcaacaaccgtggtgcagacccacagccagagtgctagcaccaacgctcccgcccagggctcatcgccacggccaagcatactccggaagaaacctgccacagatggaatggcagttcggaaaaccctcattcctcctcagcctcctgatgttgctagtcctcgagtggaaagctctatgcggagtacgtctgggtcacctaggcctgcaggtgccaaacccaagtctgaaatccacgtgtctatggccactccggtcactgtgtccatggagactgtatccaatcaaaataatgatcagcctaccattgccgtccctccaactgcccagcagcccccaccgaccattccaactatgattgcagcagccagtcccccgtcacaaccagccgttgccctttcaaccattcctggagcggtccccatcactccacccatcaccaccattgcagctgcaccacctccatcagtcactgtgggtggcagtctttcctccgtcttgggccctcccgttcctgaaattaaagtgaaagaagaagtagaaccaatggatatcatgaggccagtttctgcagttcctccactggctaccaacactgtgtctccatctcttgcattgctggcaaacaacttgtccatgcctacaagtgacctaccacctggtgcctccccaaggaaaaagcctcgaaagcaacagcatgtgatctcaacagaagaaggtgacatgatggagacaaacagcactgatgatgagaagtccactgccaagagtcttctggtgaaggctgagaagcgcaagtctcctcccaaggagtatattgatgaggaaggtgtgagatatgtcccagtgcgtccaagaccccccattactttgcttcgtcactatcggaacccctggaaagctgcttaccaccactttcagaggtacagtgacgtccgggtcaaagaggagaagaaagctatgctgcaggaaatagctaatcagaaaggagtatcctgtcgtgctcaaggctggaaagtccacctctgtgctgcccagttactacagctgacgaatctagaacatgatgtctatgaaagacttactaacctgcaggaagggattatcccaaagaaaaaagcagcaacagatgatgatctccaccgaataaacgaactgatacagggaaatatgcagaggtgtaaacttgtgatggatcaaatcagtgaagccagagactccatgcttaaggttttagatcataaagaccgtgtcctgaagctgcttaacaagaacgggactgtcaaaaaagtgtccaaattgaagcgaaaggaaaaagtctagacccagaacaatcaggagattggaagcaaatttatgaagaatgatggtgggggtggggggagggttttggttttttccaaagtggaacattgaaataaaggaagtgttccttagttcccgtgtgaaagcagaggaacccatgacatccaagggcgtgaaaggatcagagctgactggacatagtgagctgccttcttgcgttcgggtgcacccctgttaaacctgatctgtgtcataagtgactccggatgcatcagtgtccaccagttggaagcaatgacaaggatggctggctggtgtttttcagccttccggtttatagactgtatttatctagtggattcctgcaggccccatactgagcctggactgaaagtatccactcggaccatctgttatctctctacactgaaaataaaacctcttccacccaccccattcggttcttctgcctgaccttcaaatgcccatgttggccttttacagcagtgccacggcaccaagcgagctgccacatctcacactctaaagggtttgaactattagttcttgtcattttttaaaaaaaaccattcccaagtgaaattgttatatcgtctgtcttgcgtgtgtcagaactgggtttttgtggaggttcagagcaggcaacaccataagttgctctcagatccttgttctgaagtacattcttggttatctgtacttctgtagctggtgtgatgctgttaattgtatgtaccacacatctccagacgttaataaaggactcaaagaggtttttgtacttgc

SEQ ID NO: 28182 - DNA, 849 bp, Homo sapiens
  source 1..849: mol_type = unassigned DNA
caggggcaggttcgggggaagaggactgcgagcacagcggcggccgggtggcgggggtggaaatgagttctcaacagtttcctcggttaggagccccttctaccgggctgagccaggccccttctcagattgcaaacagtggttctgctggattgataaacccagctgctacagtcaatgatgaatctggtcgagattctgaagtcagtgccagggagcacatgagttccagcagctccctccagtcccgggaggagaagcaagagcctgttgtggtaaggccctatccacaggtgcagatgttgtcgacacaccatgctgtcgcatcagccacacctgttgcagtgacagccccgccagcacacctgacgccagcagtgccactttcattttcggagggacttatgaagccgcccccgaagcccaccatgcctagccgtcccattgctcctgctccaccttctaccctgtcacttccccccaaggttccagggcaggttaccgttaccatggagagtagcatccctcaagcttcagccattcctgtggcaacaatcagtggacaacagggccatcccagtaacctgcatcacatcatgactacaaatgtgcaaatgtctatcatccgcagcaatgctcctgggccccctcttcacattggagcttctcatttacctcgaggtgcagctgctgctgctgtgatgtccagttctaaagtaaccacagtcctgaggccgacctcacagctgccaaatgctgctactgctcagccagcagtacagcacatcattcaccaaccaatccagtctcggccacctgtgaccacctccaatgccatccctcctgctg

SEQ ID NO: 28183 - DNA, 2071 bp, Homo sapiens
  source 1..2071: mol_type = unassigned DNA
atgcagcagatccgcccgcccttcatccgcgggcctccgcaccatgcctccaaccccaacagccccctgtccaaccccatgcttcccggcatcgggcccccgcccggtggccccagaaacctgggccccacttccagccccatgcaccggcccatgctatcgccccacatccaccccccgagcacccccaccatgcccgggaaccccccaggcctgctgcccccgccgcctccgggcgccccgctgccgagtcttcccttcccgccagtgagcatgatgccaaatggcccgatgccggtgccccagatgatgaatttcgggctgccgtcgcttgccccgctggtgccgcccccgaccctgctcgtgccgtaccccgtgatcgtgcccctaccggtgcccatccccatccccatccctatccctcacgtcagcgactccaagccccccaagaagctgctgtcgcctgaggaaccggcggtgagcgagctagagtcggtcaaggagaataactgtgcttccaactgccacctggacggggaggcggccaaaaagctgatgggcgaggaggccctggcggggggcgacaagtcagacccgaaccttaataaccccgcggacgaggaccatgcctatgctctgcggatgctgcccaagaccggctgcgtgatccagcctgtgccaaaacccgcggagaaggctgccatggcaccgtgcatcatctcctcgcccatgctcagcgccgggcctgaggacctggagccgccgctcaaaaggaggtgcctccgaattagaaatcagaataagtaaaaggaacgttcactcacagggtacgctcatggagagagggcgcagagcaaaccatgtcacgccatccaatgacaccagctggtcagctcaccaccccctctggctaaaactcaagcaaataaagccgcttcctgtcattaagcatctcagaggaagcagccctccctcgatggcctctagcccagagaagcccgcgcatcttggacccaccaagcaggcccagccttcctgctgccaccatctctgcttctccccagaggaacttagggatttcacccctggcttttaaaaaaaacgaaataccgacaagccacaaggaccaatgtaggtattctccccgccccatcttcaaggctcagcgactgaggctggaagatgatatggattggaacacaaaaaatctttttttaatctttttaaaaactgctgtggttttgctgctacactaagaattgtgatttgcattgtacggttttggacctatattgttcacgttttgatggcggagaggggtggtcctggaggcccaatgcttcagagtcatctctgtcctgcccgggatgcacttttaaatgaagagttagaatattttattggctaatatacttttcttgttatttttacaaaggccacctttatcctttttgatgccatattttcagtgttacacttttatggcttttaattttcgatttgacagatgtaagaagcagcatgaatagtttatactgtggtttttcagagactgaatgccaagagaactcggtaaatgtttattcttctcagctttctctttaaattcccctaaatagcgccccatttgggaacagagcaagagtgttgaactgaagaccaaaatgccctcaaggtgtaaaataatccgagggggaatatttgctgggcgtcaggaaagactcagatgaaatttcaaccctgatggttttcggtgatccaggaagtcagtgagacaatctctctatatgcagagccctttcatgataattagaatggtatggacaaaccaatgaaaacaagagggaaagtgagaaagatcacccatgattctgtttcactgtttgctttctcctgtcatggttaagagaaatgtgcaattcgatcctcaatcagtgggtggaggataacagggtagattcacttgtgtgcacttgtacagttgtagctgcgagtccagaagtcctctagagcatgtgtactggcactgagttggtgagacagttgtggagtatcccattctgatgagtac

SEQ ID NO: 28184 - DNA, 5231 bp, Homo sapiens
  source 1..5231: mol_type = unassigned DNA
agccacgcccgctcgagagccggggggctgtcctcgccccccccacctttcccctccctccgaccccctcccggccgcgctccctcccctcctcccgcgccggcccccggcccgcccccggctcggctcgcgggaggcgctgggcgccggggctggcgcgctctcccgggctcacacacagccgcgcacgcacgcccggggccgctctccgcgccggcccttgctccccgcgcccatgcggacggaccgagcgacggaagatggctgacgactccacggggccccgaggatgcggcccggcggcggcggcggcgggagcggcagcggcagcgagggcggcaggggcagcggcagcagcggcggcgttggctgcggcggcggcggcggcggcagcaggagccggagcgacggcggcggcatccccgagactctccgcactatccttacccgtgacagccactgacgtcctccgccgctagaagagaccccgcttctcggcgcctgccctccccctcgcggctcggtccggccccgccagcaccgctacctccgccagcctcgccaccatcagcaccacctccaccgccgccgccgccgccaccaccaccgccggcggcggcagcagccatttcatctccacagaaaccagacacaaaaacatggcagaaatggagaaagaagggagacctcccgaaaataaacggagcaggaagccggctcacccagtgaaaagggagatcaatgaggagatgaagaactttgcagaaaacaccatgaatgaactccttggctggtatggctatgataaggttgaattaaaagatggtgaggatattgaattcaggagctaccctacagatggggagagccggcagcacatttctgttctcaaagaaaattctttgccaaaaccaaaattacccgaggacagtgttatttcaccatacaatataagcacaggctattcagggcttgccactggaaatggactcagtgactcacctgcagggtcaaaggatcatggcagtgtgcccattattgtacctttaattccaccacctttcataaagccaccagcagaagatgatgtgtcaaatgtacaaataatgtgtgcctggtgccagaaagtgggaatcaagcgctattccctgagtatgggaagtgaggtgaaaagcttctgcagcgagaagtgctttgcggcctgccgacgagcctacttcaagagaaataaggctagagatgaagatggacatgctgaaaattttccccagcagcactatgctaaggaaactccaaggcttgccttcaagaataactgcgaactacttgtatgtgactggtgtaagcacataagacacacaaaagaatacctggattttggggacggggaaagaaggcttcagttctgcagtgcaaaatgtctcaatcaatacaaaatggacattttctacaaagagacccaggccaatcttccagctgggctgtgcagcacattacaccctcccatggaaaataaagcagaaggcaccggggtgcagctgctcactccagactcttggaatatcccgctaacagatgctcggaggaaggccccctccccggtggctacagctggccaaagccagggccctggcccgtcggcgtccaccaccgtctctccatctgacactgccaactgctctgtcactaaaatccccacgccagtgcccaagtccatccccatcagcgagactccaaatatccctcctgtctccgtccagccacctgctagcatcgggcctccccttggcgtcccgcctcggagccctcccatggtgatgaccaaccgcggcccggtgccgctgcccatcttcatggagcagcagatcatgcagcagatccgcccgcccttcatccgcgggcctccgcaccatgcctccaaccccaacagccccctgtccaaccccatgcttcccggcatcgggcccccgcccggtggccccagaaacctgggccccacttccagccccatgcaccggcccatgctatcgccccacatccaccccccgagcacccccaccatgcccgggaaccccccaggcctgctgcccccgccgcctccgggcgccccgctgccgagtcttcccttcccgccagtgagcatgatgccaaatggcccgatgccggtgccccagatgatgaatttcgggctgccgtcgcttgccccgctggtgccgcccccgaccctgctcgtgccgtaccccgtgatcgtgcccctaccggtgcccatccccatccccatccctatccctcacgtcagcgactccaagccccccaacgggttctccagcaacggggagaacttcattccgaacgcccctggcgactccgcggcggcgggcggcaagccaagcggacactccctgtccccccgggactccaagcagggctcgtccaagtccgcggactcgccccccggctgctcgggccaggccctgagcctggcgcccacgcccgccgagcatggccggagcgaggtggtggacctgacgcggcgcgccggcagccccccgggccccccgggcgcgggcggccagctcggcttcccaggcgtgctgcagggcccgcaggacggcgtcatcgacctgaccgtgggccaccgagcccggctgcacaacgtgatccaccgcgcgctgcacgcgcacgtcaaggcggagcgcgagccgagcgccgcggagcgcaggacctgcggcggctgcagggacggccactgcagcccgcccgccgccggcgacccaggcccgggcgccccggcgggccccgaggcggccgcggcctgcaacgtcatcgtgaacggcacgcgcggcgccgccgccgagggcgctaagagcgcggagccgcctcccgagcagccgccgccgccgccgccgcccgcgccccccaagaagctgctgtcgcctgaggaaccggcggtgagcgagctagagtcggtcaaggagaataactgtgcttccaactgccacctggacggggaggcggccaaaaagctgatgggcgaggaggccctggcggggggcgacaagtcagacccgaaccttaataaccccgcggacgaggaccatgcctatgctctgcggatgctgcccaagaccggctgcgtgatccagcctgtgccaaaacccgcggagaaggctgccatggcaccgtgcatcatctcctcgcccatgctcagcgccgggcctgaggacctggagccgccgctcaaaaggaggtgcctccgaattagaaatcagaataagtaaaaggaacgttcactcacagggtacgctcatggagagagggcgcagagcaaaccatgtcacgccatccaatgacaccagctggtcagctcaccaccccctctggctaaaactcaagcaaataaagccgcttcctgtcattaagcatctcagaggaagcagccctccctcgatggcctctagcccagagaagcccgcgcatcttggacccaccaagcaggcccagccttcctgctgccaccatctctgcttctccccagaggaacttagggatttcacccctggcttttaaaaaaaacgaaataccgacaagccacaaggaccaatgtaggtattctccccgccccatcttcaaggctcagcgactgaggctggaagatgatatggattggaacacaaaaaatctttttttaatctttttaaaaactgctgtggttttgctgctacactaagaattgtgatttgcattgtacggttttggacctatattgttcacgttttgatggcggagaggggtggtcctggaggcccaatgcttcagagtcatctctgtcctgcccgggatgcacttttaaatgaagagttagaatattttattggctaatatacttttcttgttatttttacaaaggccacctttatcctttttgatgccatattttcagtgttacacttttatggcttttaattttcgatttgacagatgtaagaagcagcatgaatagtttatactgtggtttttcagagactgaatgccaagagaactcggtaaatgtttattcttctcagctttctctttaaattcccctaaatagcgccccatttgggaacagagcaagagtgttgaactgaagaccaaaatgccctcaaggtgtaaaataatccgagggggaatatttgctgggcgtcaggaaagactcagatgaaatttcaaccctgatggttttcggtgatccaggaagtcagtgagacaatctctctatatgcagagccctttcatgataattagaatggtatggacaaaccaatgaaaacaagagggaaagtgagaaagatcacccatgattctgtttcactgtttgctttctcctgtcatggttaagagaaatgtgcaattcgatcctcaatcagtgggtggaggataacagggtagattcacttgtgtgcacttgtacagttgtagctgcgagtccagaagtcctctagagcatgtgtactggcactgagttggtgagacagttgtggagtatcccattctgatgagtacagaaaaaaaaagaaaaagaaaagaagagaaaaaattaagaaaaaaatcaaaaaaggaagaaaactaaaaaaaaaaaaaatcaaatcaccttgtgattcagtgtatctgtttactaactcaaataaagcaattgttccctctggaggggtccaggtgcccccgccccacaaggccgcggagcctcagcaggaggggtggcgagttgcgggtgggcagggccaggacggtgtggcgccagccttgaagcaccacggcccaaggatgcggtgtacatactgtatttctagattctcctttgtacagagtcacttcacaagtcaagctactgttttacaggtgctccttatttattagagctgtgagagcttgggggacacacctggcgagcaagctcgctttttaaaaatgaaatttgggggcaggggaaggggaggcgggagggaggggaagctcgcaagcccggggagagatttataaaagtaaacaaaagaaaaccttccagcaacaaattaaaaaataataacaaatcaaccccagcaccaaacccacccaggcaggaagaagccgcccctcctctggggccatatttttctgctgggtcacaacattctcctctccctgactggtgtcagattcatcaaacaaaaaataaatctcgaagaaaaaaaatgcacttacatgtgctt

SEQ ID NO: 28185 - DNA, 1639 bp, Homo sapiens
  source 1..1639: mol_type = unassigned DNA
gttgccgctgcgcacctggctcaggtgagctgccccgcccccgcccggcgcgagccccaggtcctggcagcagcctctgacctgtccaggtgccctgtccagctgactgcaaggacagagaggagtcctgcccagctcttggatcagtctgctggccgaggagcccggtggagccaggggtgaccctggagcccagcctgccccgaggaggccccggctcagagccatgccaggtgtctgtgatagggcccctgacttcctctccccgtctgaagaccaggtgctgaggcctgccttgggcagctcagtggctctgaactgcacggcttgggtagtctctgggccccactgctccctgccttcagtccagtggctgaaagacgggcttccattgggaattgggggccactacagcctccacgagtactcctgggtcaaggccaacctgtcagaggtgcttgtgtccagtgtcctgggggtcaacgtgaccagcactgaagtctatggggccttcacctgctccatccagaacatcagcttctcctccttcactcttcagagagctggccctacaagccacgtggctgcggtgctggcctccctcctggtcctgctggccctgctgctggccgccctgctctatgtcaagtgccgtctcaacgtgctgctctggtaccaggacgcgtatggggaggtggagataaacgacgggaagctctacgacgcctacgtctcctacagcgactgccccgaggaccgcaagttcgtgaacttcatcctaaagccgcagctggagcggcgtcggggctacaagctcttcctggacgaccgcgacctcctgccgcgcgctgagccctccgccgacctcttggtgaacctgagccgctgccgacgcctcatcgtggtgctttcggacgccttcctgagccgggcctggtgcagccacagcttccgggagggcctgtgccggctgctggagctcacccgcagacccatcttcatcaccttcgagggccagaggcgcgaccccgcgcacccggcgctccgcctgctgcgccagcaccgccacctggtgaccttgctgctctggaggcccggctccgtgactccttcctccgatttttggaaagaagtgcagctggcgctgccgcggaaggtgcagtacaggcctgtggaaggagacccccagacgcagctgcaggacgacaaggaccccatgctgattcttcgaggccgagtccctgagggccgggccctggactcagaggtggacccggaccctgagggcgacctgggtgtccgggggcctgtctttggagagccatcagctccaccgcacaccagtggggtctcgctgggagagagccggagcagcgaagtggacgtctcggatctcggctcgcgaaactacagtgcccgcacagacttctactgcctggtgtccaaggatgatatgtagctcccaccccagagtgcaggatcatagggacagcgggggccagggcagcggcgtcgctcctctgctcaacaggaccacaacccctgccagcagccctgggaccctgccagcagccctgggaaaaggctgtggcctcagggcgcctcccagtgccagaaaataaagtccttttggattctg

SEQ ID NO: 28186 - DNA, 1700 bp, Homo sapiens
  source 1..1700: mol_type = unassigned DNA
ggtgagtggcggtcgccatcagacccgcgaagcctctgacctgtccaggtgccctgtccagctgactgcaaggacagagaggagtcctgcccagctcttggatcagtctgctggccgaggagcccggtggagccaggggtgaccctggagcccagcctgccccgaggaggccccggctcagagccatgccaggtgtctgtgatagggcccctgacttcctctccccgtctgaagaccaggtgctgaggcctgccttgggcagctcagtggctctgaactgcacggcttgggtagtctctgggccccactgctccctgccttcagtccagtggctgaaagacgggcttccattgggaattgggggccactacagcctccacgagtactcctgggtcaaggccaacctgtcagaggtgcttgtgtccagtgtcctgggggtcaacgtgaccagcactgaagtctatggggccttcacctgctccatccagaacatcagcttctcctccttcactcttcagagagctggccctacaagccacgtggctgcggtgctggcctccctcctggtcctgctggccctgctgctggccgccctgctctatgtcaagtgccgtctcaacgtgctgctctggtaccaggacgcgtatggggaggtggagataaacgacgggaagctctacgacgcctacgtctcctacagcgactgccccgaggaccgcaagttcgtgaacttcatcctaaagccgcagctggagcggcgtcggggctacaagctcttcctggacgaccgcgacctcctgccgcgcgctgagccctccgccgacctcttggtgaacctgagccgctgccgacgcctcatcgtggtgctttcggacgccttcctgagccgggcctggtgcagccacagcttccgggagggcctgtgccggctgctggagctcacccgcagacccatcttcatcaccttcgagggccagaggcgcgaccccgcgcacccggcgctccgcctgctgcgccagcaccgccacctggtgaccttgctgctctggaggcccggctccgtgactccttcctccgatttttggaaagaagtgcagctggcgctgccgcggaaggtgcagtacaggcctgtggaaggagacccccagacgcagctgcaggacgacaaggaccccatgctgattcttcgaggccgagtccctgagggccgggccctggactcagaggtggacccggaccctgagggcgacctgggtatgcccgcccagccccactccccaactggagaagctcagcacagggcggagtgggggcaggcacagggcacagggcctggaggggctccaggtgttgaggactcttcccggcaccgggagcccctgcacggcctctgccctggaggtgctcggccctcggtctgcctgggaacttcctgggcctcacaggccatcacagcagggggtgagcaggggcagcccctggcagtgggtctgggccaaggctgtgggtggccacctcaggcgtctcggtctccccaccccaggtgtccgggggcctgtctttggagagccatcagctccaccgcacaccagtggggtctcgctgggagagagccggagcagcgaagtggacgtctcggatctcggctcgcgaaactacagtgcccgcacagacttctactgcctggtgtccaaggatga

SEQ ID NO: 28187 - DNA, 1598 bp, Homo sapiens
  source 1..1598: mol_type = unassigned DNA
ggtgagtggcggtcgccatcagacccgcgaagcctctgacctgtccaggtgccctgtccagctgactgcaaggacagagaggagtcctgcccagctcttggatcagtctgctggccgaggagcccggtggagccaggggtgaccctggagcccagcctgccccgaggaggccccggctcagagccatgccaggtgtctgtgatagggcccctgacttcctctccccgtctgaagaccaggtgctgaggcctgccttgggcagctcagtggctctgaactgcacggcttgggtagtctctgggccccactgctccctgccttcagtccagtggctgaaagacgggcttccattgggaattgggggccactacagcctccacgagtactcctgggtcaaggccaacctgtcagaggtgcttgtgtccagtgtcctgggggtcaacgtgaccagcactgaagtctatggggccttcacctgctccatccagaacatcagcttctcctccttcactcttcagagagctggccctacaagccacgtggctgcggtgctggcctccctcctggtcctgctggccctgctgctggccgccctgctctatgtcaagtgccgtctcaacgtgctgctctggtaccaggacgcgtatggggaggtggagataaacgacgggaagctctacgacgcctacgtctcctacagcgactgccccgaggaccgcaagttcgtgaacttcatcctaaagccgcagctggagcggcgtcggggctacaagctcttcctggacgaccgcgacctcctgccgcgcgctgagccctccgccgacctcttggtgaacctgagccgctgccgacgcctcatcgtggtgctttcggacgccttcctgagccgggcctggtgcagccacagcttccgggagggcctgtgccggctgctggagctcacccgcagacccatcttcatcaccttcgagggccagaggcgcgaccccgcgcacccggcgctccgcctgctgcgccagcaccgccacctggtgaccttgctgctctggaggcccggctccgtgactccttcctccgatttttggaaagaagtgcagctggcgctgccgcggaaggtgcagtacaggcctgtggaaggagacccccagacgcagctgcaggacgacaaggaccccatgctgattcttcgaggccgagtccctgagggccgggccctggactcagaggtggacccggaccctgagggcgacctgggtgtccgggggcctgtctttggagagccatcagctccaccgcacaccagtggggtctcgctgggagagagccggagcagcgaagtggacgtctcggatctcggctcgcgaaactacagtgcccgcacagacttctactgcctggtgtccaaggatgatatgtagctcccaccccagagtgcaggatcatagggacagcgggggccagggcagcggcgtcgctcctctgctcaacaggaccacaacccctgccagcagccctgggaccctgccagcagccctgggaaaaggctgtggcctcagggcgcctcccagtgccagaaaataaagtccttttggattctg

SEQ ID NO: 28188 - DNA, 1720 bp, Homo sapiens
  source 1..1720: mol_type = unassigned DNA
aagacacaagccaggtccccaccgcgcttggcgatgcatccatagcagccttggtgctgtggacactccctggggcccagcgaaggggagagtttgctcccaaaggcgcaccaatgaccaacatttgccccccggaggaaagaactggaaccagcctctgacctgtccaggtgccctgtccagctgactgcaaggacagagaggagtcctgcccagctcttggatcagtctgctggccgaggagcccggtggagccaggggtgaccctggagcccagcctgccccgaggaggccccggctcagagccatgccaggtgtctgtgatagggcccctgacttcctctccccgtctgaagaccaggtgctgaggcctgccttgggcagctcagtggctctgaactgcacggcttgggtagtctctgggccccactgctccctgccttcagtccagtggctgaaagacgggcttccattgggaattgggggccactacagcctccacgagtactcctgggtcaaggccaacctgtcagaggtgcttgtgtccagtgtcctgggggtcaacgtgaccagcactgaagtctatggggccttcacctgctccatccagaacatcagcttctcctccttcactcttcagagagctggccctacaagccacgtggctgcggtgctggcctccctcctggtcctgctggccctgctgctggccgccctgctctatgtcaagtgccgtctcaacgtgctgctctggtaccaggacgcgtatggggaggtggagataaacgacgggaagctctacgacgcctacgtctcctacagcgactgccccgaggaccgcaagttcgtgaacttcatcctaaagccgcagctggagcggcgtcggggctacaagctcttcctggacgaccgcgacctcctgccgcgcgctgagccctccgccgacctcttggtgaacctgagccgctgccgacgcctcatcgtggtgctttcggacgccttcctgagccgggcctggtgcagccacagcttccgggagggcctgtgccggctgctggagctcacccgcagacccatcttcatcaccttcgagggccagaggcgcgaccccgcgcacccggcgctccgcctgctgcgccagcaccgccacctggtgaccttgctgctctggaggcccggctccgtgactccttcctccgatttttggaaagaagtgcagctggcgctgccgcggaaggtgcagtacaggcctgtggaaggagacccccagacgcagctgcaggacgacaaggaccccatgctgattcttcgaggccgagtccctgagggccgggccctggactcagaggtggacccggaccctgagggcgacctgggtgtccgggggcctgtctttggagagccatcagctccaccgcacaccagtggggtctcgctgggagagagccggagcagcgaagtggacgtctcggatctcggctcgcgaaactacagtgcccgcacagacttctactgcctggtgtccaaggatgatatgtagctcccaccccagagtgcaggatcatagggacagcgggggccagggcagcggcgtcgctcctctgctcaacaggaccacaacccctgccagcagccctgggaccctgccagcagccctgggaaaaggctgtggcctcagggcgcctcccagtgccagaaaataaagtccttttggattctg

SEQ ID NO: 28189 - DNA, 1649 bp, Homo sapiens
  source 1..1649: mol_type = unassigned DNA
agtcctgcccagctcttggatcagtctgctggccgaggagcccggtggagccaggggtgaccctggagcccagcctgccccgaggaggccccggctcagagccatgccaggtgtctgtgatagggcccctgacttcctctccccgtctgaagaccaggtgctgaggcctgccttgggcagctcagtggctctgaactgcacggcttgggtagtctctgggccccactgctccctgccttcagtccagtggctgaaagacgggcttccattgggaattgggggccactacagcctccacgagtactcctgggtcaaggccaacctgtcagaggtgcttgtgtccagtgtcctgggggtcaacgtgaccagcactgaagtctatggggccttcacctgctccatccagaacatcagcttctcctccttcactcttcagagagctggccctacaagccacgtggctgcggtgctggcctccctcctggtcctgctggccctgctgctggccgccctgctctatgtcaagtgccgtctcaacgtgctgctctggtaccaggacgcgtatggggaggtggagataaacgacgggaagctctacgacgcctacgtctcctacagcgactgccccgaggaccgcaagttcgtgaacttcatcctaaagccgcagctggagcggcgtcggggctacaagctcttcctggacgaccgcgacctcctgccgcgcgctgagccctccgccgacctcttggtgaacctgagccgctgccgacgcctcatcgtggtgctttcggacgccttcctgagccgggcctggtgcagccacagcttccgggagggcctgtgccggctgctggagctcacccgcagacccatcttcatcaccttcgagggccagaggcgcgaccccgcgcacccggcgctccgcctgctgcgccagcaccgccacctggtgaccttgctgctctggaggcccggctccgtgactccttcctccgatttttggaaagaagtgcagctggcgctgccgcggaaggtgcagtacaggcctgtggaaggagacccccagacgcagctgcaggacgacaaggaccccatgctgattcttcgaggccgagtccctgagggccgggccctggactcagaggtggacccggaccctgagggcgacctgggtatgcccgcccagccccactccccaactggagaagctcagcacagggcggagtgggggcaggcacagggcacagggcctggaggggctccaggtgttgaggactcttcccggcaccgggagcccctgcacggcctctgccctggaggtgctcggccctcggtctgcctgggaacttcctgggcctcacaggccatcacagcagggggtgagcaggggcagcccctggcagtgggtctgggccaaggctgtgggtggccacctcaggcgtctcggtctccccaccccaggtgtccgggggcctgtctttggagagccatcagctccaccgcacaccagtggggtctcgctgggagagagccggagcagcgaagtggacgtctcggatctcggctcgcgaaactacagtgcccgcacagacttctactgcctggtgtccaaggatgatatgtagctcccaccccagagtgcaggatca

SEQ ID NO: 28190 - DNA, 1533 bp, Homo sapiens
  source 1..1533: mol_type = unassigned DNA
ccgcggccggggctgacgctttgacagctggaaagagcgcggagccagcgcctgggggggagggaggggagcgcggcgaggagagcgccagcgagcgagagagcgagcgagcgccggggagggggccgggagcgaggggcagctcgggagagccggagcggtagcggcggcggcggcggcggcggcgaggctcggcgccctcttccctgcaaaccatgtttgccaaaggcaaaggctcggcggtgccctcggatgggcaggctcgggaaaagttagctttatacgtctacgaatatttactgcacgtaggagcacagaaatctgcacagaccttcttatcggagattcgatgggaaaaaaacatcacgttgggagaaccgcctgggtttttgcactcgtggtggtgtgtattttgggacctttactgtgcagctcctgaaaggagagacacttgtgaacattcaagtgaagcaaaagcctttcatgattatagtgcagcagctgccccgagccccgtgcttggcaacattccccccaacgatgggatgccgggaggccccatcccgccaggtttctttcagggtcctccggggtcacagccctcgccgcacgcacagcctccacctcacaatcctagcagcatgatgggaccccacagtcagcctccgggaggagttcctgggacacagccattgctgcccaattctatggatcccacacgacaacaaggccaccccaacatgggaggatcaatgcagagaatgaaccctccccgaggcatggggcccatgggtcccggcccacagaattacggcagcggcatgagaccaccacccaactccctcggccccgccatgcccgggattaacatgggcccgggagctggcagaccctggcccaatcctaacagtgctaactcaattccatactcctcctcatcacctggtacctatgtgggaccccctggtggtggcggtcctccaggaacacccattatgcccagtcccgcagattcaacaaattccagtgacaacatctacacaatgattaatccagtgccgcctggaggcagccggtccaacttcccgatgggtcccggctcggacggtccgatgggcggcatgggtggcatggagccacaccacatgaatggatcattagggtcaggcgacatagacggacttccaaaaaattctcctaacaacataagtggcattagcaatcctccaggcacccctcgagatgacggcgagctaggagggaacttcctccactcctttcagaacgacaattattctccaagcatgacgatgagtgtgtgatccccccttctccgagacgctgagagagcaggcattgcaggcgggaagatgccagaaattatgcaagaagtgaggtgtcattatccaggagctggtggggagggcatctccctgctcccctcaaccccctcccaccccatccacgccccctacctttcccaattttagtttcatgcaataaaaaggccaaactttttattccataaaacaa

SEQ ID NO: 28191 - DNA, 1578 bp, Homo sapiens
  source 1..1578: mol_type = unassigned DNA
atgtttgccaaaggcaaaggctcggcggtgccctcggatgggcaggctcgggaaaagttagctttatacgtctacgaatatttactgcacgtaggagcacagaaatctgcacagaccttcttatcggagattcgatgggaaaaaaacatcacgttgggagaaccgcctgggtttttgcactcgtggtggtgtgtattttgggacctttactgtgcagctcctgaaaggagagacacttgtgaacattcaagtgaagcaaaagcctttcatgattatagtgcagcagctgccccgagccccgtgcttggcaacattccccccaacgatgggatgccgggaggccccatcccgccaggtttctttcagccttttatgtcaccgcgatacgcaggcggccccaggcccccgatcagaatgggaaaccagcctccgggaggagttcctgggacacagccattgctgcccaattctatggatcccacacgacaacaaggccaccccaacatgggaggatcaatgcagagaatgaaccctccccgaggcatggggcccatgggtcccggcccacagaattacggcagcggcatgagaccaccacccaactccctcggccccgccatgcccgggattaacatgggcccgggagctggcagaccctggcccaatcctaacagtgctaactcaattccatactcctcctcatcacctggtacctatgtgggaccccctggtggtggcggtcctccaggaacacccattatgcccagtcccgcagattcaacaaattccagtgacaacatctacacaatgattaatccagtgccgcctggaggcagccggtccaacttcccgatgggtcccggctcggacggtccgatgggcggcatgggtggcatggagccacaccacatgaatggatcattagggtcaggcgacatagacggacttccaaaaaattctcctaacaacataagtggcattagcaatcctccaggcacccctcgagatgacggcgagctaggagggaacttcctccactcctttcagaacgacaattattctccaagcatgacgatgagtgtgtgatccccccttctccgagacgctgagagagcaggcattgcaggcgggaagatgccagaaattatgcaagaagtgaggtgtcattatccaggagctggtggggagggcatctccctgctcccctcaaccccctcccaccccatccacgccccctacctttcccaattttagtttcatgcaataaaaaggccaaactttttattccataaaacaagaaggacaaaactctcaaaaatgtatttcaagtcagtgaccagaaaaatcccaccccttgccctttccccaaaggaccttttctgtacatgacacttttttgttgttttttgtttggggttttaccattgttgggatttttttatttgttttcaggggggttttttgggggaaaatttttttaaatggaagcttctagcaagccccccaccccaatcaacctctatgctttcttcttaaaaaaaaaaaaaaaggaaaaaggaaaaaaaaaaaaggaaaacc

SEQ ID NO: 28192 - DNA, 2077 bp, Homo sapiens
  source 1..2077: mol_type = unassigned DNA
agccacgttcggttgagctccaagtagaccagcggcggcggcggcggcggcggcggcagcggtgctggaggcgcagagggcggcgcaggcggagccgggcgggcgcgcgagcgagcggagagcgggcggccgtgcgggcggcggcggcggcacccccaggccgagccggcgcggaaggagttccagggcgatggggccgcggccggggctgacgctttgacagctggaaagagcgcggagccagcgcctgggggggagggaggggagcgcggcgaggagagcgccagcgagcgagagagcgagcgagcgccggggagggggccgggagcgaggggcagctcgggagagccggagcggtagcggcggcggcggcggcggcggcgaggctcggcgccctcttccctgcaaaccatgtttgccaaaggcaaaggctcggcggtgccctcggatgggcaggctcgggaaaagttagctttatacgtctacgaatatttactgcacgtaggagcacagaaatctgcacagaccttcttatcggagattcgatgggaaaaaaacatcacgttgggagaaccgcctgggtttttgcactcgtggtggtgtgtattttgggacctttactgtgcagctcctgaaaggagagacacttgtgaacattcaagtgaagcaaaagcctttcatgattatagtgcagcagctgccccgagccccgtgcttggcaacattccccccaacgatgggatgccgggaggccccatcccgccaggtttctttcagggtcctccggggtcacagccctcgccgcacgcacagcctccacctcacaatcctagcagcatgatgggaccccacagtcagccttttatgtcaccgcgatacgcaggcggccccaggcccccgatcagaatgggaaaccagcctccgggaggagttcctgggacacagccattgctgcccaattctatggatcccacacgacaacaaggccaccccaacatgggaggatcaatgcagagaatgaaccctccccgaggcatggggcccatgggtcccggcccacagaattacggcagcggcatgagaccaccacccaactccctcggccccgccatgcccgggattaacatgggcccgggagctggcagaccctggcccaatcctaacagtgctaactcaattccatactcctcctcatcacctggtacctatgtgggaccccctggtggtggcggtcctccaggaacacccattatgcccagtcccgcagattcaacaaattccagtgacaacatctacacaatgattaatccagtgccgcctggaggcagccggtccaacttcccgatgggtcccggctcggacggtccgatgggcggcatgggtggcatggagccacaccacatgaatggatcattagggtcaggcgacatagacggacttccaaaaaattctcctaacaacataagtggcattagcaatcctccaggcacccctcgagatgacggcgagctaggagggaacttcctccactcctttcagaacgacaattattctccaagcatgacgatgagtgtgtgatccccccttctccgagacgctgagagagcaggcattgcaggcgggaagatgccagaaattatgcaagaagtgaggtgtcattatccaggagctggtggggagggcatctccctgctcccctcaaccccctcccaccccatccacgccccctacctttcccaattttagtttcatgcaataaaaaggccaaactttttattccataaaacaagaaggacaaaactctcaaaaatgtatttcaagtcagtgaccagaaaaatcccaccccttgccctttccccaaaggaccttttctgtacatgacacttttttgttgttttttgtttggggttttaccattgttgggatttttttatttgttttcaggggggttttttgggggaaaatttttttaaatggaagcttctagcaagccccccaccccaatcaacctctatgctttcttcttaaaaaaaaaaaaaaaggaaaaaggaaaaaaaaaaaaggaaaaccagaagcc

SEQ ID NO: 28193 - DNA, 1666 bp, Homo sapiens
  source 1..1666: mol_type = unassigned DNA
gggggctttgttcggccgggagcgctctcccttccctgtcctcggcttcgtcaccggttagctttatacgtctacgaatatttactgcacgtaggagcacagaaatctgcacagaccttcttatcggagattcgatgggaaaaaaacatcacgttgggagaaccgcctgggtttttgcactcgtggtggtgtgtattttgggacctttactgtgcagctcctgaaaggagagacacttgtgaacattcaagtgaagcaaaagcctttcatgattatagtgcagcagctgccccgagccccgtgcttggcaacattccccccaacgatgggatgccgggaggccccatcccgccaggtttctttcagggtcctccggggtcacagccctcgccgcacgcacagcctccacctcacaatcctagcagcatgatgggaccccacagtcagccttttatgtcaccgcgatacgcaggcggccccaggcccccgatcagaatgggaaaccagcctccgggaggagttcctgggacacagccattgctgcccaattctatggatcccacacgacaacaaggccaccccaacatgggaggatcaatgcagagaatgaaccctccccgaggcatggggcccatgggtcccggcccacagaattacggcagcggcatgagaccaccacccaactccctcggccccgccatgcccgggattaacatgggcccgggagctggcagaccctggcccaatcctaacagtgctaactcaattccatactcctcctcatcacctggtacctatgtgggaccccctggtggtggcggtcctccaggaacacccattatgcccagtcccgcagattcaacaaattccagtgacaacatctacacaatgattaatccagtgccgcctggaggcagccggtccaacttcccgatgggtcccggctcggacggtccgatgggcggcatgggtggcatggagccacaccacatgaatggatcattagggtcaggcgacatagacggacttccaaaaaattctcctaacaacataagtggcattagcaatcctccaggcacccctcgagatgacggcgagctaggagggaacttcctccactcctttcagaacgacaattattctccaagcatgacgatgagtgtgtgatccccccttctccgagacgctgagagagcaggcattgcaggcgggaagatgccagaaattatgcaagaagtgaggtgtcattatccaggagctggtggggagggcatctccctgctcccctcaaccccctcccaccccatccacgccccctacctttcccaattttagtttcatgcaataaaaaggccaaactttttattccataaaacaagaaggacaaaactctcaaaaatgtatttcaagtcagtgaccagaaaaatcccaccccttgccctttccccaaaggaccttttctgtacatgacacttttttgttgttttttgtttggggttttaccattgttgggatttttttatttgttttcaggggggttttttgggggaaaatttttttaaatggaagcttctagcaagccccccaccccaatcaacctctatgctttcttcttaaaaaaaaaaaaaaaggaaaaaggaaaaaaaaaaaaggaaaaccagaagcc

SEQ ID NO: 28194 - DNA, 560 bp, Homo sapiens
  source 1..560: mol_type = unassigned DNA
cctccgggaggagttcctgggacacagccattgctgcccaattctatggatcccacacgacaacaaggccaccccaacatgggaggatcaatgcagagaatgaaccctccccgaggcatggggcccatgggtcccggcccacagaattacggcagcggcatgagaccaccacccaactccctcggccccgccatgcccgggattaacatgggcccgggagctggcagaccctggcccaatcctaacagtgctaactcaattccatactcctcctcatcacctggtacctatgtgggaccccctggtggtggcggtcctccaggaacacccattatgcccagtcccgcagattcaacaaattccagtgacaacatctacacaatgattaatccagtgccgcctggaggcagccggtccaacgtaagtctgctttctaataatttacatatcagacaccataacaaatcataattaacttcatcagctgaggggaaagcaagtttaattgatttcagccatttgttaccaaagatgaataaaataaaccgtcagaaaagtga

SEQ ID NO: 28195 - DNA, 1711 bp, Homo sapiens
  source 1..1711: mol_type = unassigned DNA
gcccgcgcggaggaaagggaggaaaaaaagccaccctgcggccggggccggagctggagccgccgctgccgccgccgccgcggccgtctggagctcccccgcgcggacgatgcctgccgtgcccgcctggggctcggggcggtgaggcccggggcgcggggtagctatggcgacggcaagcgcggcccgcggcgccgcctgacaggtgtgggccccggcggcggcggcgtggagcagcatgtacgccaaggggggcaagggttcggccgtgccctccgacagccaggcccgcgagaagttggcgctgtacgtttatgagtacctgctgcacatcggtgcccagaagtcagcccagaccttcctgtctgagatccgatgggagaagaacatcacgctgggggagccccctgggttcctgcactcctggtggtgcgtcttctgggacctgtactgcgcggcgcctgacagaagagaggcctgcgagcactccggcgaggccaaggccttccaggactatagtgctgcagccgcccccagccccgttatggggagtatggccccaggtgacacaatggccgcaggctccatggcggctggcttcttccagggcccccccggctcccagccgtccccccacaaccccaacgcccccatgatggggcctcacggtcagcccttcatgtcaccgcgcttcccagggggcccccggcccaccctgcggatgccgagtcagcctcccgcaggcctccctggctcccagcccctcctccctggcgccatggagccctccccacgagcccaggggcatccgagcatgggcggcccaatgcagagggtgacgcctcctcgtggcatggccagcgtggggccccagagctatggaggtggcatgcgacccccacccaactccctcgccggcccaggcctgcctgccatgaacatgggcccaggagttcgtggcccgtgggccagccccagtggaaactcgatcccctactcctcctcatcccccggcagctacaccggacccccaggaggaggtgggccccctggaacacccatcatgcctagccctggagattccaccaactccagcgaaaacatgtacactatcatgaaccccatcgggcagggcgccggcagggctaatttcccgctcggccctggcccggagggccccatggccgccatgagcgcgatggagcctcaccacgtgaacggatccctgggctcgggcgacatggacgggttgccgaagagttcccccggcgccgtggccggcctgagcaacgccccgggcaccccgcgggacgacggcgagatggcggccgccgggaccttcctgcacccgttcccgagcgaaagctactcgccagggatgaccatgagcgtgtgatggggcggcagccccgggcctctctgcgggcctaggcttctgcccagcgcccctgctcagggcgaggggctgaggtcacacctcgggcacctggactcctggccaatcaaggcttgcccagctgggaggccccacacgaaagactcttaccattttattaaaaacgcaaggacctcagagacgttcttttctgtatggacccttcctgccatttgtattttgtcccagagagaaaggctctttggggggcccctctccccaggacgtcagggggtggggcccataaataaatggaagctggttttggtttttggt

SEQ ID NO: 28196 - DNA, 1645 bp, Homo sapiens
  source 1..1645: mol_type = unassigned DNA
gcccgcgcggaggaaagggaggaaaaaaagccaccctgcggccggggccggagctggagccgccgctgccgccgccgccgcggccgtctggagctcccccgcgcggacgatgcctgccgtgcccgcctggggctcggggcggtgaggcccggggcgcggggtagctatggcgacggcaagcgcggcccgcggcgccgcctgacaggtgtgggccccggcggcggcggcgtggagcagcatgtacgccaaggggggcaagggttcggccgtgccctccgacagccaggcccgcgagaagttggcgctgtacgtttatgagtacctgctgcacatcggtgcccagaagtcagcccagaccttcctgtctgagatccgatgggagaagaacatcacgctgggggagccccctgggttcctgcactcctggtggtgcgtcttctgggacctgtactgcgcggcgcctgacagaagagaggcctgcgagcactccggcgaggccaaggccttccaggactatagtgctgcagccgcccccagccccgttatggggagtatggccccaggtgacacaatggccgcaggctccatggcggctggcttcttccagcccttcatgtcaccgcgcttcccagggggcccccggcccaccctgcggatgccgagtcagcctcccgcaggcctccctggctcccagcccctcctccctggcgccatggagccctccccacgagcccaggggcatccgagcatgggcggcccaatgcagagggtgacgcctcctcgtggcatggccagcgtggggccccagagctatggaggtggcatgcgacccccacccaactccctcgccggcccaggcctgcctgccatgaacatgggcccaggagttcgtggcccgtgggccagccccagtggaaactcgatcccctactcctcctcatcccccggcagctacaccggacccccaggaggaggtgggccccctggaacacccatcatgcctagccctggagattccaccaactccagcgaaaacatgtacactatcatgaaccccatcgggcagggcgccggcagggctaatttcccgctcggccctggcccggagggccccatggccgccatgagcgcgatggagcctcaccacgtgaacggatccctgggctcgggcgacatggacgggttgccgaagagttcccccggcgccgtggccggcctgagcaacgccccgggcaccccgcgggacgacggcgagatggcggccgccgggaccttcctgcacccgttcccgagcgaaagctactcgccagggatgaccatgagcgtgtgatggggcggcagccccgggcctctctgcgggcctaggcttctgcccagcgcccctgctcagggcgaggggctgaggtcacacctcgggcacctggactcctggccaatcaaggcttgcccagctgggaggccccacacgaaagactcttaccattttattaaaaacgcaaggacctcagagacgttcttttctgtatggacccttcctgccatttgtattttgtcccagagagaaaggctctttggggggcccctctccccaggacgtcagggggtggggcccataaataaatggaagctggttttggtttttggt

SEQ ID NO: 28197 - DNA, 3999 bp, Homo sapiens
  source 1..3999: mol_type = unassigned DNA
cccgaattttcaaagaacatattttccgttcacccccgctggtcttttactgccatcaatacactgttcttggtgcaaatacttcagcctctttattcaaagtatgttttatgtttttgccaaatatgatctctaattgaaagtttatttttggttttggatgaatctgcggagcttaagttgtgagaagaaagggggaacaagacacaatgaaagaaaagtccaaaaatgctgcgcggactaggagggagaaggaaaacagtgaattttatgaactggctaaattactgcctttgccctcggctatcacctcgcagctggacaaagcatccataatcagactcacgaccagctatctcaaaatgagagtggtgttcccagaagggctcggcgaggcgtggggccactcaagtcggaccagccccctggacaacgttggccgagaactgggctcccatctgctccagaccctggatggcttcatcttcgtggtagccccagatgggaagatcatgtacatctcagagacagcctcagtccacttgggtctttctcaggtagagctgaccggaaacagcatttatgaatacattcacccggcagaccacgacgagatgacggcggtgctcaccgcccatcaaccctaccactctcacttcgtgcaggagtatgagatcgagcgctccttcttcctgaggatgaagtgcgtcttggccaagcgtaacgccggcctcacctgtggcggctacaaggtcatccactgcagcggctacttgaagatccgccagtacagcctggacatgtcccccttcgacggctgctaccaaaacgtgggcctggtggccgtgggccactcgctgcctcccagcgccgtcacggagatcaagctacacagcaatatgtttatgttccgcgccagcctggacatgaagctcatctttctggactccagggtggcggagctgacggggtacgaacctcaggacctgattgagaagactctgtaccaccatgtgcacggctgcgacaccttccacctgcgctgcgcgcaccatttgctgctggtgaagggacaggtgaccaccaagtactacaggttcctggcgaaacacggcggctgggtatgggtgcagagctacgcgaccatcgtgcacaacagtcgctcctccaggccacactgtatcgtcagcgtcaactatgtcctcacagacacagaatacaaagggctgcagctctccctggatcagatctcagcctccaaaccagccttctcctataccagcagctccacccccaccatgactgacaacagaaagggggccaaatcccggctctccagctcaaagtcaaaatccaggacttccccataccctcagtattcgggatttcacacagaaagatcggaatctgatcatgacagccagtggggcggaagtcccttgaccgacacggcctctccgcagcttctggaccccgccgataggcctggctcccagcacgacgcatcgtgcgcctacagacagttttcggaccgcagctctctctgctatggctttgcgcttgaccactcgaggctggtggaagagaggcatttccatacccaggcctgtgaaggaggccgatgtgaggcaggcaggtacttcctgggaacgccgcaggccgggagggagccctggtggggctctcgcgcagccttgcccctgacaaaggcctccccagaaagcagagaagcctatgaaaacagcatgcctcacatcgcttcagtccacaggatccatgggcgaggtcattgggatgaagatagtgtggtcagttctccagaccctgggtcggccagtgaatcaggtgaccgatatcgtactgagcagtatcaaagtagcccacatgaacccagcaaaattgaaactcttataagagccactcagcaaatgattaaagaagaagagaacagattacagctaaggaaagccccctcagaccaactggcttccattaatggggctgggaaaaaacactccctgtgttttgcaaactaccaacagcccccaccaacaggtgaagtctgccatggctctgctcttgccaacacttcaccatgtgaccatatccagcagagagagggaaaaatgttgagcccccatgaaaatgactatgacaacagtcccaccgcactatctcggataagtagtcccaattcggatcgcatttcaaaatccagtttgatcctagctaaagactatctgcattcggatatatctcctcatcagacagcaggagaccaccctactgtctctccaaactgctttggctctcaccggcagtattttgacaagcatgcttacacattaactggatatgccctggagcacttatatgacagcgaaaccattagaaactattccttgggctgtaatggctcacactttgatgtaacttcccatctgaggatgcaaccagacccagcacaaggacacaagggaacatctgttataataaccaacggaagctgatgttttgctgaaatattttgttctttaaggatctctgaaacatatttatagtttaataccccattaccagcatttactatgccacagattgttagagagtataacttaagttactgggtatttgatacgtgttcctataaaatcaaagaaaacatagcactagcattcagggttatacacagaaaagggagctaaattgaatacacaaatttcccctctaattatatgggaaccagaatagataaattttgacttgaaaaatattcatgtagatcaagtgtgcatatatactacatgagaggactgatgaatgacaacattgcattgtgactatccagtgatcctcaaacacacaaactattacttacaaactgcggtatacattttacatatggaaatataggctatgtaatgtaaatacatcaaaaatgggtaattttctttgactctgtcacactaaacttcttaacgaaatttccattcccaaaataactgagaaagagagagatacatcttataaactgacttctttgtggtttcaaatcagccagctcatttggttcaggcataaattagagaaatggttctggatatggtgcaaaaatgagttttcacctggtatccattataaacaatcaggaagaggtaatttttcaccttgcttttcagttagacaaggaccaggattgcactgacatggcgctgagggtttttctaagtaagaacactgagatattgggacacacatcaaaaacctggagtgctcaattggaagtagttctatgaatatggaaaggccagaggcagagtgaaataaaatgctatctcaaagtttaacacaatttaagggctcagcataagtaaacaacatatttggggtttgcttgtaaaaccaactaaataaaaaattcaaaccaattcacccagaaaaaagaccaataggtgcaaaaataaaaggaaaaccagtgaagtgccacatgacagcagtgttaagtgtttgaaaacgtttcaaagcacatatgtgccaatgtgacaacatgtggaaagcctcaggagagagtctaagataaaagcttaggctgatagacaagtagttaagagctaagagcagtactctgaaggaataggcaaaatgtttattttccttattgtttgtaaacaacaaacttggtcttacatctgtgtggtatagtagaaaggccagctgactagatctctggattctaattttggccctacctgtaacttaattttgtgaccacagttgtaccattcaccgtgcctgggctctagtttcctggtttgtaaggcagccccagcgttcatgttctgtgatagagcagaactgaacttattacctaattaactctctgctatgagttgtcaagactgatcattctgttttttctgtacacagaagtttagatgctttgtgacttaagcaggtgtgtgggctcctttaggcaggttacagttaactttctagatt

SEQ ID NO: 28198 - DNA, 8430 bp, Homo sapiens
  source 1..8430: mol_type = unassigned DNA
aaacccttaagctataaagaagttacggggggcagttttcggcttccaattaggaataatagtgaactggcttcgtagcaactacggaggaccaggattctaaaatcacctcactcgtcccaaagcttgcatcctcctctttctgccacgcacccctcctccaattcatgatccagaaaagggagccgggaatgctctgctcctctctgccggtgggaagcggagaggccggcggtgtcgctgggttggacggtaggcatgagaacagttaagagatgggcgcccccgaaacctctgccgcttgtggggactgaagggccttgaaagagttgtctggggttcctgctcttcccaaaggggctcggagataccttaaatgccgcgagactgaagagcaaacgtcagggattattatgtcgattttccgaggaccagggttcgcagctggcagtagaagaaaaggctggctcctcaggggtcccactggcatttgataccctgaacgaccctcaggattgcccaaattcggtggatcgcccaaattcggtggatcagcaactttcctatactgcatcccgaattttcaaagaacatattttccgttcacccccgctggtcttttactgccatcaatacactgttcttggtgcaaatacttcagcctctttattcaaagtatgttttatgtttttgccaaatatgatctctaattgaaagtttatttttggttttggatgaatctgcggagcttaagttgtgagaagaaagggggaacaagacacaatgaaagaaaagtccaaaaatgctgcgcggactaggagggagaaggaaaacagtgaattttatgaactggctaaattactgcctttgccctcggctatcacctcgcagctggacaaagcatccataatcagactcacgaccagctatctcaaaatgagagtggtgttcccagaagggctcggcgaggcgtggggccactcaagtcggaccagccccctggacaacgttggccgagaactgggctcccatctgctccagaccctggatggcttcatcttcgtggtagccccagatgggaagatcatgtacatctcagagacagcctcagtccacttgggtctttctcaggtagagctgaccggaaacagcatttatgaatacattcacccggcagaccacgacgagatgacggcggtgctcaccgcccatcaaccctaccactctcacttcgtgcaggagtatgagatcgagcgctccttcttcctgaggatgaagtgcgtcttggccaagcgtaacgccggcctcacctgtggcggctacaaggtcatccactgcagcggctacttgaagatccgccagtacagcctggacatgtcccccttcgacggctgctaccaaaacgtgggcctggtggccgtgggccactcgctgcctcccagcgccgtcacggagatcaagctacacagcaatatgtttatgttccgcgccagcctggacatgaagctcatctttctggactccagggtggcggagctgacggggtacgaacctcaggacctgattgagaagactctgtaccaccatgtgcacggctgcgacaccttccacctgcgctgcgcgcaccatttgctgctggtgaagggacaggtgaccaccaagtactacaggttcctggcgaaacacggcggctgggtatgggtgcagagctacgcgaccatcgtgcacaacagtcgctcctccaggccacactgtatcgtcagcgtcaactatgtcctcacagacacagaatacaaagggctgcagctctccctggatcagatctcagcctccaaaccagccttctcctataccagcagctccacccccaccatgactgacaacagaaagggggccaaatcccggctctccagctcaaagtcaaaatccaggacttccccataccctcagtattcgggatttcacacagaaagatcggaatctgatcatgacagccagtggggcggaagtcccttgaccgacacggcctctccgcagcttctggaccccgccgataggcctggctcccagcacgacgcatcgtgcgcctacagacagttttcggaccgcagctctctctgctatggctttgcgcttgaccactcgaggctggtggaagagaggcatttccatacccaggcctgtgaaggaggccgatgtgaggcaggcaggtacttcctgggaacgccgcaggccgggagggagccctggtggggctctcgcgcagccttgcccctgacaaaggcctccccagaaagcagagaagcctatgaaaacagcatgcctcacatcgcttcagtccacaggatccatgggcgaggtcattgggatgaagatagtgtggtcagttctccagaccctgggtcggccagtgaatcaggtgaccgatatcgtactgagcagtatcaaagtagcccacatgaacccagcaaaattgaaactcttataagagccactcagcaaatgattaaagaagaagagaacagattacagctaaggaaagccccctcagaccaactggcttccattaatggggctgggaaaaaacactccctgtgttttgcaaactaccaacagcccccaccaacaggtgaagtctgccatggctctgctcttgccaacacttcaccatgtgaccatatccagcagagagagggaaaaatgttgagcccccatgaaaatgactatgacaacagtcccaccgcactatctcggataagtagtcccaattcggatcgcatttcaaaatccagtttgatcctagctaaagactatctgcattcggatatatctcctcatcagacagcaggagaccaccctactgtctctccaaactgctttggctctcaccggcagtattttgacaagcatgcttacacattaactggatatgccctggagcacttatatgacagcgaaaccattagaaactattccttgggctgtaatggctcacactttgatgtaacttcccatctgaggatgcaaccagacccagcacaaggacacaagggaacatctgttataataaccaacggaagctgatgttttgctgaaatattttgttctttaaggatctctgaaacatatttatagtttaataccccattaccagcatttactatgccacagattgttagagagtataacttaagttactgggtatttgatacgtgttcctataaaatcaaagaaaacatagcactagcattcagggttatacacagaaaagggagctaaattgaatacacaaatttcccctctaattatatgggaaccagaatagataaattttgacttgaaaaatattcatgtagatcaagtgtgcatatatactacatgagaggactgatgaatgacaacattgcattgtgactatccagtgatcctcaaacacacaaactattacttacaaactgcggtatacattttacatatggaaatataggctatgtaatgtaaatacatcaaaaatgggtaattttctttgactctgtcacactaaacttcttaacgaaatttccattcccaaaataactgagaaagagagagatacatcttataaactgacttctttgtggtttcaaatcagccagctcatttggttcaggcataaattagagaaatggttctggatatggtgcaaaaatgagttttcacctggtatccattataaacaatcaggaagaggtaatttttcaccttgcttttcagttagacaaggaccaggattgcactgacatggcgctgagggtttttctaagtaagaacactgagatattgggacacacatcaaaaacctggagtgctcaattggaagtagttctatgaatatggaaaggccagaggcagagtgaaataaaatgctatctcaaagtttaacacaatttaagggctcagcataagtaaacaacatatttggggtttgcttgtaaaaccaactaaataaaaaattcaaaccaattcacccagaaaaaagaccaataggtgcaaaaataaaaggaaaaccagtgaagtgccacatgacagcagtgttaagtgtttgaaaacgtttcaaagcacatatgtgccaatgtgacaacatgtggaaagcctcaggagagagtctaagataaaagcttaggctgatagacaagtagttaagagctaagagcagtactctgaaggaataggcaaaatgtttattttccttattgtttgtaaacaacaaacttggtcttacatctgtgtggtatagtagaaaggccagctgactagatctctggattctaattttggccctacctgtaacttaattttgtgaccacagttgtaccattcaccgtgcctgggctctagtttcctggtttgtaaggcagccccagcgttcatgttctgtgatagagcagaactgaacttattacctaattaactctctgctatgagttgtcaagactgatcattctgttttttctgtacacagaagtttagatgctttgtgacttaagcaggtgtgtgggctcctttaggcaggttacagttaactttctagatttagccaaaatgtagttggtagaaatttatgacagagaagaaaaatagcaagatttatttaatgctctattctctagtaattaaagcaaaatgatataagtgattagagagatttcatagataatatttcctaggagtcccgtgcccaaaactcttgccatatttaaggaagggaatgtactggcagaacttgacttacaattttggaaacagaacatgaaattgaatactcagggattagtagtatattttcatcatttaacacagttatttcacagtccataggtaggtgacaatctgaacgataatatgaaagatgagtactgggttgtttgtatatgaaaggagaggctacataaaattaaataatgttaacatttgtgctgtaaatgcaaaaaagtgcaagtaagtgagaaagttagtggttatatatattttcaaaaaattcaaagtgcagttgacccttgaataacatgggtttgaactgtgcagattcacttatgtgtggttttttttccaatcaaatgcagataaaaaacccagtatttggagaaatgtgaaacctgagtatacagagggcgatgttttgtataagtgagcgccacagggccaacaggcaggacttgagtatgtgagaatttgattatatgggggtaatcctggaaccaactccctgtttataccaaggggtgaccatacaataaaaactaagttttgaattatacaaaaaagagtatttagtaattttgagaaaattatttatgagaaatcctggaatacataaaatggagttttgatcaatttgcaacatgaagtaatgtcttaagaatgctaaaggttttgtagaattctgtagattgatagatgtttggaagaaaaaatatttgatgaatatggtgtattttggaaaggtaattttcacagatgggtatttctggtggctatatattctaccaaatgtgccagggacagaagctaaaagaaatggaaacttaagaaccagggaaaatgaactgatattaaagaaaaggctgtcactaaaggaatttcagtggaatttttatatggaagatagttaactggtgagaagaagaaattatgaatttcacagatgagagtaatcagaaggaataatgctctttaaaatgacatgaccaatatttttaagagaatacagaattaactaaattatatattgattcaaaattttggtagattgacccagttttaagtacataaccattttaaaatttactgaatgtcaataattttatagtagcagttttattacattacataaaatgtcatattgactcactatattgtatagcttacattttttgcaatatggcatgattatcacaaaatgacccaaggtaagttaagacatttgatgacaatgtactttcttaatatacatgtgaatgtgttaaaatgtgtttataatctacattattttgttctgtgcagcaacatatttcctcataatgaagatgtcatctgtgtcttttaaaaatagtatataaaataactacgttcccgataatttaatcagttaaacttaatatggctttagttttaattcttgatttccataactttgccaaatgttgagaaacatgaaacttgattgaaatagatacagaagtatgattttcatatcaccttggggatacataaaaatgtgctctatccaattactggtataatatgtatcaattcattagatgatacatagctcatggttttgtagaattctggtttctagtgataataagtatctttattgcccatttcacctgccatacctactttaaaaatttggatgaccaaagaagtgaatgaagtttccccaatctttcttgggaaaattctgtttaaattgttattgggaatatatagatttgatgtgttattttgggatgtgtaatattaatgtcacaatcactacaggtcagatatttaggtgtgcttcggtccacaagtcttttgtcatattgtgctcgcttacctaaactgtaattgcctgataaaagataatatgacagtgctgaggtgacattcaaaatgagacgggatgcaataaatgattgccttcagtatttacacagaaaaaccacttgctctttcttggttatatttcatagggctagattgtttccatcgggcactattcttaattcactctataccgtgttgtcacatgctgcctctgggcagagaatcccacttaaaataagctttaggggatcttctagaaaagggtagtgtgctccaatttttatttctccttcttatgggggatgaggatcaattatagtacaagaccatttggaaaatatgcatatatattttaaaatgaaatacaagatttccgccctcaagatctaaaccaagtaagtttgatggatggcagcacagataaagaaatcttctgaatacacatttgatttttatagctctctctttcaagagtaggatattactaagatattcagtgcaatctatcagtcctagtagtatttagaagtgacagagtgaatgctgatatttggaaaattgagcatttgaccattttggggtcactcacctggcctagtggaatagcttacactttaatacaatcaaacacagtctttctgatataaaatgtttgaatgcccagatttggttccctagttcactcaaatcatagatgttgacatacatcctgttttcataatgattttaaaaagaatgtaaatcctatggtcctccaaataaatgattcaacgtttatgtaaatgtcaagtttttgtgaatagggatttatgtctaagacagaaaaatctactgaactagttcttactgtggaactaattgtggataaaacattcgttatcatctaaattttaaatgaatgacaacagttatggacacatgcaaaaggtatcagacatagaaaatattgttgggggaaatttctgtgtggtgctaatttcttgtaagggttgtacagatagtgcttaactcaaaaagtgagagtgtggtcattgccaaataggggtttgctcagagttccttctctaggactgtatgcagaaagcatacacacacacatacgcacacagaaaaatatgatttttatatcatattcatgaaaatgtgccatatccaattataacacacacacacacacacacacacacacacacacacacacataaataaataaatgatggttcacataagaaatcctaattgctaattttaaaccaaacatttgtagttttgtttattgcaactttgctgcatgggactttgctttcataaatctatatggggttggggttaatttgccctaatttgctgacctgggacacatgtaatcactgttaaacttacacccggtaaccctgatgtgtttacatttcaaaagaaatgaaattggcctggaaaaaaattttggaagtactgtaagtcttttttctttttttttccgaagggaaatatttcaaaaaaggaaacattatgagtagacacttcaaaaaagataaaatattttacatttgttttttgactaatgtgctataaaaaggattatatttgtgagaaaagatactgatcgccaatatttcaaataccgtcttgcaatgtatagtttttagtgacattgtagtataaagctgtaatttgaaattttactttggaatgtaaagtagaaaatattagctatgtcaatgatatcttgcaaagtgttcccatttataattatttatattgtaaatagctttctgaagtaaattcgaagttaatgtgcataaaatgtatttattatgtgaggaattttttggtttaaaatatagttaccaatatgca

SEQ ID NO: 28199 - DNA, 4442 bp, Homo sapiens
  source 1..4442: mol_type = unassigned DNA
ccgcacgtggacagcggaggtgctgcgcctagccacacatcgcgggctccggcgctgcgtctccaggcacagggagccgccaggaagggcaggagagcgcgcccgggccagggcccggccccagccgcctgcgactcgctcccctccgctgggctcccgctccatggctccgcggccaccgccgcccctgtcgccctccggtccggaggggccttgccgcagccggttcgagcactcgacgaaggagtaagcagcgcctccgcctccgcgccggccgcccccaccccccaggaaggccgaggcaggagaggcaggagggaggaaacaggagcgagcaggaacggggctccggttgctgcaggacggtccagcccggaggaggctgcgctccgggcagcggcgggcggcgccgccgggttgctcggagctcaggcccggcggctgcggggaggcgtctcggaaccccgggaggccccccgcacctgcccgcggcccactccgcggactcacctggctcccggctcccccttccccatccccgccgccgcagcccgagcggggctccgcgggcctggagcacggccgggtctaatatgcccggagccgaggcgcgatgaaggagaagtccaagaatgcggccaagaccaggagggagaaggaaaatggcgagttttacgagcttgccaagctgctcccgctgccgtcggccatcacttcgcagctggacaaagcgtccatcatccgcctcaccacgagctacctgaagatgcgcgccgtcttccccgaaggtttaggagacgcgtggggacagccgagccgcgccgggcccctggacggcgtcgccaaggagctgggatcgcacttgctgcagactttggatggatttgtttttgtggtagcatctgatggcaaaatcatgtatatatccgagaccgcttctgtccatttaggcttatcccaggtggagctcacgggcaacagtatttatgaatacatccatccttctgaccacgatgagatgaccgctgtcctcacggcccaccagccgctgcaccaccacctgctccaagagtatgagatagagaggtcgttctttcttcgaatgaaatgtgtcttggcgaaaaggaacgcgggcctgacctgcagcggatacaaggtcatccactgcagtggctacttgaagatcaggcagtatatgctggacatgtccctgtacgactcctgctaccagattgtggggctggtggccgtgggccagtcgctgccacccagtgccatcaccgagatcaagctgtacagtaacatgttcatgttcagggccagccttgacctgaagctgatattcctggattccagggtgaccgaggtgacggggtacgagccgcaggacctgatcgagaagaccctataccatcacgtgcacggctgcgacgtgttccacctccgctacgcacaccacctcctgttggtgaagggccaggtcaccaccaagtactaccggctgctgtccaagcggggcggctgggtgtgggtgcagagctacgccaccgtggtgcacaacagccgctcgtcccggccccactgcatcgtgagtgtcaattatgtactcacggagattgaatacaaggaacttcagctgtccctggagcaggtgtccactgccaagtcccaggactcctggaggaccgccttgtctacctcacaagaaactaggaaattagtgaaacccaaaaataccaagatgaagacaaagctgagaacaaacccttaccccccacagcaatacagctcgttccaaatggacaaactggaatgcggccagctcggaaactggagagccagtccccctgcaagcgctgctgctcctccagaactgcagccccactcagaaagcagtgaccttctgtacacgccatcctacagcctgcccttctcctaccattacggacacttccctctggactctcacgtcttcagcagcaaaaagccaatgttgccggccaagttcgggcagccccaaggatccccttgtgaggtggcacgctttttcctgagcacactgccagccagcggtgaatgccagtggcattatgccaaccccctagtgcctagcagctcgtctccagctaaaaatcctccagagccaccggcgaacactgctaggcacagcctggtgccaagctacgaagcgcccgccgccgccgtgcgcaggttcggcgaggacaccgcgcccccgagcttcccgagctgcggccactaccgcgaggagcccgcgctgggcccggccaaagccgcccgccaggccgcccgggacggggcgcggctggcgctggcccgcgcggcacccgagtgctgcgcgcccccgacccccgaggccccgggcgcgccggcgcagctgcccttcgtgctgctcaactaccaccgcgtgctggcccggcgcggaccgctggggggcgccgcacccgccgcctccggcctggcctgcgctcccggcggccccgaggcggcgaccggcgcgctgcggctccggcacccgagccccgccgccacctccccgcccggcgcgcccctgccgcactacctgggcgcctcggtcatcatcaccaacgggaggtgacccgctggccgcccgcgccaggagcctggacccggcctcccggggctgcggcgccaccgagcccggcaaatgcgcacgacctacattaatttatgcagagacagctgtttgaattggaccccgccgccgacttgcggatttccaccgcggaggccccgcgcgccggtgccgagggccgaggagcgcccgggtccgggcaggtgaccgcccgcctctgtcctgcgagggccggtgcgacccagttgctgggggcttggtttcctcaccttgaaatcgggcttcacgcgtcttgccttgtccccaacgttccacaacagtcccgctgggggattgaagcggtttcactccgcaaatatcctccactttcaggagggaaaacccaccctaccacagtccgctcttccaagtggacggcagacctgggaggggacgcctgtgtcacgagcccttttagatgcttaggtgaaggcagaagtgatgattgtaagtcccatgaatacacaactccactgtctttaaaagtcattcaagagtctcattatttttgtttttatttaaccctttcttcaatacaaaaagccaacaaaccaagactaagggggtgaccatgcaattccattttgtgtctgtgaacataggtgtgcttcccaaatacattaacaagctcttacttccccctaacccctatgaactcttgataacaccaagagtagcaccttcagaatatattgaataggcattaaatgcaaaaatatatatgtagccagacagtttatgagaatgaccctgtcaagcttcattattacgtggcaaaatccctctggcccacacagatctgtaattcactaggctcgtgtttgctacaaatagtgctaataaagttaaattgcacgtgcaatacggaacactgtcaatggactgcaccttgtgaaggaaaaacatgcttaagggggtgtaatgaaaatgatgtagacattttaagcattttctacacagcgagaaaacttcgtaagaacatgttacgtgtgcaacaggtaaacagaaatcctttcataaagcaccagcagtgtttaaaaaatgagcttccattaatttttactttttatgggttttgcttaaagatctcaacatggaaaaatcctgtcatggctctgaactgcacaatgcattgaaccgccgtccttcaattttcttcacactatcaacactgcagcattttgctgctttatcaaaatggtttattttaggaaactttttccacctttctgaatggaaagaggttttcacaaatgttttaaactcatcgttctaaaatcaagtgcacctacaccaactgctctcaaaatgtgaactgacttttttttttttttttttgccaaccctgtgtcacttagtgaggacctgacacaatccctacagggtgtctgtcagtgggcctcatggtaagagtcacaatttgcaaatttaggaccgtgggtcatgcagcgaaggggctggatggtaggaagggatgtgcccgcctctccacgcactcagctatacctcattcacagctccttgtgagtgtgtgcacaggaaataagccgagggtattatttttttatgttcatgagtcttgtaattaaaccgtgattcttgaaaggtgtaggtttgattactaggagataccaccgacatttttcaataaagtactgcaaaatgcttttgtgtctaccttgttattaacttttggggctgtatttagtaaaaataaatcaaggctatcggagcagttcaataacaaaggttactgttgagaaaaaagaccctatcatagatttacaag

SEQ ID NO: 28200 - DNA, 2414 bp, Homo sapiens
  source 1..2414: mol_type = unassigned DNA
ggggctccgcgggcctggagcacggccgggtctaatatgcccggagccgaggcgcgatgaaggagaagtccaagaatgcggccaagaccaggagggagaaggaaaatggcgagttttacgagcttgccaagctgctcccgctgccgtcggccatcacttcgcagctggacaaagcgtccatcatccgcctcaccacgagctacctgaagatgcgcgccgtcttccccgaaggtttaggagacgcgtggggacagccgagccgcgccgggcccctggacggcgtcgccaaggagctgggatcgcacttgctgcagactttggatggatttgtttttgtggtagcatctgatggcaaaatcatgtatatatccgagaccgcttctgtccatttaggcttatcccaggtggagctcacgggcaacagtatttatgaatacatccatccttctgaccacgatgagatgaccgctgtcctcacggcccaccagccgctgcaccaccacctgctccaagagtatgagatagagaggtcgttctttcttcgaatgaaatgtgtcttggcgaaaaggaacgcgggcctgacctgcagcggatacaaggtcatccactgcagtggctacttgaagatcaggcagtatatgctggacatgtccctgtacgactcctgctaccagattgtggggctggtggccgtgggccagtcgctgccacccagtgccatcaccgagatcaagctgtacagtaacatgttcatgttcagggccagccttgacctgaagctgatattcctggattccagggtgaccgaggtgacggggtacgagccgcaggacctgatcgagaagaccctataccatcacgtgcacggctgcgacgtgttccacctccgctacgcacaccacctcctgttggtgaagggccaggtcaccaccaagtactaccggctgctgtccaagcggggcggctgggtgtgggtgcagagctacgccaccgtggtgcacaacagccgctcgtcccggccccactgcatcgtgagtgtcaattatgtactcacggagattgaatacaaggaacttcagctgtccctggagcaggtgtccactgccaagtcccaggactcctggaggaccgccttgtctacctcacaagaaactaggaaattagtgaaacccaaaaataccaagatgaagacaaagctgagaacaaacccttaccccccacagcaatacagctcgttccaaatggacaaactggaatgcggccagctcggaaactggagagccagtccccctgcaagcgctgctgctcctccagaactgcagccccactcagaaagcagtgaccttctgtacacgccatcctacagcctgcccttctcctaccattacggacacttccctctggactctcacgtcttcagcagcaaaaagccaatgttgccggccaagttcgggcagccccaaggatccccttgtgaggtggcacgctttttcctgagcacactgccagccagcggtgaatgccagtggcattatgccaaccccctagtgcctagcagctcgtctccagctaaaaatcctccagagccaccggcgaacactgctaggcacagcctggtgccaagctacgaaggtgggtcaggtctgctcgtggggaaggtgggaggactgcgcacggccgggagccgaagcagccatggcggtgggtggcagatggagacagaaccctcacgctttgggcaaacttgccctctttctgcttctaagtagggcttgctgtgctttcttgctctcaatgcaggtgctcctcgagagtgagaaatggcagtctgcctgcctcggggacactagtgacagtataaagggcaaaggaaaaccgagtatctggccttcacgtaaatcctggccacattcaccaaccaaagggggacagtgattttcaaaaccagctcccatgtgctgagaacaccccagctgcatttcttttgcaagattcctttccactccaaccagaagtgaatatttgagacaaacggcctattggctattttcccatgccagttttggaagtggggaaaactatggtggaaatttgtgggcttggggacagaaatgccactcaccaacccagggcaaagaacacaaaccctccaggcctcagtttcttcacctgtaaaatggggtgaagctgtgatgtgcctactcccaaggacacgacacacagtagggacctgccctgtacatgctagttcaacagaaaggaatggcctttcaccttctcctggtggcaggcaagcagatgtcctctgcggagataccgccagctccccaggacgcagactgactcctgtttgctcgctggaccaaccccaggcagaaggtggaaggtgggaacagaggtttagctgcaggaca

SEQ ID NO: 28201 - DNA, 687 bp, Homo sapiens
  source 1..687: mol_type = unassigned DNA
ctgtttcctttttcctctggcgagctttgcgttccctgtgcgccggaagtgatcccctgcgtggctgggctgctcgggttagatcgtcaggaaaagcctaaagattagactgtaagaaaagaaaatagaagccatgtttcgaagacctgtattacaggtacttcgtcagtttgtaagacatgagtccgaaacaactaccagtttggttcttgaaagatccctgaatcgtgtgcacttacttgggcgagtgggtcaggaccctgtcttgagacaggtggaaggaaaaaatccagtcacaatattttctctagcaactaatgagatgtggcgatcaggggatagtgaagtttaccaactgggtgatgtcagtcaaaagacaacatggcacagaatatcagtattccggccaggcctcagagacgtggcatatcaatatgtgaaaaaggggtctcgaatttatttggaagggaaaatagactatggtgaatacatggataaaaataatgtgaggcgacaagcaacaacaatcatagctgataatattatatttctgagtgaccagacgaaagagaaggagtagaaaggatgattcttctttggccatcatttggtacagtctcatttccaagtcatgtataatctttatggcttccaaggacaagaattaaaatactcttttacgtaaaa

SEQ ID NO: 28202 - DNA, 600 bp, Homo sapiens
  source 1..600: mol_type = unassigned DNA
agatcgtcaggtgagggaggaagggatagccagcgcgaaggaagtgctggagtcgtgtgttttggctgcgcgtgatcctgcgtgggtcgggaggtgtttctgtgtaggtgtctggccctttcatcagtcgtgcggaggaccgcgtgatttccttccagttctcctcggttttcaggtggtggcgccatcttcggaaaagcctaaagattagactgtaagaaaagaaaatagaagccatgtttcgaagacctgtattacaggtacttcgtcagtttgtaagacatgagtccgaaacaactaccagtttggttcttgaaagatccctgaatcgtgtgcacttacttgggcgagtgggtcaggaccctgtcttgagacaggtggaaggaaaaaatccagtcacaatattttctctagcaactaatgagatgtggcgatcaggggatagtgaagtttaccaactgggtgatgtcagtcaaaagacaacatggcacagaatatcagtattccggccaggcctcagagacgtggcatatcaatatgtgaaaaaggggtctcgaatttatttggaagggaaaatagactatggtgaatacatggata

SEQ ID NO: 28203 - DNA, 731 bp, Homo sapiens
  source 1..731: mol_type = unassigned DNA
tagatcgtcaggaaaagcctaaagattagactgtaagaaaagaaaatagaagccatgtttcgaagacctgtattacaggtacttcgtcagtttgtaagacatgagtccgaaacaactaccagtttggttcttgaaagatccctgaatcgtgtgcacttacttgggcgagtgggtcaggaccctgtcttgagacaggtggaaggaaaaaatccagtcacaatattttctctagcaactaatgagatgtggcgatcaggggatagtgaagtttaccaactgggtgatgtcagtcaaaagacaacatggcacagaatatcagtattccggccaggcctcagagacgtggcatatcaatatgtgaaaaaggggtctcgaatttatttggaagggaaaatagactatggtgaatacatggataaaaataatgtgaggcgacaagcaacaacaatcatagctgataatattatatttctgagtgaccagacgaaagagaaggagtagaaaggatgattcttctttggccatcatttgggattctgacacagccagcagcagtacgtgttcatcagcactgaagcagggcacctcctgattcagcagagagaccctcccctccccagccatgttggcggctgccctaggattgctgatgcccattgcaggggctgaatttctcattggcctggttggaaatggagtccctgtggtctgcagttttagaggatgggtca

SEQ ID NO: 28204 - DNA, 630 bp, Homo sapiens
  source 1..630: mol_type = unassigned DNA
gggttagatcgtcaggtgagggaggaagggatagccagcgcgaaggaagtgctggagtcgtgtgttttggctgcgcgtgatcctgcgtgggtcgggaggtgtttctgtgtaggtgtctggccctttcatcagtcgtgcggaggaccgcgtgatttccttccagttctcctcggttttcaggaaaagcctaaagattagactgtaagaaaagaaaatagaagccatgtttcgaagacctgtattacaggtacttcgtcagtttgtaagacatgagtccgaaacaactaccagtttggttcttgaaagatccctgaatcgtgtgcacttacttgggcgagtgggtcaggaccctgtcttgagacaggtggaaggaaaaaatccagtcacaatattttctctagcaactaatgagatgtggcgatcaggggatagtgaagtttaccaactgggtgatgtcagtcaaaagacaacatggcacagaatatcagtattccggccaggcctcagagacgtggcatatcaatatgtgaaaaaggggtctcgaatttatttggaagggaaaatagactatggtgaatacatggataaaaataatgtgaggcgacaagcaacaacaatcatagctgataa

SEQ ID NO: 28205 - DNA, 470 bp, Homo sapiens
  source 1..470: mol_type = unassigned DNA
gtccacctctccctatggtgtggctggctagcccgggggtctctacgctgcttggtctttgttaacggagatgaaggcagtaatttttcagtaacaggtttcagatataagtcccttggtgatgctaatatttatggaggccttactatgcattaagaacttttttagaagtttagaaaatggcagtgaataaagcagatacaaatctctgctctaagggagcttgcatagtaatgaaatttgagaagacagtggattggaagtgggattaactcagaatcaaaattttgtcgatgggttggaggaagaggaagttatttgggaccaaaaagacatacaggtgaaaagcctaaagattagactgtaagaaaagaaaatagaagccatgtttcgaagacctgtattacaggtacttcgtcagtttgtaagacatgagtccgaaacaactaccagtttggttcttgaaagat

SEQ ID NO: 28206 - DNA, 989 bp, Homo sapiens
  source 1..989: mol_type = unassigned DNA
acctctccctatggtgtggctggctagcccgggggtctctacgctgcttggtctttgttaacggagatgaaggcagtaatttttcagtaacaggtttcagatataagtcccttggtgatgctaatatttatggaggccttactatgcattaagaacttttttagaagtttagaaaatggcagtgaataaagcagatacaaatctctgctctaagggagcttgcatagtaatgaaatttgagaagacagtggattggaagtgggattaactcagaatcaaaattttgtcgatgggttggaggaagaggaagttatttgggaccaaaaagacatacaggtgtgagtttatttgggagggaggaaggaatcctcatcagatgtgcaggaatgttggaaaagcctaaagattagactgtaagaaaagaaaatagaagccatgtttcgaagacctgtattacaggtacttcgtcagtttgtaagacatgagtccgaaacaactaccagtttggttcttgaaagatccctgaatcgtgtgcacttacttgggcgagtgggtcaggaccctgtcttgagacaggtggaaggaaaaaatccagtcacaatattttctctagcaactaatgagatgtggcgatcaggggatagtgaagtttaccaactgggtgatgtcagtcaaaagacaacatggcacagaatatcagtattccggccaggcctcagagacgtggcatatcaatatgtgaaaaaggggtctcgaatttatttggaagggaaaatagactatggtgaatacatggataaaaataatgtgaggcgacaagcaacaacaatcatagctgataatattatatttctgagtgaccagacgaaagagaaggagtagaaaggatgattcttctttggccatcatttggtacagtctcatttccaagtcatgtataatctttatggcttccaaggacaagaattaaaatactcttttacgtaaaa

SEQ ID NO: 28207 - DNA, 676 bp, Homo sapiens
  source 1..676: mol_type = unassigned DNA
ggtgtccacctctccctatggtgtggctggctagcccgggggtctctacgctgcttggtctttgttaacggagatgaaggaaaagcctaaagattagactgtaagaaaagaaaatagaagccatgtttcgaagacctgtattacaggtacttcgtcagtttgtaagacatgagtccgaaacaactaccagtttggttcttgaaagatccctgaatcgtgtgcacttacttgggcgagtgggtcaggaccctgtcttgagacaggtggaaggaaaaaatccagtcacaatattttctctagcaactaatgagatgtggcgatcaggggatagtgaagtttaccaactgggtgatgtcagtcaaaagacaacatggcacagaatatcagtattccggccaggcctcagagacgtggcatatcaatatgtgaaaaaggggtctcgaatttatttggaagggaaaatagactatggtgaatacatggataaaaataatgtgaggcgacaagcaacaacaatcatagctgataatattatatttctgagtgaccagacgaaagagaaggagtagaaaggatgattcttctttggccatcatttggtacagtctcatttccaagtcatgtataatctttatggcttccaaggacaagaattaaaatactcttttacgtaaaa

SEQ ID NO: 28208 - DNA, 636 bp, Homo sapiens
  source 1..636: mol_type = unassigned DNA
gtgcgccggaagtgatcccctgcgtggctgggctgctcgggttagatcgtcaggtgagggaggaagggatagccagcgcgaaggaagtgctggagtcgtgtgttttggctgcgcgtgatcctgcgtgggtcgggaggtgtttctgtgaaaagcctaaagattagactgtaagaaaagaaaatagaagccatgtttcgaagacctgtattacaggtacttcgtcagtttgtaagacatgagtccgaaacaactaccagtttggttcttgaaagatccctgaatcgtgtgcacttacttgggcgagtgggtcaggaccctgtcttgagacaggtggaaggaaaaaatccagtcacaatattttctctagcaactaatgagatgtggcgatcaggggatagtgaagtttaccaactgggtgatgtcagtcaaaagacaacatggcacagaatatcagtattccggccaggcctcagagacgtggcatatcaatatgtgaaaaaggggtctcgaatttatttggaagggaaaatagactatggtgaatacatggataaaaataatgtgaggcgacaagcaacaacaatcatagctgataatattatatttctgagtgaccagacgaaagagaaggagtag

SEQ ID NO: 28209 - DNA, 8780 bp, Homo sapiens
  source 1..8780: mol_type = unassigned DNA
ggcttagccgccaccgcgcgcttcggaaggccagagggagggggaggcctgtcagtctcgcgcgttgcctgggcgaagggggcggagctttggcgtggggcggccaatagtgggggtggctgcgtgggtcgccatggggacggggctgttcccggggaggctgtgatgggttgacaggtgcgtgacagtgggagctgctctcggcacaagcatgtacggcaaaggcaagagtaacagcagcgccgtcccgtccgacagccaggcccgggagaagttagcactctacgtatatgaatatctgctccatgtaggagctcagaaatcagctcaaacatttttatcagagataagatgggaaaaaaacatcacattgggggaaccaccaggattcttacattcttggtggtgtgtattttgggatctctactgtgcagctccagagagacgtgaaacatgtgaacactcaagtgaagcaaaagccttccatgattacagtgctgcagcagctcccagtccagtgctaggaaacattcccccaggagatggcatgccagtaggtcctgtaccaccagggttctttcagccttttatgtcacctcggtaccctggaggtccaaggcccccattgaggatacctaatcaggcacttggaggtgtcccaggaagtcagccattactccccagtggaatggatccaactcgacaacaaggacatccaaatatgggtgggccaatgcagagaatgactcctccaagaggaatggtgcccttaggaccacagaactatggaggtgcaatgagacccccactgaatgctttaggtggccctggaatgcctggaatgaacatgggtccaggtggtggtagaccttggccaaacccaacaaatgccaattcaataccatactcctcagcatctcctgggaattatgtaggtcctccaggaggtggagggccaccaggaacacccatcatgcctagtccagcagattcaaccaactctggtgataacatgtatactttaatgaatgcagtacctcctggacctaacagacctaattttccaatgggtcctgggtcagatggtcccatgggtggattaggaggaatggagtcacatcacatgaatggctctttaggctcaggagatatggacagtatttccaagaattctcccaataatatgagcctgagtaatcaaccgggcactccaagggatgatggcgaaatggggggaaatttcttaaatccttttcagagtgagagttactcccctagcatgacaatgagcgtgtgatccattaccaagtctcctcatgaaaaccacagtgagtcagcccttcacagaactactacggaagaaaattattcatcacagtgtacagttaaacaaaggaatctcagtcacaccaaaccaacctttttatttcctgctctctcccctcttttgtgaagaaagcgggtccaaatgtgattcaaacaactgtacggagtggcatattagaattgccctaaactgaactgcaaataattatgtgtgtatgtatatgtgtgggaaagagaatgtactgtatatgtgtatgttatacagacatatacacatacatacattgacccacaggacattgtaaaatattatcacatgacatcttaagtagaaataagtagggacttttattccatcctttttttcacgtttacattttaattattacaagttgctcctgccccctccctgaactattttgtgctgtgtatatcactgctttatataagttattttttaaggtgaactcagatgttatggttttgtaaatgtctgcaatcatggataggaataaaatcgcttatttgagagctttcattaaattgcgtctgatgcaagttatcctgtgaatcacaaagtgtactgtctcaaaaaatagaagaaaatgtgtcttcgtctttatgttgaatcaaacaatttctcagttaccttcagtgaaaagtatttttttaatttttatttgagaaaaacacttcaaatcagtaaaagcttaactggggcctcacacagtatatttctgcaataactgctttaaacggagttcttgatttgtttgtcttagatgatacagaaatcattaaatagcccaaatcatttagaccatagcaataaagtgaccggggttgtcatatatttagcaacatcttttctctttaacatgatgaagcccaaaagtgataacaaaagcatttgcttgaatttgtcacttctcaccaggagtactagaggtaaatttttaataacatactaatgtgaaatggtatctggtttttattcagactttttgtgagcatattcttatagacactagaaataaatacatagaaggagactttgagcacaagggagaagagagttattagcactcctgaggcctctggaatgctgcttttctatccaggtatcttgcttgctaccagcagaattgactggtattggttctcactggccagggagcctctgctctgttcctggaatataaggcttttattcaggagcaaatcattgatagtaactttgctttatctagccattgacttcagcaggctaaaactacattgtgtaactgactgttcaaaaaagaataagtaaattttttttaatctaattcccttatggaaagcaccttgctctatggcactttccagatcttttgggattttgtgcttaattatacatacatacaccaaaatcacaatagaaagatatgaagactttaattttagactctgaaagataactgggtgatcctttgtgttaaaattgtgatacaaacaaccattgataaataccaactatgaatccaaactctagagactttgaaaagcattgtttaattgcaggtaagaggaatcttctctttcctttaggcttatagtctctaaagtgaaaatttggcaggatatagtcatgcagctcataatgacattccaatcaaccacagactgcatatacagcagtggtcctataagattataataccatatttttagcatatcttttctatgcttagatacacaaataccattgtattacagttgcctttggtattcagtacagtaacatgctgtacaggtttgtagcctaggagcaatagtttatattatatagcctaggtgtgtaggagcctataccatctaggtttgtgtaagtacactctatgatgttcagacaaggacaatattgcctgacaatgcatttctcagaatgtatacttatcattaagtaacatatgactgtatgtactagttcctgatgacttacttctctcaaattcataatgatttagtccttgtaaaaataaagattttgcctgtgcctaaacagggatactaggcagaactgttgagaaaaaaaagctgaattaaatttatgttgcagatttaaactatcataaaatgagcctcagttaatcacacacagtattcaggtgcctaggagtgcacaccggagaacagcctcatgctgtcaagctgcagaaacctttcatgcaaattcagatgaaaaggtctttacctcaagccagggtaacctgaatgaaggtgatagtttgtccagacacctgactttaccaagaagaattttgactttcatattttatgacaatcatataaaaattgacagtcctttgattattaagcttaatcttataatgctagaattttcaaatattttgttgactcttctccattgttaccgatcttgaaattcttttcttcgccttctgagaaggtattatttcttatcacaaagaatgatgaatatgattttatctacccttattttgggggtaatacgagaatatgaattgcatcatgatccccattatttctaacctaaaagtaaaattcgttttttttttcaaggcagagcagtcaattgattataagtatttatttcttttttcttcttggagcccagattaaaaagagttattttagatttaaaaatttcctgaaatagttgaaaaattatttttgaggagaaaattgtatccaagaaacccagaatgtaaggatacttgatttttatatccagataattctttcatgcactgaatggaagacagtatatctgtatattaatttttgtttagattttgaatcatttaacccttatccttttttcttgtaataagactatttaatgtttttctcttgtgttttccatctttatcaatgcattcgtgttggtcttgatgtatactacctgttcctagtgttatttttacacgtcatctcacagtaataatatcagcaattcttgctgcattgaacatattaaatacacatgtaaaatgaaaaagtaagcagtaggtaaaatcttgttactctgctttgcattctgcctaactcactgcatttgaaaatacatgtcaaattctttctgagggtatgtatgattcttaactacgtgtcttacagcaaagttgcccatgggaacaaaggctgtagggtgtcattgatcttgtaatacaacacatatttgatgggtgaatcttattagcactcctttgaaaatgttccagtatggagtcagttgctgataaagaggaagttcacagctaggaatccgaagttaagatttctcaattgccgcctgggcactcatgcctgtaatcccagcacttgggaggccaaggtgggcagatcacctgaggtcgggagttcaagaccagcctggccaacctggtgaaacccccccatctctactaaaaatacaaaaattagccaggtatggtggtggctgcctgtaatcccagctactcaagaggctgaggcgggagaatcacttgaacccaggaggcggaggttgcagtgagccgagattgtgccactgcactccagcctgggtgacagagcaagactccatctcaaaaatagaaaagatttctcaattgccaaaaagattaacaagtaaatcaattctgctcccccagccatgaaaagtgcccaaaacagccctttccctccagaataaaataaaacttccatttctatttttatgattctctaagatatctgaactccattgcatttcatagggttattcagttagcacttctgtggtttaaaagacaacaaatgaaaataagtaagttcagtttggggcatgaagaagtcccacatctgtctatatcttttcttcatcatattgtccctaggaatgtatagcaaagcattcagaactgctcctttggctggggaagttttccaccgtccttaatactatgaagtcttgattacttcttccgtggctttatccttgcctccctcccaatccctgcatcttccaggagaaataaaataccaactgaacactgttaccttctcagcccttaccattttcatctgcatatagtgtatagtactaagagtagttttcccaggagaaataattgcaattttcatttcttgattatcactgctaattcgaaggagtgccacaaatcatagccacttgattttgattttggaatgcattttagtgttttgacactggttttccttttttttaaatttttttttcttttttttttttgagacagtcttgctctgtcacccaggctggagtgcagtggcacaatcttggctcactgccgtctccgcctcccaggttccagagattctcctgcctcagcctccagagtagctggattacaggcatgcgtcacaggctaatttttgtatttttagtagaggcagggtttcaccatgttggccaggctggtctggaactcctgacctcaagtgatctgcccgcctcagcctcccaaagtgctgggattacaggcatgagccactatgcttgatcaggttttcctcttttttttttttttttttgagtcagaatcttgctctgtcacccaggctggagtgcaatggtgtgatctcggctcactgcaaccttcacctcccgggttcatgcaattctcctgcctcagcctcccgagtggctgggactacaggtgctcaccaccatgcccagctaattttttgtatttttagtagagaccgggtttcaccgtgttagccaggatggtctcgatctcctgacctcgtgatccacccgccttggcctcccaaagtgttgggattacaggcatgagccaccgtacctggcccaggttttcctttttttttatgtcttctgtacaatagagttggccctccatatccacaggttccacatccctgattcaatcaactcctgataaaaaatattggaaaaaatttttataacaataaaaaccaataatacaacaataattacaaataatacattgtaacaatgatttccatggcatttataatacattgtattaggtattataagtaaacgagatgatttgaagtatattggaggatgtgcataggttatactatgccgttttatataaaggacttaagcgtctgtggattttggtatctgcagaggtcctggaaccggtctcccttggatacggagggacaactgtagttctctgtctttgaaaacattaatcgatacaagtggccagtgaatgtatagtatgggagggagtaatccagtatgggggacaaggttgccatatatttgccaaaagtagttgaatcttctttctgtttttccctcctggtggaataagtttattgtttgctatgaggagccagaggctgtgtttgtttaaagcaatggtacccaatcttaagcatgtgtaaaggtctccctgggtctgtgaaccataccttgagaaataactagaaaagtaaaagaatggtgaaccactattaataatacttccattttgcatactaaatatgttgcgtgtacctgtgtgtgtgtgttgggaatagtaatatgaagtttgctcacaaaacactcccactgtgattcacattattttatagcacaaccaataatgattaaacataattatttcctttgactacttttcatttcagtggtaaaacagctgatgaaagttatttgggatggaaagagtaatacaagacatacgcagatggagtctcctgtgcgtaggtttagcacacccatgttagcttgtccacattaggccttcttttgaaggtactgtatctaaagataagggcataagtgatcatttaattctcagccacttcactgatactacaaggtgttacacagtaattatagtggtttgatacagacatttgtttacaagaaactgaattggcattattaacttatttcacacaaaaaaagttagctttacccatgaactgtaattcagattgataaggtgacctacccatgaaaaagacacctgagacctgtttacttttttaaactatgaagtgaaatcctcagttcaataagtgtcccaaggagaatttcctctgttaaattttccctgttaacttagtataattggttttcttgaatagaagaataatgatttctgtaagatattttaatgtgaatatttttgctgtcttcatctttaaaaattaaatacagtactatatatagatattaaaattttaaagtgggactaggtgtttttatgtatacaattacagtttgtctcctctctttgcaaatttactggctattatcagaataaaggttggactcattttgcttatcccagtcattaaaatgttgtgatctgtttctaacatatttagcatttcatttttaaaatgagatgtgccattatcataacaaaggcaactattaatgttcctagaaaaaatgatgtaaaggacttactcctagtcaatattaacacttaatcccactttcttttttccaccaaatggcctcagtacattgccaagagagtgaaatttggattcctcacagtactcagaacacaatatgatatttgtcagctaactttccatcatgtcttggtaaaattgctcagttaaatataattggccatctacttattaaaaaacaattcaaataatctgtacagttaccataatttgacaacaaattactttaaatttagcaccatcttagaaatcttcttaatataaactactgattgaaatgtgtttatactttctatcatatttcaaactgttttactttccttgcattaagacaattaaaacacaaactacatgttagaatgaataatttaaaggacatgctgctgtttcagcataaaaaatggtaaagtctttataaatagaatacttatgatagccattaacgtattgaattgtttaattaacctagttgtgattttccgaatttaagacgttttcttactacatgtgttaaattgttacctataatatcttcctggaaaaatagaagtatttgtaaggtttttataaatgcacaatttatgtataaatataattggaatctgggatgactcttagtaatctactattcttaattcaacgatggccaccagctacctgacacattttgtaaatttagcatctgtgtatgtgtgttcgtgtatgtgtgtgtgcgtgcatgtgcacattactgcatttattctcaaatggatttataatttagtgtttttgtacaagtacttgagctattcatgtaatgggataagttgccataaagatgtacataaatgacccttaatttggcacgttttcacatttaattttttaaaatacagcttttcatatacagttcctaccctttcatttctagcctgtacttcattacttgttgaaaaagtcaagtttgtatgaagccagcataaacatcaaaatataactaatgtgga

SEQ ID NO: 28210 - DNA, 1698 bp, Homo sapiens
  source 1..1698: mol_type = unassigned DNA
gggttgacaggtgcgtgacagtgggagctgctctcggcacaagcatgtacggcaaaggcaagagtaacagcagcgccgtcccgtccgacagccaggcccgggagaagttagcactctacgtatatgaatatctgctccatgtaggagctcagaaatcagctcaaacatttttatcagagataagatgggaaaaaacatcacattgggggaaccaccaggattcttacattcttggtggtgtgtattttgggatctctactgtgcagctccagagagacgtgaaacatgtgaacactcaagtgaagcaaaagccttccatgattacagtgctgcagcagctcccagtccagtgctaggaaacattcccccaggagatggcatgccagtaggtcctgtaccaccagggttctttcagccttttatgtcacctcggtaccctggaggtccaaggcccccattgaggatacctaatcaggcacttggaggtgtcccaggaagtcagccattactccccagtggaatggatccaactcgacaacaaggacatccaaatatgggtgggccaatgcagagaatgactcctccaagaggaatggtgcccttaggaccacagaactatggaggtgcaatgagacccccactgaatgctttaggtggccctggaatgcctggaatgaacatgggtccaggtggtggtagaccttggccaaacccaacaaatgccaattcaataccatactcctcagcatctcctgggaattatgtaggtcctccaggaggtggagggccaccaggaacacccatcatgcctagtccagcagattcaaccaactctggtgataacatgtatactttaatgaatgcagtacctcctggacctaacagacctaattttccaatgggtcctgggtcagatggtcccatgggtggattaggaggaatggagtcacatcacatgaatggctctttaggctcaggagatatggacagtatttccaagaattctcccaataatatgagcctgagtaatcaaccgggcactccaagggatgatggcgaaatggggggaaatttcttaaatccttttcagagtgagagttactcccctagcatgacaatgagcgtgtgatccattaccaagtctcctcatgaaaaccacagtgagtcagcccttcacagaactactacggaagaaaattattcatcacagtgtacagttaaacaaaggaatctcagtcacaccaaaccaacctttttatttcctgctctctcccctcttttgtgaagaaagcgggtccaaatgtgattcaaacaactgtacggagtggcatattagaattgccctaaactgaactgcaaataattatgtgtgtatgtatatgtgtgggaaagagaatgtactgtatatgtgtatgttatacagacatatacacatacatacattgacccacaggacattgtaaaatattatcacatgacatcttaagtagaaataagtagggacttttattccatcctttttttcacgtttacattttaattattacaagttgctcctgccccctccctgaactattttgtgctgtgtatatcactgctttatataagttattttttaaggtgaactcagatgttatggttttgtaaatgtctgcaatcatggataggaataaaatcgcttatttgagagctttcatt

SEQ ID NO: 28211 - DNA, 1521 bp, Homo sapiens
  source 1..1521: mol_type = unassigned DNA
caagcatgtacggcaaaggcaagagtaacagcagcgccgtcccgtccgacagccaggcccgggagaagttagcactctacgtatatgaatatctgctccatgtaggagctcagaaatcagctcaaacatttttatcagagataagatgggaaaaaaacatcacattgggggaaccaccaggattcttacattcttggtggtgtgtattttgggatctctactgtgcagctccagagagacgtgaaacatgtgaacactcaagtgaagcaaaagccttccatgattacagtgctgcagcagctcccagtccagtgctaggaaacattcccccaggagatggcatgccagtaggtcctgtaccaccagggttctttcaggcacttggaggtgtcccaggaagtcagccattactccccagtggaatggatccaactcgacaacaaggacatccaaatatgggtgggccaatgcagagaatgactcctccaagaggaatggtgcccttaggaccacagaactatggaggtgcaatgagacccccactgaatgctttaggtggccctggaatgcctggaatgaacatgggtccaggtggtggtagaccttggccaaacccaacaaatgccaattcaataccatactcctcagcatctcctgggaattatgtaggtcctccaggaggtggagggccaccaggaacacccatcatgcctagtccagcagattcaaccaactctggtgataacatgtatactttaatgaatgcagtacctcctggacctaacagacctaattttccaatgggtcctgggtcagatggtcccatgggtggattaggaggaatggagtcacatcacatgaatggctctttaggctcaggagatatggacagtatttccaagaattctcccaataatatgagcctgagtaatcaaccgggcactccaagggatgatggcgaaatggggggaaatttcttaaatccttttcagagtgagagttactcccctagcatgacaatgagcgtgtgatccattaccaagtctcctcatgaaaaccacagtgagtcagcccttcacagaactactacggaagaaaattattcatcacagtgtacagttaaacaaaggaatctcagtcacaccaaaccaacctttttatttcctgctctctcccctcttttgtgaagaaagcgggtccaaatgtgattcaaacaactgtacggagtggcatattagaattgccctaaactgaactgcaaataattatgtgtgtatgtatatgtgtgggaaagagaatgtactgtatatgtgtatgttatacagacatatacacatacatacattgacccacaggacattgtaaaatattatcacatgacatcttaagtagaaataagtagggacttttattccatcctttttttcacgtttacattttaattattacaagttgctcctgccccctccctgaactattttgtgctgtgtatatcactgctttatataagttattttttaa

SEQ ID NO: 28212 - DNA, 2543 bp, Homo sapiens
  source 1..2543: mol_type = unassigned DNA
cggaggcggggctggggcgccgggggcgggggtgggaggcggaggcggggccggggcgccgggggcggggcgagtccggaggactccttggactgcgcggaacatggcgttctggggttggcgcgccgcggcagccctccggctgtggggccgggtagttgaacgggtcgaggccgggggaggcgtggggccgtttcaggcctgcggctgtcggctggtgcttggcggcagggacgatgtgagtgcggggctgagaggcagccatggggcccgcggtgagcccttggacccggcgcgccccttgcagaggcctcccagacccgaggtgcccagggcattccggaggcagccgagggcagcagctcccagtttcttcttttcgagtattaaaggtggaagaaggtccatatctttttctgtgggtgcttcaagtgttgttggaagtggaggcagcagtgacaaggggaagctttccctgcaggatgtagctgagctgattcgggccagagcctgccagagggtggtggtcatggtgggggccggcatcagcacacccagtggcattccagacttcagatcgccggggagtggcctgtacagcaacctccagcagtacgatctcccgtaccccgaggccatttttgaactcccattcttctttcacaaccccaagccctttttcactttggccaaggagctgtaccctggaaactacaagcccaacgtcactcactactttctccggctgcttcatgacaaggggctgcttctgcggctctacacgcagaacatcgatgggcttgagagagtgtcgggcatccctgcctcaaagctggttgaagctcatggaacctttgcctctgccacctgcacagtctgccaaagacccttcccaggggaggacattcgggctgacgtgatggcagacagggttccccgctgcccggtctgcaccggcgttgtgaagcccgacattgtgttctttggggagccgctgccccagaggttcttgctgcatgtggttgatttccccatggcagatctgctgctcatccttgggacctccctggaggtggagccttttgccagcttgaccgaggccgtgcggagctcagttccccgactgctcatcaaccgggacttggtggggcccttggcttggcatcctcgcagcagggacgtggcccagctgggggacgtggttcacggcgtggaaagcctagtggagcttctgggctggacagaagagatgcgggaccttgtgcagcgggaaactgggaagcttgatggaccagacaaataggatgatggctgcccccacacaataaatggtaacataggagacatccacatcccaattctgacaagacctcatgcctgaagacagcttgggcaggtgaaaccagaatatgtgaactgagtggacacccgaggctgccactggaatgtcttctcaggccatgagctgcagtgactggtagggctgtgtttacagtcagggccaccccgtcacatatacaaaggagctgcctgcctgtttgctgtgttgaactcttcactctgctgaagctcctaatggaaaaagctttcttctgactgtgaccctcttgaactgaatcagaccaactggaatcccagaccgagtctgctttctgtgcctagttgaacggcaagctcggcatctgttggttacaagatccagacttgggccgagcggtccccagccctcttcatgttccgaagtgtagtcttgaggccctggtgccgcacttctagcatgttggtctcctttagtggggctatttttaatgagagaaaatctgttctttccagcatgaaatacatttagtctcctcaaagggactgcaggtgttgacatgagttggaaagggaaccctgggatacgtggcgtcccctctattggaacagtctgaggactgaaggcatttgtccctggatttattggagacggcccagctcctccctctgaaggtggtcacattctgttgactctccatactcagcctctcctccagaaacagatctgttccagaacattccagcactttctatctggcctccttgtccccacactacgcccccccaccctcgccagggcttcctctagtgacactgttagagctaatctctgagacagggaaggcattactcacttaaaacccaggctgagtcctggccacctgctggattgtgacataggaggtggaatccactgaactgctacttctgcacaggctccttctcctggggctgtacccaggcccagccctgatggctcaccctgtcaggcaccagctgctccctcctgggctctcacccacctgcacatcctccttcctagcatcacattacctgcgtgtttccccagacaaaagcacttcccattcttgaaccttgcctaccctgggctgagctgacggcaatagatttaatgacagtgactcccaggaagggggtcctgtgactttgcgccttaataagaacaaaaggtggaattggtgacctaggaaaactgttgaatt

SEQ ID NO: 28213 - DNA, 1475 bp, Homo sapiens
  source 1..1475: mol_type = unassigned DNA
ggaggactccttggactgcgcggaacatggcgttctggggttggcgcgccgcggcagccctccggctgtggggccgggtagttgaacgggtcgaggccgggggaggcgtggggccgtttcaggcctgcggctgtcggctggtgcttggcggcagggacgatgatgtagctgagctgattcgggccagagcctgccagagggtggtggtcatggtgggggccggcatcagcacacccagtggcattccagacttcagatcgccggggagtggcctgtacagcaacctccagcagtacgatctcccgtaccccgaggccatttttgaactcccattcttctttcacaaccccaagccctttttcactttggccaaggagctgtaccctggaaactacaagcccaacgtcactcactactttctccggctgcttcatgacaaggggctgcttctgcggctctacacgcagaacatcgatgggcttgagagagtgtcgggcatccctgcctcaaagctggttgaagctcatggaacctttgcctctgccacctgcacagtctgccaaagacccttcccaggggaggacattcgggctgacgtgatggcagacagggttccccgctgcccggtctgcaccggcgttgtgaagcccgacattgtgttctttggggagccgctgccccagaggttcttgctgcatgtggttgatttccccatggcagatctgctgctcatccttgggacctccctggaggtggagccttttgccagcttgaccgaggccgtgcggagctcagttccccgactgctcatcaaccgggacttggtggggcccttggcttggcatcctcgcagcagggacgtggcccagctgggggacgtggttcacggcgtggaaagcctagtggagcttctgggctggacagaagagatgcgggaccttgtgcagcgggaaactgggaagcttgatggaccagacaaataggatgatggctgcccccacacaataaatggtaacataggagacatccacatcccaattctgacaagacctcatgcctgaagacagcttgggcaggtgaaaccagaatatgtgaactgagtggacacccgaggctgccactggaatgtcttctcaggccatgagctgcagtgactggtagggctgtgtttacagtcagggccaccccgtcacatatacaaaggagctgcctgcctgtttgctgtgttgaactcttcactctgctgaagctcctaatggaaaaagctttcttctgactgtgaccctcttgaactgaatcagaccaactggaatcccagaccgagtctgctttctgtgcctagttgaacggcaagctcggcatctgttggttacaagatccagacttgggccgagcggtccccagccctcttcatgttccgaagtgtagtcttgaggccctggtgccgcacttctagcatgttggtctcctttagt

SEQ ID NO: 28214 - DNA, 1225 bp, Homo sapiens
  source 1..1225: mol_type = unassigned DNA
acttggctgtgccattgaggcgtcaaagagtgtgggcgcctgtggtcgaacccgctacggactagctttgtggtgtcagcctttgtgacccggaattgctcctgtcaaatgaggatcttcccagtagtgttttgcgaggattaggtgtaaatataatgcctgaccatagtaaaagcgctcagaaagtattaactatcaccgccatccgggttgaaaaagtattaaaggtggaagaaggtccatatctttttctgtgggtgcttcaagtgttgttggaagtggaggcagcagtgacaaggggaagctttccctgcaggatgtagctgagctgattcgggccagagcctgccagagggtggtggtcatggtgggggccggcatcagcacacccagtggcattccagacttcagatcgccggggagtggcctgtacagcaacctccagcagtacgatctcccgtaccccgaggccatttttgaactcccattcttctttcacaaccccaagccctttttcactttggccaaggagctgtaccctggaaactacaagcccaacgtcactcactactttctccggctgcttcatgacaaggggctgcttctgcggctctacacgcagaacatcgatgggcttgagagagtgtcgggcatccctgcctcaaagctggttgaagctcatggaacctttgcctctgccacctgcacagtctgccaaagacccttcccaggggaggacattcgggctgacgtgatggcagacagggttccccgctgcccggtctgcaccggcgttgtgaagcccgacattgtgttctttggggagccgctgccccagaggttcttgctgcatgtggttgatttccccatggcagatctgctgctcatccttgggacctccctggaggtggagccttttgccagcttgaccgaggccgtgcggagctcagttccccgactgctcatcaaccgggacttggtggggcccttggcttggcatcctcgcagcagggacgtggcccagctgggggacgtggttcacggcgtggaaagcctagtggagcttctgggctggacagaagagatgcgggaccttgtgcagcgggaaactgggaagcttgatggaccagacaaataggatgatggctgcccccacacaataaatggtaacataggagacatccacatcccaattctgacaagacctcatgcctgaagacagctt

SEQ ID NO: 28215 - DNA, 1217 bp, Homo sapiens
  source 1..1217: mol_type = unassigned DNA
gcaaatgcaatcagacggtcccactgtggggtgtgaagtgtccgtagagctgtgagagaatgaagatgagctttgcgttgactttcaggtcagcaaaaggccgttggatcgcaaaccccagccagccgtgctcgaaagcctccattgggttatttgtgccagcaagtcctcctctggaccctgagaaggtcaaagagttacagcgcttcatcaccctttccaagagactccttgtgatgactggggcaggaatctccaccgaatcggggataccagactacaggtcagaaaaagtggggctttatgcccgcactgaccgcaggcccatccagcatggtgattttgtccggagtgccccaatccgccagcggtactgggcgagaaacttcgtaggctggcctcaattctcctcccaccagcctaaccctgcacactgggctttgagcacctgggagaaactcggaaagctgtactggttggtgacccaaaatgtggatgctttgcacaccaaggcggggagtcggcgcctgacagagctccacggatgcatggacagggtcctgtgcttggattgtggggaacagactccccggggggtgctgcaagagcgtttccaagtcctgaaccccacctggagtgctgaggcccatggcctggctcctgatggtgacgtctttctctcagaggagcaagtccggagctttcaggtcccaacctgcgttcaatgtggaggccatctgaaaccagatgtcgttttcttcggggacacagtgaaccctgacaaggttgattttgtgcacaagcgtgtaaaagaagccgactccctcttggtggtgggatcatccttgcaggtatactctggttacaggtttatcctcactgcctgggagaagaagctcccgattgcaatactgaacattgggcccacacggtcggatgacttggcgtgtctgaaactgaattctcgttgtggagagttgctgcctttgatagacccatgctgaccacagcctgatattccagaacctggaacagggactttcacttgaatcttgctgctaaatgtaaatgccttctcaaatgacagattccagttcccattcaacagagtagggtgcactgacaaagtatagaaggttctaggtatcttaatgtgtggatattcttaattaaaactcattttttttaaataaaaaattgttcagctttatatgaaa

SEQ ID NO: 28216 - DNA, 1528 bp, Homo sapiens
  source 1..1528: mol_type = unassigned DNA
agactgtattcgggggcgcgagctgccccagtaaatggaaatgttttctaacatataaaaacctacagaagaagaaaataattttctggatcaaattagaagtctgtattatattgatgtctccagattcaaatatattagaaagcagccgtggagacaaccatcttcattttgggagaaataactaaagcccgcctcaagcattagaactacagacaaaccctgatgcgacctctccagattgtcccaagtcgattgatttcccagctatattgtggcctgaagcctccagcgtccacacgaaaccagatttgcctgaaaatggctcggccaagttcaagtatggcagattttcgaaagttttttgcaaaagcaaagcacatagtcatcatctcaggagctggtgttagtgcagaaagtggtgttccgaccttcagaggagctggaggttattggagaaaatggcaagcccaggacctggcgactcccctggcctttgcccacaacccgtcccgggtgtgggagttctaccactaccggcgggaggtcatggggagcaaggagcccaacgccgggcaccgcgccatagccgagtgtgagacccggctgggcaagcagggccggcgagtcgtggtcatcacccagaacatcgatgagctgcaccgcaaggctggcaccaagaaccttctggagatccatggtagcttatttaaaactcgatgtacctcttgtggagttgtggctgagaattacaagagtccaatttgtccagctttatcaggaaaagggtgtgaagaggcaggctgcgggggcttgctgcgacctcacgtcgtgtggtttggagaaaacctggatcctgccattctggaggaggttgacagagagctcgcccactgtgatttatgtctagtggtgggcacttcctctgtggtgtacccagcagccatgtttgccccccaggtggctgccaggggcgtgccagtggctgaatttaacacggagaccaccccagctacgaacagattcaggtttcatttccagggaccctgtggaacgactcttcctgaagcccttgcctgtcatgaaaatgaaactgtttcttaagtgtcctggggaagaaagaaattacagtatatctaagaactaggccacacgcagaggagaaatggtcttatgggtggtgagctgagtactgaacaatctaaaaatagcctctgattccctcgctggaatccaacctgttgataagtgatgggggtttagaagtagcaaagagcacccacattcaaaagtcacagaactggaaagttaattcatattatttggtttgaactgaaacgtgaggtatctttgatgtgtatggttggttattgggagggaaaaattttgtaaattagattgtctaaaaaaaatagttattctgattatatttttgttatctgggcaaagtagaagtcaaggggtaaaaaccctactattctgatttttgcacaagttttagtggaaaataaaatcacactctacagta

SEQ ID NO: 28217 - DNA, 1656 bp, Homo sapiens
  source 1..1656: mol_type = unassigned DNA
ccggagcgcggtcgggacacagcgcctctaggagaaagcctggaaggcgctccgggggtacccagagctcttagcgggccggcagcatgtgcggggcccaagtaaatggaaatgttttctaacatataaaaacctacagaagaagaaaataattttctggatcaaattagaagtctgtattatattgatgtctccagattcaaatatattagaaagcagccgtggagacaaccatcttcattttgggagaaataactaaagcccgcctcaagcattagaactacagacaaaccctgatgcgacctctccagattgtcccaagtcgattgatttcccagctatattgtggcctgaagcctccagcgtccacacgaaaccagatttgcctgaaaatggctcggccaagttcaagtatggcagattttcgaaagttttttgcaaaagcaaagcacatagtcatcatctcaggagctggtgttagtgcagaaagtggtgttccgaccttcagaggagctggaggttattggagaaaatggcaagcccaggacctggcgactcccctggcctttgcccacaacccgtcccgggtgtgggagttctaccactaccggcgggaggtcatggggagcaaggagcccaacgccgggcaccgcgccatagccgagtgtgagacccggctgggcaagcagggccggcgagtcgtggtcatcacccagaacatcgatgagctgcaccgcaaggctggcaccaagaaccttctggagatccatggtagcttatttaaaactcgatgtacctcttgtggagttgtggctgagaattacaagagtccaatttgtccagctttatcaggaaaaggtgctccagaacctggaactcaagatgccagcatcccagttgagaaacttccccggtgtgaagaggcaggctgcgggggcttgctgcgacctcacgtcgtgtggtttggagaaaacctggatcctgccattctggaggaggttgacagagagctcgcccactgtgatttatgtctagtggtgggcacttcctctgtggtgtacccagcagccatgtttgccccccaggtggctgccaggggcgtgccagtggctgaatttaacacggagaccaccccagctacgaacagattcaggtttcatttccagggaccctgtggaacgactcttcctgaagcccttgcctgtcatgaaaatgaaactgtttcttaagtgtcctggggaagaaagaaattacagtatatctaagaactaggccacacgcagaggagaaatggtcttatgggtggtgagctgagtactgaacaatctaaaaatagcctctgattccctcgctggaatccaacctgttgataagtgatgggggtttagaagtagcaaagagcacccacattcaaaagtcacagaactggaaagttaattcatattatttggtttgaactgaaacgtgaggtatctttgatgtgtatggttggttattgggagggaaaaattttgtaaattagattgtctaaaaaaaatagttattctgattatatttttgttatctgggcaaagtagaagtcaaggggtaaaaaccctactattctgatttttgcacaagttttagtggaaaataaaatcacactctacagtaggt

SEQ ID NO: 28218 - DNA, 2339 bp, Homo sapiens
  source 1..2339: mol_type = unassigned DNA
attcgggggcgcgagctgccccagtaaatggaaatgttttctaacatataaaaacctacagaagaagaaaataattttctggatcaaattagaagtctgtattatattgatgtctccagattcaaatatattagaaagcagccgtggagacaaccatcttcattttgggagaaataactaaagcccgcctcaagcattagaactacagacaaaccctgatgcgacctctccagattgtcccaagtcgattgatttcccagctatattgtggcctgaagcctccagcgtccacacgaaaccagatttgcctgaaaatggctcggccaagttcaagtatggcagattttcgaaagttttttgcaaaagcaaagcacatagtcatcatctcaggagctggtgttagtgcagaaagtggtgttccgaccttcagaggagctggaggttattggagaaaatggcaagcccaggacctggcgactcccctggcctttgcccacaacccgtcccgggtgtgggagttctaccactaccggcgggaggtcatggggagcaaggagcccaacgccgggcaccgcgccatagccgagtgtgagacccggctgggcaagcagggccggcgagtcgtggtcatcacccagaacatcgatgagctgcaccgcaaggctggcaccaagaaccttctggagatccatggtagcttatttaaaactcgatgtacctcttgtggagttgtggctgagaattacaagagtccaatttgtccagctttatcaggaaaaggtgctccagaacctggaactcaagatgccagcatcccagttgagaaacttccccggtgtgaagaggcaggctgcgggggcttgctgcgacctcacgtcgtgtggtttggagaaaacctggatcctgccattctggaggaggttgacagagagctcgcccactgtgatttatgtctagtggtgggcacttcctctgtggtgtacccagcagccatgtttgccccccaggtggctgccaggggcgtgccagtggctgaatttaacacggagaccaccccagctacgaacagattcagtcatttgatctccatctcatctctaattattataaagaattaaaacaagtcatcattgtagaaaagcaagaaaatgcagatagagaaaaagaagaaaataaaactggagtatttccacaacccaagtttagagttggcccccacctcccatgccatggactgagcagcaggggcccagcatcccttggatatggtggctgtgtcttcatgtgaaagaaactgaacttggtggtttttcctgccagttcaggagagattcttggcatgtaatatatatcactgctcaagtcaagcctcctaaaaccacagacctgtttcagctgctacttcagccaaaattcttcagcttcatattgtcttgaaaacctatgattgtctctaacaaacaggctacttgctagttagaaattcttatcaatttggcaagctacttatcaaccagactgaccacaagaactgtcatctcatcaatgaaggagtaactgatcaatgaagccagcaatgcttttttcttggcatcatcaaagctgacatttagaagagatgctggtgatagtcatctcatcctactcaatttttcaaaggcagaaaccaaccctggagcaattgagaggactgtttaaacacagagcttaacaatggcagaattgtatatctcgtgcttaacagattttggttgaactttaccctaggtcaggggtcagcaaactactgcctgtgggccaaatttgcccaccacctgtatctgtaaataaggtttcattggaacacagctgtggccatatgtttgtatattgtgtgtggctgcttttgcattaggatgacagaggtgaatagttgcaacagagactggctggtctgcaaagcctaaaatatgtcctgtgtggccctttacagaaaaagttttctaacccctgctctaggttacggagaaaaaaaaaatggaataatgttctctgctacttttaacctgattttctttgttacctaaataggcagctagaatgctgcctatattttaataaggatttggatctcacaagacaccttaggccttacacaagttgttcagattctttgccccagttctaatctagtgacaaaggcatagaattctcctcccacaggaatgtatttctattttcaaggtgttaattagttccagttttggttttgtcgttttccccatgtccgatgcttatattggatgatttctgataaaccctgactattccaataaaccctaggcatttttgaatttaaa

SEQ ID NO: 28219 - DNA, 1025 bp, Homo sapiens
  source 1..1025: mol_type = unassigned DNA
attcgggggcgcgagctgccccagtaaatggaaatgttttctaacatataaaaacctacagaagaagaaaataattttctggatcaaattagaagtctgtattatattgatgtctccagattcaaatatattagaaagcagccgtggagacaaccatcttcattttgggagaaataactaaagcccgcctcaagcattagaactacagacaaaccctgatgcgacctctccagattgtcccaagtcgattgatttcccagctatattgtggcctgaagcctccagcgtccacacgaaaccagatttgcctgaaaatggctcggccaagttcaagacctggcgactcccctggcctttgcccacaacccgtcccgggtgtgggagttctaccactaccggcgggaggtcatggggagcaaggagcccaacgccgggcaccgcgccatagccgagtgtgagacccggctgggcaagcagggccggcgagtcgtggtcatcacccagaacatcgatgagctgcaccgcaaggctggcaccaagaaccttctggagatccatggtagcttatttaaaactcgatgtacctcttgtggagttgtggctgagaattacaagagtccaatttgtccagctttatcaggaaaaggtgctccagaacctggaactcaagatgccagcatcccagttgagaaacttccccggtgtgaagaggcaggctgcgggggcttgctgcgacctcacgtcgtgtggtttggagaaaacctggatcctgccattctggaggaggttgacagagagctcgcccactgtgatttatgtctagtggtgggcacttcctctgtggtgtacccagcagccatgtttgccccccaggtggctgccaggggcgtgccagtggctgaatttaacacggagaccaccccagctacgaacagattcaggtttcatttccagggaccctgtggaacgactcttcctgaagcccttgcctgtcatgaaaatgaaactgtttcttaagtgtcctg

SEQ ID NO: 28220 - DNA, 1713 bp, Homo sapiens
  source 1..1713: mol_type = unassigned DNA
gcggaagcggaagagcaggtctccaggggagcgatggcagccgggggtctgagccgctccgagcgcaaagcggcggagcgggtccggaggttgcgggaggagcagcagagggagcgcctccgccaggtgtcgcgcatcctgaggaaggcggcggcggagcgcagcgccgaggagggccggctgctggccgagagcgcggacctggtaacggagctgcagggccggagccggcggcgcgagggcctgaagcggcggcaggaggaggtgtgcgacgacccggaggagctgcgggggaaggtccgggagctggccagcgccgtccggaacgccaaatacttggtcgtctacacaggcgcgggaatcagcacggcagcgtctatcccagactaccggggccctaatggagtgtggacactgcttcagaaagggagaagcgttagtgctgccgacctgagcgaggccgagccaaccctcacccacatgagcatcacccgtctgcatgagcagaagctggtgcagcatgtggtgtctcagaactgtgacgggctccacctgaggagtgggctgccgcgcacggccatctccgagctccacgggaacatgtacattgaagtctgtacctcctgcgttcccaacagggagtacgtgcgggtgttcgatgtgacggagcgcactgccctccacagacaccagacaggccggacctgccacaagtgtgggacccagctgcgggacaccattgtgcactttggggagagggggacgttggggcagcctttgaactgggaagcggcgaccgaggctgccagcagagcagacaccatcctgtgtctagggtccagcctgaaggttctaaagaagtacccacgcctctggtgcatgaccaagccccctagccggcggccgaagctttacatcgtgaacctgcagtggaccccgaaggatgactgggctgccctgaagctacatgggaagtgtgatgacgtcatgcggctcctcatggccgagctgggcttggagatccccgcctatagcaggtggcaggatcccattttctcactggcgactcccctgcgtgctggtgaagaaggcagccacagtcggaagtcgctgtgcagaagcagagaggaggccccgcctggggaccggggtgcaccgcttagctcggcccccatcctagggggctggtttggcaggggctgcacaaaacgcacaaaaaggaagaaagtgacgtaatcacgtgctcgatgaagaacagttggcactttgcagatggccagtgtcacggtgaaggctgggttgcccccacgggtctagggagaacgaactctttggggatgacattttcaccgtgacatttttagccatttgtccttgaggaagccccttgcactgctgcggttgtaccctgatacggcctggccatcgaggacacctgcccatccggcctctgtgtcaagaggtggcagccgcacctttctgtgagaacggaactcgggttatttcagccccggcctgcagagtggaagcgcccagcggcctttcctcgctcaccaggccagtctcagggcctcaccgtatttctactactacttaatgaaaaagtgtgaactttatagaatcctctctgtactggatgtgcggcagaggggtggctccgagcctcggctctatgcagacctttttatttctattaaacgtttctgcactggc

SEQ ID NO: 28221 - DNA, 1883 bp, Homo sapiens
  source 1..1883: mol_type = unassigned DNA
ctgccgtgtgaggcggaagcggaagagcaggtctccaggggagcgatggcagccgggggtctgagccgctccgagcgcaaagcggcggagcgggtccggaggttgcgggaggagcagcagagggagcgcctccgccaggtacgccgccgccgctccccggcccggccatgcccggcccgcgccgccgctcaccgtccgcctgcccgcaggtgtcgcgcatcctgaggaaggcggcggcggagcgcagcgccgaggagggccggctgctggccgagagcgcggacctggtaacggagctgcagggccggagccggcggcgcgagggcctgaagcggcggcaggaggaggtgtgcgacgacccggaggagctgcgggggaaggtccgggagctggccagcgccgtccggaacgccaaatacttggtcgtctacacaggcgcgggaatcagcacggcagcgtctatcccagactaccggggccctaatggagtgtggacactgcttcagaaagggagaagcgttagtgctgccgacctgagcgaggccgagccaaccctcacccacatgagcatcacccgtctgcatgagcagaagctggtgcagcatgtggtgtctcagaactgtgacgggctccacctgaggagtgggctgccgcgcacggccatctccgagctccacgggaacatgtacattgaagtctgtacctcctgcgttcccaacagggagtacgtgcgggtgttcgatgtgacggagcgcactgccctccacagacaccagacaggccggacctgccacaagtgtgggacccagctgcgggacaccattgtgcactttggggagagggggacgttggggcagcctttgaactgggaagcggcgaccgaggctgccagcagagcagacaccatcctgtgtctagggtccagcctgaaggttctaaagaagtacccacgcctctggtgcatgaccaagccccctagccggcggccgaagctttacatcgtgaacctgcagtggaccccgaaggatgactgggctgccctgaagctacatgggaagtgtgatgacgtcatgcggctcctcatggccgagctgggcttggagatccccgcctatagcagggtcttataggggaaatcaataacttcttttaatcaaagggttcaagaaattaaggatcccttcaccttctgggcctggcacttcttgtggcaggatcccattttctcactggcgactcccctgcgtgctggtgaagaaggcagccacagtcggaagtcgctgtgcagaagcagagaggaggccccgcctggggaccggggtgcaccgcttagctcggcccccatcctagggggctggtttggcaggggctgcacaaaacgcacaaaaaggaagaaagtgacgtaatcacgtgctcgatgaagaacagttggcactttgcagatggccagtgtcacggtgaaggctgggttgcccccacgggtctagggagaacgaactctttggggatgacattttcaccgtgacatttttagccatttgtccttgaggaagccccttgcactgctgcggttgtaccctgatacggcctggccatcgaggacacctgcccatccggcctctgtgtcaagaggtggcagccgcacctttctgtgagaacggaactcgggttatttcagccccggcctgcagagtggaagcgcccagcggcctttcctcgctcaccaggccagtctcagggcctcaccgtatttctactactacttaatgaaaaagtgtgaactttatagaatcctctctgtactggatgtgcggcagaggggtggctccgagcctcggctctatgcagacctttttatttctattaaacgtttctgcactggc

SEQ ID NO: 28222 - DNA, 3997 bp, Homo sapiens
  source 1..3997: mol_type = unassigned DNA
tagcagcatccaccgggcgggaggtcggaggcagcaaggccttaaaggctactgagtgcgccggccgttccgtgtccagaacctcccctactcctccgccttctcttccttggccgcccaccgccaagttccgactccggttttcgcctttgcaaagcctaaggaggaggttaggaacagccgcgcccccctccctgcggccgccgccccctgcctctcggctctgctccctgccgcgtgcgcctgggccgtgcgccccggcaggccccagccatgtcgatgctgccgtcgtttggctttacgcaggagcaagtggcgtgcgtgtgcgaggttctgcagcaaggcggaaacctggagcgcctgggcaggttcctgtggtcactgcccgcctgcgaccacctgcacaagaacgagagcgtactcaaggccaaggcggtggtcgccttccaccgcggcaacttccgtgagctctacaagatcctggagagccaccagttctcgcctcacaaccaccccaaactgcagcaactgtggctgaaggcgcattacgtggaggccgagaagctgcgcggccgacccctgggcgccgtgggcaaatatcgggtgcgccgaaaatttccactgccgcgcaccatctgggacggcgaggagaccagctactgcttcaaggagaagtcgaggggtgtcctgcgggagtggtacgcgcacaatccctacccatcgccgcgtgagaagcgggagctggccgaggccaccggcctcaccaccacccaggtcagcaactggtttaagaaccggaggcaaagagaccgggccgcggaggccaaggaaagggagaacaccgaaaacaataactcctcctccaacaagcagaaccaactctctcctctggaagggggcaagccgctcatgtccagctcagaagaggaattctcacctccccaaagtccagaccagaactcggtccttctgctgcagggcaatatgggccacgccaggagctcaaactattctctcccgggcttaacagcctcgcagcccagtcacggcctgcagacccaccagcatcagctccaagactctctgctcggccccctcacctccagtctggtggacttggggtcctaagtggggagggactggggcctcgaagggattcctggagcagcaaccactgcagcgactagggacacttgtaaatagaaatcaggaacatttttgcagcttgtttctggagttgtttgcgcataaaggaatggtggactttcacaaatatctttttaaaaatcaaaaccaacagcgatctcaagcttaatctcctcttctctccaactctttccacttttgcattttccttcccaatgcagagatcagggaaaaaaaaaaaaaaaaacccaaacaaacaaaagcacccaggcacccagtctgagttctgggcaactgatacgcctgtttcagcagcctttcttttttttcaatgaatgggaattgcaaatcaactggattttcattatttccttttaatttatatatggagaaatgtgaagagggaaaggaaatggaaagagaaagagaaagggagataaaaatagtgaaaataagagcctccaggctcagaagaactgattacattcttaaggtgaacaggaaaaatacaatctataactttctttgatgaggaaaaattaagtttacatttttcatatttagtgttaaacaatttaatgtagattaaaataaaagaccagtattaggaggaaaaaacaagtgcctaaatgtcttaatgctctctatgtgagacagaaatagacgtgaccattagtaatgcaactatttttgtcaaatttagtgggattttttggttgttgtttgttttcttgggttttttttttttaaatgacaaactctaaaaatgtaccaatgtgaaaaaacactttcctgaatgccattactcatgccctcaaagctttcatatctgtagcctactcctgtaaagggtttctcctgtttctagtttctagtttgcaaaggtatgccaacgaatctggcaacctggtatttgttactaaaacagcatgtgttttcaggtttcttttctattgtacctaaagcagtctaaattaaaacttagtagaacaccaggagtatgattctgtttctgaaaggtgagtggtgtattgctgtcattgggccctatttttttttttaaatatatttttctttcttacttaatggtggctgtgaattgcagggtactttgaaggccatcatctgaaccaagagtagtaactagattaattatatgacagaaagagtgaatttagccttggggtatttattaacttctattatttagatatgcaattttgtttaccactatctcttcacagcattcatatgttaactaagctcttttgtgttaacaagtttatgacaagactgtgaaagtaaaaataatttatctgcttgaagacaaaaaagggaaggagaacaaggatagaaacattgtgaattaatttgtacaaatagaaagcagaccagcaggacaggagctcttttgcagtgctgccggatggtgtctagaaaaatcccagtaatcatgtaggctccatattatttttgcctggggcaaaatgatgtatcttctgtatttagcttttaaaattagtgaaacaaatggcattatttattaaaattctactcaggataacaggattggcttgcttgtgctttgtaaaatattgttccccagggagaatctatttattttctgacatgacagtttcataattttgattttttcccatctataattgtcaccattaatatattatttctttcttactctttcctatttctgttctggtctagaaaactgaggtgtgcttggggaaatcaaggccttattttttaaaactgtcaaatagctttgagttccagggagaaatggtcactgtacttaactgtacacacttttacttataaagtcgtttttccccctcagtgatggacagatgtgcacacagccactcagagaccatcatttggtttgggagctcagggtcccaatctcccttgttagtgttttggatcattaagtcggtgtttatttaagtcactagggtgtttattctccctgtcttgggccacggagaaatgccaccctctgcaggaggggctctcacagggaatctcctcacattcttcacattcactccccaaaacaaacaccctgcacaaagatagctttcaatgaccctgacaggcttcaaaggacgctgcggaaatctctctggaaaataggaagggccaattactttaatttcttacatgccgtctcttcctactccggtgactaccctccactctcccagctccgcctgggataattttaggctcgtggaagttgtgtctcgcagggcgccccggcccacttcctgctcccttagttggtgaatcttggaaatgtctgcagatccggcgaggagcaagagcgctggtcctgtaaaagcccccgtgattactgcttgtaaacttgttaaaaggacaattttctgtcacagtcataaactctttgtaaaacccctggcactaaatccagagcgcgcatattccagatgtgtttaataagaaattgcacaatgtgcctccttccgccatcctcggctcagtctgggtaaaaggggcgagcaggaggaggcgagaaagctggatattgctttgagtttttttggcaatcatttcagagagatcattaggggaaactaaccatatttttttcttccctcgaggaaatcttcgagaaccagctgttaagggacctccagtttaccttctgggcgtcgcagtttaactgaatctaaagccacttttcgtttctcctctacagatgtcataacggtagccaaaagtaatgaacaacggcttataaatagtttgtaggacgaaaccatacagcattgtgccaagtgaaatgaaaaaaaaaaaaaacactcga

SEQ ID NO: 28223 - DNA, 2205 bp, Homo sapiens
  source 1..2205: mol_type = unassigned DNA
acgggagggagaacgagtgagaagcgagcgagggaacggcgggcgggcgcggagcatgcggagcggcgccccgggcggcccccgggcttgggcgagggcttgggccaggcgcgcgggccgttggggttcggagcttcgtgggacccgcggccggcgcggggacgtacggcagtgactcggggctcaccgggggccagtgccgggccagggggccagccccgcccgcgtctcggcccggacggcccggcgaggaagctcccatgcgggaccgcgcggcccggtgagggcgcgcgcgggcgggcggggacgcagccggcaccatgtccatgctgcccaccttcggcttcacgcaggagcaagtggcgtgcgtgtgcgaggtgctgcagcagggcggcaacatcgagcggctgggccgcttcctgtggtcgctgcccgcctgcgagcaccttcacaagaatgaaagcgtgctcaaggccaaggccgtggtggccttccaccgcggcaacttccgcgagctctacaagatcctggagagccaccagttctcgccgcacaaccacgccaagctgcagcagctgtggctcaaggcacactacatcgaggcggagaagctgcgcggccgacccctgggcgccgtgggcaaataccgcgtgcgccgcaaattcccgctgccgcgctccatctgggacggcgaggagaccagctactgcttcaaggaaaagagtcgcagcgtgctgcgcgagtggtacgcgcacaacccctacccttcaccccgcgagaagcgtgagctggcggaggccacgggcctcaccaccacacaggtcagcaactggttcaagaaccggcggcagcgcgaccgggcggccgaggccaaggaaagggagaacaacgagaactccaattctaacagccacaacccgctgaatggcagcggcaagtcggtgttaggcagctcggaggatgagaagactccatcggggacgccagaccactcatcatccagccccgcactgctcctcagcccgccgccccctgggctgccgtccctgcacagcctgggccaccctccgggccccagcgcagtgccagtgccggtgccaggcggaggtggagcggacccactgcaacaccaccatggcctgcaggactccatcctcaaccccatgtcagccaacctcgtggacctgggctcctagaacccatttgccttgatgagcttgccttttgtgacttgacactggggacgtggagtggcggtgtccaggggcgccccgcccctgcggccccaccaggtactgaaagacccgcaggctgagcgggtagaacagccgggtagggcagatagctgtctatgttggttcttgtttgggatttattttcaacaagttacttttaggatccttttggggctggagactgagtcttgaaccacagaagggaataaattatacaccactgtcattctctctctccctctgtctcttccttttaccctctcttgtcttgccttttccccctttcctcttcctttcccttccttctcttttcttttttctgctttctgtctttctccctctccttgtattgctttccttctagatttctagcttgccaccgttcattctctccttctgtctctccctttctctctccttctctgtttctcctctcttctctcctgccagtctcttgtactctgtgtcctggtccctccgtatgtacccctgtctttctcctcctgactggtggtctatctgcccctacctctggccctcgctttaccggagtagggggtgggagagggaagaggagagaaaatacagggactttgaacctaggccatctcctgaggccttttccctcgcccatgtgggtcagtgggagctgcaggtgtcagcttttcgtctagtaacttaagtgagagagaaagggcagcgccacagaagcccctaaacgccgcctcgtcatacgcccctcctccttctctcttggcgaggccccgccacaccgcgctcttcctcccgggactgtgactacagcgctcccggctgagcgcgccccccgagccgccgacttgccgtctccccgtaatgccctcatgtgaatgttcttcgggaaatatttctgcttttattttataataaaattagaaatcataaatatataaatggttatatgccacaaggcccgcgggccgggagtgca

SEQ ID NO: 28224 - DNA, 2658 bp, Homo sapiens
  source 1..2658: mol_type = unassigned DNA
gaatcgctgaatcttgactcggcggtggttggctctccctctcctctctccctctccctctccctctctgtctcgggttctctctctgcgcgcgcgcaccgggccgctctcctacctccctctctatgtggctgcgcgggtgtgtgtgtgtgtggatgtgtgtggggtgtgggtgtcccttacgcccttcctcctctccctcctcctcctgctcccccctcctttccttctcctcctcccccctctcctctccctcctcctggtcctcatcgcccctctcctcctcttcctcccctctctcttcctctccctgaattttctcctctcctctcaggtcagtccatggtattccgctcccccctagacctctattcctcccacttcttgttgccaaacttcgccgattctcaccaccgctccatacttctggcgagtagcggcggcgggaacggtgcgggaggcggcggcggcgcgggaggcggcagcggcggcgggaacggtgcgggaggcggcggtgctggcggagcaggcggcggcggcggcggcggctccagggcccccccggaagagttgtccatgttccagctgcccaccctcaacttctcgccggagcaggtggccagcgtctgtgagacgctggaggagacgggcgacatcgagcggctgggccgcttcctctggtcgctgcccgtggcccccggggcgtgcgaggccatcaacaaacacgagtcgatcctgcgcgcgcgcgccgtggtcgccttccacacgggcaacttccgcgacctctaccacatccttgagaaccacaagttcaccaaggagtctcacggcaagctgcaggccatgtggctcgaggcgcactaccaggaggccgagaagctgcgcggccgcccactcggcccggtggacaagtaccgcgtgcgcaagaagttcccgctgccacgcaccatctgggacggcgagcagaagacgcattgcttcaaggagcggactcggagcctgttgcgggagtggtacctacaggacccctaccccaaccccagcaagaaacgcgaactggcgcaggccaccggcctcactcccacacaagtaggcaactggtttaagaaccggcggcagcgcgaccgcgccgcggcggccaagaacaggctccagcaccaggccattggaccgagcggcatgcgctcgctggccgagcccggctgccccacgcacggctcggcagagtcgccgtccacggcggccagcccgaccaccagcgtgtccagcctgacggagcgcgcagacaccggcacctccatcctctcggtaacctccagcgactcggaatgtgatgtatgatagccaaggccgccctcctccctctccttcccctcctcccccactccttcccctccgcctcctagccctcctcctcttcctcctcttccttctcctcctccatccccagaacaaaccgaaatcaggatacccaaccatacacacatacaagtccacacacactcccaccccagccaaaaatatataaaaaacaagaaaataacaaattaaccgcaaactatcaacaacccccaaccaccatctaccactacggccaccccaaaggaccccgacgccaacagacagtcaaacgctgatgttgcgggcagaaaacataaaagaggtgacaattgtatactttctaggacaagcacggcttctcctttcggttcccatggacccggcaccccacctgcatgacgatttatttgtatctgggaaaatattctctctagttaaaaatgatttaaagagtcgactatacaaaaatcaatcaccaccacgaggacaagagggcaaaagcaaaacagacaaaaagaaaaaaaatcgccgtctccgttccgaatttgttaaaaaaaaaaaaaaaaaaaaaaaaaaggacagggggaaaaaaaaaaaaaaagaactcctggagagggaaatagcaaatgtgtcttgccttttgttgctctctctctctttttttttctctcgctctctttctttctcttcttctctctgtttttaagtcaagtattggtcaaaaaaatgcaatcttctgttttttgttcagcagacaatcattttcttcgtaagcacctttttctctccactctgtcactgcctgtgtgggtactggttataaatgtggaaaaagaatagttatgactgtaacagatttttatttttatttcaaaattttatatgaattatgtatatcttaatgatcggtcattttcccagtttgtaatatatgtgtagaaattgcctgtatatgatattgctttttctcctctccctttctctttctctcctctccctctctctgtctttctccccgctcaactgtctcttttctttttggggttctcctcccactcggtgctcctggtgtcgacttggcagtcaaggagaggcatggtggcctgggttaggaagagggaccctgtcgctagcaaaagcggagagtgagattgtagtattcttatgcaaaagctatttccagtatttcttagcagcttcagaggtatctctcactccctgtagggcgcttttactgttatcttaaactgcgtgtttatctatatgtaaaaactttctaaagcaaatacagtattctccattttcttatcactccca

SEQ ID NO: 28225 - DNA, 6285 bp, Homo sapiens
  source 1..6285: mol_type = unassigned DNA
ggaaagaaagaggaaaagagtgcgagggagtgagggagggaggaaaataaacaacaaaaaatgtcctcttcctcccccaccgggcagatcgcaagtgcggcggacatcaagcaagagaatgggatggaaagcgcctcggaagggcaggaggcgcaccgagaagtggcggggggcgcggcggtagggctgagccccccggctccagccccttttcccctggagccgggggacgccgcgaccgctgccgccagggtgagcggagaggaaggggcagtggcggcggcggcggccggagcggcggcggatcaggtacaactccactcggaacttctgggcaggcaccaccacgccgccgccgccgccgcgcagaccccgctggccttctcgcccgaccacgtcgcctgcgtgtgcgaggcactgcagcaggggggcaacctggaccgcctggcccggttcctgtggtccctgccccagagcgacctgctacgtggcaacgagagcctgctgaaggcgcgggcgctcgtggccttccaccagggcatctaccccgagctctacagcatcctcgagagccacagcttcgagtcggccaaccacccgctgctgcagcagctctggtacaaggcgcgctacaccgaggccgagcgagcccgcggccggccgctgggagccgtagacaagtaccggctgcgcaggaaattccccctgccccgcaccatctgggacggcgaggagacggtgtattgtttcaaggagaagtcgcgcaacgcgctcaaggagctctacaagcagaatcgctacccttcgcccgccgagaagcggcacctggccaagatcaccggcctctccctcacccaggtcagcaactggttcaagaaccgccggcagcgcgacaggaacccctccgagacccagtccaaaagtgagtcagatggcaaccccagcactgaagatgaatccagcaagggacatgaggatttatctcctcacccactctccagttcatctgatggcatcaccaacctcagcctttccagtcatatggagccagtatatatgcaacaaattggaaatgctaagatatcattaagctcttctggagttctgttgaatggaagcttggtacctgcaagtacttcacctgtcttccttaatggaaattcttttattcagggacccagtggagttatccttaatggattaaatgtgggaaatacacaggcagtggcattgaacccaccaaaaatgtcatcaaacattgtgagcaatggtatatccatgactgacatactggggtctacttcccaggacgtgaaggaattcaaagtcctccagagttctgctaactcagcaaccaccacgtcctacagccccagtgtccctgtctcattcccaggcctgatacccagcactgaggtgaaaagagaaggcattcaaacagtggcttcccaagatggagggtctgtagtgacttttactacaccagtgcaaattaaccagtatggcattgtccagatccccaattccggagcaaacagccagttccttaatgggagcattggattctctccactgcagctgccccctgtgtcagtggcagcttcacaaggtaatatctcagtaagctcaagcacttcagatggaagcacatttacaagtgagtctaccacagtccagcaaggaaaggttttcttgagctctcttgctcccagtgcagtggtatacacggttcctaatacaggccagactataggatctgtgaaacaggaaggcttggaaaggagcctggtattttctcagttgatgcctgtcaatcagaatgcacaagtaaatgcaaacctgtcttctgaaaacatctcggggagtggcctgcatccactggcctcctcattagttaatgtatctccaactcacaatttttctctcagtccctctacactactaaatcccactgagctaaaccgcgacattgccgatagccaaccaatgtctgcaccggtggcaagcaaatctactgtgacatctgtcagcaacactaactatgcaactcttcagaactgctcccttattactggtcaagacctattgtcagtccctatgactcaggctgcccttggggaaatagttcctacagctgaagatcaggtaggtcacccctccccagcagtacatcaggattttgtccaagaacatcgtttggttctgcaatcggtagctaacatgaaagagaatttcttatcaaattctgagagcaaagcaacaagtagcttaatgatgctggactctaaatccaagtatgtcttagatggcatggttgatactgtctgtgaagacctggaaacagacaaaaaagagcttgccaagctccagactgtccagctggatgaagatatgcaagacttatgaactttatttcctcctcacctctttttggcatcagcggcaaatcttttcatgaagccccaaggacacaaaacattttcccatttaaaggaaaacactctagttttgcaagtatatgcatacaagagactttagattgatctgcatgaagatcacagttaagtatacaggagtagaactgcattattgcagcctttttgttcacttataaatttctcttttaaatagatggagacaaaggacaaggtgaaatgtatcaagtcaaagtgaatcatttagttgactctataattctaaggtcaaaatggaacttgatagttttttaaattaaaaaatgtatacacctaacatagaaaattaaagatagctgcagaccattagaaataatacaattgtttttgtttacttttactccatgggcattgaaaaggttaagaaacataaatggtacatatttttaaagttaagtagcatgcatatatatatgcacacacacctctttttcagcattttttgagaaagtcttgggtctcaaacacatttgtctcaacacatttccaaatgtgatttctaatagctcagtgtggctgagaaagtgcggaactccactaaaaactctgaaacttcagtataaatgtaaatatatcagttctataagcaggatttgagtaattacagtgaattttatttttaatgtatatgtttctcttcaggcgctatgaactgaaaaatatgttttcttactgtttaatttatttttattgtttgaacaggaagtgaacatagtcgtttccaacaaagttttactttttgtaggattttaaaaataatgatttttaccaggaatctattaaggtcaatattaataacactgaaacaggaaatctaactcccaatattggaattttggtactttttttcacatccttgttctttatttagcaactctgattcatttaaatatgttttttatagaattctatgtgcctttttacctcgtggcctttttattggtagtaaggtacagaagtgtcaacagaagcactgatggttcttttctactatctaacagggttaatttcaccacaaaattgctttaaatctgaagaacttaagtttcactaaataatatatatgacatttatcacacaaatggataaacaactaattattgttgatacttttcattacaaggaaaataagttataaataccatgtcaaattgattatacaggctatgaaaaccattttaaaggaaagaaaatatgtaaattctattgagcaaaattctgtcctgttgaaacttagttctaaaggttttgaatcagttgttacactctgacacatgactgttgtttgcactatattatcatgtcttctttaaaagtaaatatttttggtttctgtaagaagcttgtttaataatgttgtaagccgtggctatagttttatcaagactctgaacacaagatgtaacaatgcaaataaatttatgtagtgagtaaagttgctctctagtctctgaaaagcaaaaaaagtgagaaaataatttcttcagagataacttcaagttgttgaacataaaggtgttagatgttagcacatcttgctttttttttttttttgagatggagtctcgctctgttgcccaggctggagtgcagtggcacgatcttggctcactgcaagctctgcctcctgggttcacgccattctcctgcctcagcctcccgagtagctgggactacaggcacctgccaccatgcccggctaaatttttgtatttttagtagagacggggtttcaccgtgttagccaggatggtcttgatctcctgacctcgtgatctgcccgcctcggcctcccaaagtgctgggattataggcatgagccactgtgcctggccacatcttgcttttttttttatgatcagaacaaagggcccactctagttctctacatgtcaatcaatcaagcatgttgaataagggacatagaggatttaacttttgttatcataaatggaacttgcaggcatatatcaagaaccctatgaagaattcctctcccatcattttgataaagaactacatcatttttgatagaattggtgaatgttcctaaactgctgaagctacatgttttttgttttgttttacaaagtcaggtgtttgagagttcttttccactctactactactcatagagcttgttttttctttgggtgtgtgctgatcctgttactgagattaattacatggctctgcagtgtagtttacataaaaatgatgttttccacttgattgctgcagatatcaagagtttgttattttcaaatacccatccaacaagagagatggggaggtttttagttatatatgctatatatatatatataactggaaatgttttatatgttttccgaaaatacaataagcctctcttttattcagtgttcttcctcttttctcccttatgaaaaagaaaagatagcacaaaacttaagacttacctaggaaacccattcatattcccaccatgatgtaattataaccctacaattacttcaggtagctacacaatataccaggtaagaatcaatgcacagtataaagaacttattgttcttttctattctttcagttgaataagggccagttggtatgcagcccatgtatatgtgaatggagtaagataaaccccatgatctccttgcacagaattgcaaatgtcttttgccataccaagggccagactcagaacccttggagtcatgtggcagaatttccctcttacataaaccaatgcttgaaaatgctgcaaatgaccctctaatgatccctgaagatcaaaacaggggtaaatgactccctgcaaaacccaacccatgctgctggctgtgggatttttggtgtaagcctatctatgcactctatcagccagaatttggcatttagctcttagttaaatctagtaaaggacagtctattgtttaaagagaaggtgcatttgttcctcaatcaagcaagagcacctgtgttgtactgctttatatctcatgtatatttatagtaatgaaaagactttttaaattgtacacgtttcagtgcctttcttgtgttatgaaaggcaggtagatattatagccataggtaaaaatccatagttaaattgcacactgaccttaaatctctctgtgtatgcccttgtatcttgcatgttaaaagttggattattgggcatgtgtggcagcctgccctgctacatgctagacaagtgtgctttagtacatagccacaagttcttcattctttaaaatgttttgacagatcatctcataataaaaataattcaggaaaactatggggaaatagttacatttcacaaaagatattttaaactctttgtaaaacttagataatagagcctagcagttactttgtatctaattgatacattttatgttaatttaccaccatacattttattaatcaaaattgtatagcatgtgactcttttggctttcagagttctcaaaaatattattttgttgcatgtactgtatgtttagaggcaaccaattatatactcaatatggttttactgtgccttacacaaagagaaactctatacagaatgtatatcatggggtggggtaacagagtctttactgcactgttaggtgatggcacacagagcatgtcccagaacatttctgtgcttaattacccaaccaaagagatctgaagtatgtatgtcgtactgtaatgggggtttatgcctggacaattaagtgttttatttgttttctgaaatgatgtgaacttatttttctaaacactatgctaaataaactttatatttatacataccttgcattga

SEQ ID NO: 28226 - DNA, 2974 bp, Homo sapiens
  source 1..2974: mol_type = unassigned DNA
ggaagagagggagggaggaacttcccaaagttgcaaaacatggctaccttgcctgcggagccgagcgcggggccggcggctgggggggaggcggtggcggcggcggcggcgaccgaagaggaggaggaggaagcgcgccagctcttgcagactttgcaggcggccgagggtgaggcggcggcggcggccggggccggggcgggcgcagcggctgcgggagctgagggcccgggatccccgggcgtccccgggtcgccccccgaggccgcttccgaaccgcccacgggcctccgcttctcgcccgagcaggtggcgtgcgtctgcgaggcgctgctccaggcgggccacgccggccgcttgagccgcttcctgggcgcactgcccccggccgagcgcctacgtggcagcgacccggtgttgcgcgcgcgggccctggtggccttccagcggggcgagtacgccgagctctaccggctactcgagagccgccccttccccgccgcccaccacgccttcctgcaggacctctacctgcgcgcgcgctaccatgaggccgagcgggcccgcggccgcgcgcttggcgcagtggacaagtatcgactgcgcaagaagttcccgctgcccaagaccatctgggacggcgaggagacagtctactgcttcaaggagcgctcccgcgcagcgctcaaggcctgctaccgcggcaaccgctaccccacgccggacgagaagcgccgcctggccacactcaccggcctgtcgctcacgcaggtcagcaactggttcaagaaccggcgacagcgcgaccggaccggggccggaggcggcgcgccctgcaagagcgagtctgatgggaatcccacgactgaggacgagtccagccgaagtcctgaggacctggagagaggggcggccccagtgtccgccgaggccgctgcccagggctccatattcctggcagggaccggccctcccgcgccttgcccggcttcctcctccatcctggtgaacgggagcttcctggcagccagcggctccccagcagtgctcctcaacgggggccccgtcatcatcaacggcctggccctgggcgaggcctccagcctgggcccgctgctgctcactgggggcgggggtgcccctccaccgcagcccagccctcagggggccagcgagaccaagacctctctggtcctggaccctcagacaggggaggtgcggctggaggaggctcagtcggaggcccctgagaccaaaggggcccaggtggctgctccgggaccagcccttggagaggaggtcctggggcccctggcccaagtggtgcctggccccccgacggctgccacctttcctctgcccccggggccagtgcctgctgtggctgccccacaagtggtaccgctctccccacccccggggtatcccacgggcctgagccccacctccccactattgaacctgccccaggtagtacccacctcacaggtggtgaccctgccccaggctgtggggcccctgcagctgttggcagccgggccaggcagccctgtgaaggtggcagctgcagcaggccctgccaatgtgcacctcatcaactccggggtgggcgtgactgccctgcagctgccttcggccactgccccaggaaacttcctcctggccaaccctgtgtctggcagccccatcgtgacgggtgtggccctgcagcagggcaagatcatcctcaccgccaccttccccaccagcatgctcgtctcccaggtcctgccgccagcccccggcctggccctgccactgaagccagagacggccatctccgtgcctgagggaggcctcccggtggcccccagccctgctctcccagaggctcacgccctaggcaccctttctgcacagcagccaccccccgccgctgccaccacctccagcaccagcctgcccttctcccctgactcccctggcctcctgcccaacttcccggcgcccccaccagaggggctgatgttgtcacccgcggccgtgcctgtctggtcagcagggctggaactaagcgcaggaacagaggggctgctggaagcggaaaaggggctggggacacaggccccccacaccgtgctgaggctgccagaccccgaccctgaggggctgctcctgggggccaccgcagggggtgaggttgacgaggggttggaagctgaggccaaggttctgacccagctccagtcggtgcctgtggaggagcccttggaactgtgacccagtgtggccccgtggcctctcccgacattggtgctgaagacgcagggacaggaatgggaggggggagccccagaaatgcggttgctgaagaccccagtcaccacatccttctgcctgggtggcctctccaagccctggtggtgctgggggttgtatccccggccacctcctgtccaggtctccatccccctttggatgggaggcctctctgttacagccctccccatgctgtgccctgccatatacgtgggggactcagggtcctgactcaggggccctgccccctccacttggtactagctgtaagcggaacaccctgccccagggccggacttccagcccccagagccctctccctgtcactccctgaaacactattaatagctctgccgatagctggtgttgtcacaactgcctggaatccgaaggtggaggacaggcagccccgcgcccctgagactggagaccctccccagtgtggcatttcctgccaggggcggggggtggggcagctgtggggagacgggggtcttccttcaccagctcccctcgactcaagcccttgtcctcattatccggcccagaccaaagattccctcatccctgggggcagccctgccgctgtgtctcctttgtatcctaaatctttatttttctaggacatgttatgcctccattttcaattaaaataaagttatcggattacaccacc

SEQ ID NO: 28227 - DNA, 2787 bp, Homo sapiens
  source 1..2787: mol_type = unassigned DNA
gacactcgcatgtcttttcaacctccaggttctgcaaaatactgaagaaaagtccaggagctaacggcgggcgctgtcgagcacggggaggtgctgaaatagtcctggcgtgctgattcaagctttgattggcagagccacccggtgactgacagggggtctccatggcgcccgcgccgccaatccgcccaccccaatagcggagccagctcgcctgccggcgtgcctgagccgagccgagcccgaaccccaagccgcggagccagcacctcctccagtcggggtcgtccgctcccggccgttgagccaccgccgccacccggtagtgtgtcccgctgccccaatccgcctcatcaacaagcgcctggcacactcagccaggcccgcgggcatctgctgcgtgtcccgctccgggctcagtgccctcgccgccgccggcactgcctcgatgttccagctgcccatcttgaatttcagcccccagcaagtggccggggtatgtgagaccctggaagagagcggcgatgtggagcgcctgggtcgcttcctctggtcgctgcccgtggcccctgcggcctgcgaggccctcaacaagaatgagtcggtgctacgcgcacgagccatcgtggcctttcacggtggcaactaccgcgagctctatcatatcctggaaaaccacaagttcaccaaggagtcgcacgccaagctgcaggcgctgtggcttgaagcacactaccaggaggctgagaagctgcgtggaagacccctgggacctgtggacaagtaccgagtaaggaagaagttcccgctgccgcgcaccatttgggacggcgaacagaagacacactgcttcaaggagcgcacgcggcacctgctacgcgagtggtacctgcaggatccataccctaaccccagcaaaaaacgtgagctcgcccaggcaaccggactgacccctacgcaggtgggcaactggttcaaaaaccgccgacaaagggaccgagcggctgcagccaagaacagactccagcagcaggtcctgtcacagggttccgggcgggcactacgggcggagggcgacggcacgccagaggtgctgggcgtcgccaccagcccggccgccagtctatccagcaaggcggccacttcagccatctccatcacgtccagcgacagcgagtgcgacatctgagttgcccatccaggatgctcagaagcagattccagtgtaaaaacgagaaaaacaaaatgaaagaggggaagaagatgagagacctgcaaatccagcgccacagaagccaggtgaccagggacccgcgggctcgggttgccgtttcccgccccaccccgcggccggcctggcttcactggcgccctttggccgcgaccacgggaaccagcggtgaggcctgacccagcaccacgttcttcttgctttgctttttcctaaggattttgctgcaaagtctccttcggaacccgaactgcaagctgagcgcctgcccagattctcccatgggtatttcacgtcgaaaggacgctgttacatatgtataactttcgctttaaagtttttttttaacaaaacatatatatgctgtttatttacttatttaagagaccgccatggtaggtttctctgtagcttggggaacttgctgtttctaaacatgcaggctggtggtgatgggttctgtgtggagaagccaaacaataaaacaacctagtgggcaaccttcttaattaagggagctgctctcagattccttttcttcttattattattaatatcattcccttcaccaggcatgcagggacccttgagcaaatggtctccggaaggtcttacctatatatcttttgccttctttggtgcttcctggtatatgttttaaacaacctatggtaggtctataaccacctcccacgtcaaattacacgtatgtgcatatatgtatgtacctatacaaacatatgtatgtacctatacaaacatatgtatgtatgcatacacgtgatatatttaaggctagaaattggcaacatgtgagcgtcctctctaaggcaagtccccgcatccccagcacaggtaattatggcttgtccacttgacactcgtttacatgaagtgtcaacagctttcaggagcaatttaggaagccaaactatgggactcaataagtgagtcctattttctaaaaatgcaaaactatcctgactcaggctctgcagcaagaaaggctttctgtctccttcaaggccccctccaatacaaaagcagcaggcacccatgatcatgctagagtgagcatatactgcatttaggattgagctattattaaaataagacaaaagatgatagaagaggttgtaaataattagactaacatcttcttgctgcagaatttggttttaatcaaatgaatggtttttaacaagagggatactgagatgggggaaaggatgtaatcatgtcacatactgagggtaaaacaaggctgtagaaataactggcattttaaaaacctaatctccgaattaagcatagaacaagtcatcaagggcctcattgtcctggtaatggcctcgattaaaacataaaatatttttagcatttaatttttcctcgtgcacatgcatgtatgcacctatacatgaacaaatgcatgcatatacaacgcaaaaacatctaccatctttgcactaagaaaataaatgctagccagagtctctaattttgttcctagtgaaacagattgcatattataaaatttgacattgatctttaaa

SEQ ID NO: 28228 - DNA, 896 bp, Homo sapiens
  source 1..896: mol_type = unassigned DNA
ccgtgggggagtcgtgcgcaggcgcggacagcgctgcttccgcggcggttggggtggtggggccccgggcggcgttgaccatgacccagcagggcgcggcgctgcagaactacaacaacgagctggtcaagtgcatagaggagctgtgccagaagcgggaggagctgtgccggcagatccaggaggaggaggacgagaagcagcggctgcagaatgaggtgaggcagctgacagagaagctggcccgcgtcaacgagaacctggcacgcaagattgcctctcgcaacgagttcgaccggaccatcgcggagacggaggccgcctacctcaagatcctggagagctcccagactttgctcagcgttctcaagagggaagctgggaacctgaccaaggctacagccccagaccagaaaagtagcggcggcagggacagctgaccagaccacgggcagggcctgcctccgtgtgcccctcagctcagccccagcaagtgtgtgctcagagcatctttgttcttcacggcagcagctaccttccctcactgtctcaggtgccgagaggggcaggtgccagcctccactggcatcagtgacaagcccagggcacagcccacccgggggtcctcgcttcatgctcacacaggctatggggatggtgggctccaggtcagctctgcaaggggcttgtctctgtggcacccacactcctgccctgccagggaggctctggttgtctgagcaccatgggggccccctcaccttgtccctcctcagccagcagaggcccagggcaagggacaggaggacaggggttctccttcaccacagaacccaaacctcaggtctcacccctgtggcctgtgattatgaataaagattatctttgtaaagatc

SEQ ID NO: 28229 - DNA, 730 bp, Homo sapiens
  source 1..730: mol_type = unassigned DNA
aaacattgactgcctcaaggtctcaagcaccagtcttcaccgcggaaagcatgttgtggctgttccaatcgctcctgtttgtcttctgctttggcccaggacaactgaggaacatacaagttaccaatcacagtcagctatttcagaatatgacctgtgagctccatctgacttgctctgtggaggatgcagatgacaatgtctcattcagatgggaggccttgggaaacacactttcaagtcagccaaacctcactgtctcctgggaccccaggatttccagtgaacaggactacacctgcatagcagagaatgctgtcagtaatttatccttctctgtctctgcccagaagctttgcgaagatgttaaaattcaatatacagataccaaaatgattctgtttatggtttctgggatatgcatagtcttcggtttcatcatactgctgttacttgttttgaggaaaagaagagattccctatctttgtctactcagcgaacacagggccccgcagagtccgcaaggaacctagagtatgtttcagtgtctccaacgaacaacactgtgtatgcttcagtcactcattcaaacagggaaacagaaatctggacacctagagaaaatgatactatcacaatttactccacaattaatcattccaaagagagtaaacccactttttccagggcaactgcccttgacaatgtcgtgtaagttgctgaaaggcc

SEQ ID NO: 28230 - DNA, 2712 bp, Homo sapiens
  source 1..2712: mol_type = unassigned DNA
cagaagggcaaaaacattgactgcctcaaggtctcaagcaccagtcttcaccgcggaaagcatgttgtggctgttccaatcgctcctgtttgtcttctgctttggcccagggaatgtagtttcacaaagcagcttaaccccattgatggtgaacgggattctgggggagtcagtaactcttcccctggagtttcctgcaggagagaaggtcaacttcatcacttggcttttcaatgaaacatctcttgccttcatagtaccccatgaaaccaaaagtccagaaatccacgtgactaatccgaaacagggaaagcgactgaacttcacccagtcctactccctgcaactcagcaacctgaagatggaagacacaggctcttacagagcccagatatccacaaagacctctgcaaagctgtccagttacactctgaggatattaagacaactgaggaacatacaagttaccaatcacagtcagctatttcagaatatgacctgtgagctccatctgacttgctctgtggaggatgcagatgacaatgtctcattcagatgggaggccttgggaaacacactttcaagtcagccaaacctcactgtctcctgggaccccaggatttccagtgaacaggactacacctgcatagcagagaatgctgtcagtaatttatccttctctgtctctgcccagaagctttgcgaagatgttaaaattcaatatacagataccaaaatgattctgtttatggtttctgggatatgcatagtcttcggtttcatcatactgctgttacttgttttgaggaaaagaagagattccctatctttgtctactcagcgaacacagggccccgcagagtccgcaaggaacctagagtatgtttcagtgtctccaacgaacaacactgtgtatgcttcagtcactcattcaaacagggaaacagaaatctggacacctagagaaaatgatactatcacaatttactccacaattaatcattccaaagagagtaaacccactttttccagggcaactgcccttgacaatgtcgtgtaagttgctgaaaggcctcagaggaattcgggaatgacacgtcttctgatcccatgagacagaacaaagaacaggaagcttggttcctgttgttcctggcaacagaatttgaatatctaggataggatgatcacctccagtccttcggacttaaacctgcctacctgagtcaaacacctaaggataacatcatttccagcatgtggttcaaataatattttccaatccacttcaggccaaaacatgctaaagataacacaccagcacattgactctctctttgataactaagcaaatggaattatggttgacagagagtttatgatccagaagacaaccacttctctccttttagaaagcagcaggattgacttattgagaaataatgcagtgtgttggttacatgtgtagtctctggagttggatgggcccatcctgatacaagttgagcatcccttgtctgaaatgcttgggattagaaatgtttcagatttcaattttttttcagattttggaatatttgcattatatttagcggttgagtatccaaatccaaaaatccaaaattcaaaatgctccaataagcatttcccttgagtttcattgatgtcgatgcagtgctcaaaatctcagattttggagcattttggatattggatttttggatttgggatgctcaacttgtacaatgtttattagacacatctcctgggacatactgcctaaccttttggagccttagtctcccagactgaaaaaggaagaggatggtattacatcagctccattgtttgagccaagaatctaagtcatccctgactccagtgtctttgtcaccaggccctttggactctacctcagaaatatttcttggaccttccacttctcctccaactccttgaccaccatcctgtatccaaccatcaccacctctaacctgaatcctaccttaagatcagaacagttgtcctcacttttgttcttgtccctctccaacccactctccacaagatggccagagtaatgtttttaatataaattggatccttcagtttcctgcttaaaaccctgcaggtttcccaatgcactcagaaagaaatccagtttccatggccctggatggtctggcccacctccagcctcagctagcattacccttctgacactctctatgtagcctccctgatcttctttcagctcctctattaaaggaaaagttctttatgttaattatttacatcttcctgcaggcccttcctctgcctgctggggtcctcctattctttaggtttaattttaaatatgtcacctcctaagagaaaccttcccagaccactctttctaaaatgaatcttctaggctgggcatggtggctcacacctgtaatccctgtactttgggaggccaaggggggagatcacttgaggtcaggagttcaagaccagcctggccaacttggtgaaaccccgtctttactaaaaatacaaaaaaattagccaggcgtggtggtgcacccctaaaatcccagctacttgagagactgaggcaggagaatcgcttgaacccaggaggtggaggttccagtgagccaaaatcatgccaatgtattccagtctgggtgacagagtgagactctgtctcaaaaaataaataaa

SEQ ID NO: 28231 - DNA, 2743 bp, Homo sapiens
  source 1..2743: mol_type = unassigned DNA
agtttatgacagaagggcaaaaacattgactgcctcaaggtctcaagcaccagtcttcaccgcggaaagcatgttgtggctgttccaatcgctcctgtttgtcttctgctttggcccagggaatgtagtttcacaaagcagcttaaccccattgatggtgaacgggattctgggggagtcagtaactcttcccctggagtttcctgcaggagagaaggtcaacttcatcacttggcttttcaatgaaacatctcttgccttcatagtaccccatgaaaccaaaagtccagaaatccacgtgactaatccgaaacagggaaagcgactgaacttcacccagtcctactccctgcaactcagcaacctgaagatggaagacacaggctcttacagagcccagatatccacaaagacctctgcaaagctgtccagttacactctgaggatattaagacaactgaggaacatacaagttaccaatcacagtcagctatttcagaatatgacctgtgagctccatctgacttgctctgtggaggatgcagatgacaatgtctcattcagatgggaggccttgggaaacacactttcaagtcagccaaacctcactgtctcctgggaccccaggatttccagtgaacaggactacacctgcatagcagagaatgctgtcagtaatttatccttctctgtctctgcccagaagctttgcgaagatgttaaaattcaatatacagataccaaaatgattctgtttatggtttctgggatatgcatagtcttcggtttcatcatactgctgttacttgttttgaggaaaagaagagattccctatctttgtctactcagcgaacacagggccccgagtccgcaaggaacctagagtatgtttcagtgtctccaacgaacaacactgtgtatgcttcagtcactcattcaaacagggaaacagaaatctggacacctagagaaaatgatactatcacaatttactccacaattaatcattccaaagagagtaaacccactttttccagggcaactgcccttgacaatgtcgtgtaagttgctgaaaggcctcagaggaattcgggaatgacacgtcttctgatcccatgagacagaacaaagaacaggaagcttggttcctgttgttcctggcaacagaatttgaatatctaggataggatgatcacctccagtccttcggacttaaacctgcctacctgagtcaaacacctaaggataacatcatttccagcatgtggttcaaataatattttccaatccacttcaggccaaaacatgctaaagataacacaccagcacattgactctctctttgataactaagcaaatggaattatggttgacagagagtttatgatccagaagacaaccacttctctccttttagaaagcagcaggattgacttattgagaaataatgcagtgtgttggttacatgtgtagtctctggagttggatgggcccatcctgatacaagttgagcatcccttgtctgaaatgcttgggattagaaatgtttcagatttcaattttttttcagattttggaatatttgcattatatttagcggttgagtatccaaatccaaaaatccaaaattcaaaatgctccaataagcatttcccttgagtttcattgatgtcgatgcagtgctcaaaatctcagattttggagcattttggatattggatttttggatttgggatgctcaacttgtacaatgtttattagacacatctcctgggacatactgcctaaccttttggagccttagtctcccagactgaaaaaggaagaggatggtattacatcagctccattgtttgagccaagaatctaagtcatccctgactccagtgtctttgtcaccaggccctttggactctacctcagaaatatttcttggaccttccacttctcctccaactccttgaccaccatcctgtatccaaccatcaccacctctaacctgaatcctaccttaagatcagaacagttgtcctcacttttgttcttgtccctctccaacccactctccacaagatggccagagtaatgtttttaatataaattggatccttcagtttcctgcttaaaaccctgcaggtttcccaatgcactcagaaagaaatccagtttccatggccctggatggtctggcccacctccagcctcagctagcattacccttctgacactctctatgtagcctccctgatcttctttcagctcctctattaaaggaaaagttctttatgttaattatttacatcttcctgcaggcccttcctctgcctgctggggtcctcctattctttaggtttaattttaaatatgtcacctcctaagagaaaccttcccagaccactctttctaaaatgaatcttctaggctgggcatggtggctcacacctgtaatccctgtactttgggaggccaaggggggagatcacttgaggtcaggagttcaagaccagcctggccaacttggtgaaaccccgtctttactaaaaatacaaaaaaattagccaggcgtggtggtgcacccctaaaatcccagctacttgagagactgaggcaggagaatcgcttgaacccaggaggtggaggttccagtgagccaaaatcatgccaatgtattccagtctgggtgacagagtgagactctgtctcaaaaaataaataaataaaataaaatgaaatagatcttat

SEQ ID NO: 28232 - DNA, 2559 bp, Homo sapiens
  source 1..2559: mol_type = unassigned DNA
cagagagcaatatggctggttccccaacatgcctcaccctcatctatatcctttggcagctcacagggtcagcagcctctggacccgtgaaagagctggtcggttccgttggtggggccgtgactttccccctgaagtccaaagtaaagcaagttgactctattgtctggaccttcaacacaacccctcttgtcaccatacagccagaagggggcactatcatagtgacccaaaatcgtaatagggagagagtagacttcccagatggaggctactccctgaagctcagcaaactgaagaagaatgactcagggatctactatgtggggatatacagctcatcactccagcagccctccacccaggagtacgtgctgcatgtctacgagcacctgtcaaagcctaaagtcaccatgggtctgcagagcaataagaatggcacctgtgtgaccaatctgacatgctgcatggaacatggggaagaggatgtgatttatacctggaaggccctggggcaagcagccaatgagtcccataatgggtccatcctccccatctcctggagatggggagaaagtgatatgaccttcatctgcgttgccaggaaccctgtcagcagaaacttctcaagccccatccttgccaggaagctctgtgaaggtgctgctgatgacccagattcctccatggtcctcctgtgtctcctgttggtgcccctcctgctcagtctctttgtactggggctatttctttggtttctgaagagagagagacaagaagagaacaatcctaaaggaagatccagcaaatacggtttactccactgtggaaataccgaaaaagatggaaaatccccactcactgctcacgatgccagacacaccaaggctatttgcctatgagaatgttatctagacagcagtgcactcccctaagtctctgctcaaaaaaaaaacaattctcggcccaaagaaaacaatcagaagaattcactgatttgactagaaacatcaaggaagaatgaagaacgttgacttttttccaggataaattatctctgatgcttctttagatttaagagttcataattccatccactgctgagaaatctcctcaaacccagaaggtttaatcacttcatcccaaaaatgggattgtgaatgtcagcaaaccataaaaaaagtgcttagaagtattcctataaaaatgtaaatgcaaggtcacacatattaatgacagcctgttgtattaatgatggctccaggtcagtgtctggagtttcattccatcccagggcttggatgtcaggattataccaagagtcttgctaccaggagggcaagaagaccaaaacagacagacaagtccagcagaagcagatgcacctgacaaaaatggatgtattaattggctctataaactatgtgcccagcactatgctgagcttacactaattggtcagacatgctgtctgccctcatgaaattggctccaaatgaatgaactactttcatgagcagttgtagcaggcctgaccacagattcccagagggccaggtgtggatccacaggacttgaaggtcaaagttcacaaagatgaagaatcagggtagctgaccatgtttggcagatactataatggagacacagaagtgtgcatggcccaaggacaaggacctccagccaggcttcatttatgcacttgtgctgcaaaagaaaagtctaggttttaaggctgtgccagaacccatcccaataaagagaccgagtctgaagtcacattgtaaatctagtgtaggagacttggagtcaggcagtgagactggtggggcacggggggcagtgggtacttgtaaacctttaaagatggttaattcattcaatagatatttattaagaacctatgcggcccggcatggtggctcacacctgtaatcccagcactttgggaggccaaggtgggtgggtcatctgaggtcaggagttcaagaccagcctggccaacatggtgaaaccccatctctactaaagatacaaaaatttgctgagcgtggtggtgtgcacctgtaatcccagctactcgagaggccaaggcatgagaatcgcttgaacctgggaggtggaggttgcagtgagctgagatggcaccactgcactccggcctaggcaacgagagcaaaactccaatacaaacaaacaaacaaacacctgtgctaggtcagtctggcacgtaagatgaacatccctaccaatacagagctcaccatctcttatacttaagtgaaaaacatggggaaggggaaaggggaatggctgcttttgatatgttccctgacacatatcttgaatggagacctccctaccaagtgatgaaagtgttgaaaaacttaataacaaatgcttgttgggcaagaatgggattgaggattatcttctctcagaaaggcattgtgaaggaattgagccagatctctctccctactgcaaaaccctattgtagtaaaaaagtcttctttactatcttaataaaacagatattgtgagattcacatacaaaaa

SEQ ID NO: 28233 - DNA, 2365 bp, Homo sapiens
  source 1..2365: mol_type = unassigned DNA
gcttcatttcagtggctgacttccagagagcaatatggctggttccccaacatgcctcaccctcatctatatcctttggcagctcacagagcacctgtcaaagcctaaagtcaccatgggtctgcagagcaataagaatggcacctgtgtgaccaatctgacatgctgcatggaacatggggaagaggatgtgatttatacctggaaggccctggggcaagcagccaatgagtcccataatgggtccatcctccccatctcctggagatggggagaaagtgatatgaccttcatctgcgttgccaggaaccctgtcagcagaaacttctcaagccccatccttgccaggaagctctgtgaaggtgctgctgatgacccagattcctccatggtcctcctgtgtctcctgttggtgcccctcctgctcagtctctttgtactggggctatttctttggtttctgaagagagagagacaagaagagtacattgaagagaagaagagagtggacatttgtcgggaaactcctaacatatgcccccattctggagagaacacagagtacgacacaatccctcacactaatagaacaatcctaaaggaagatccagcaaatacggtttactccactgtggaaataccgaaaaagatggaaaatccccactcactgctcacgatgccagacacaccaaggctatttgcctatgagaatgttatctagacagcagtgcactcccctaagtctctgctcaaaaaaaaaacaattctcggcccaaagaaaacaatcagaagaattcactgatttgactagaaacatcaaggaagaatgaagaacgttgacttttttccaggataaattatctctgatgcttctttagatttaagagttcataattccatccactgctgagaaatctcctcaaacccagaaggtttaatcacttcatcccaaaaatgggattgtgaatgtcagcaaaccataaaaaaagtgcttagaagtattcctataaaaatgtaaatgcaaggtcacacatattaatgacagcctgttgtattaatgatggctccaggtcagtgtctggagtttcattccatcccagggcttggatgtcaggattataccaagagtcttgctaccaggagggcaagaagaccaaaacagacagacaagtccagcagaagcagatgcacctgacaaaaatggatgtattaattggctctataaactatgtgcccagcactatgctgagcttacactaattggtcagacatgctgtctgccctcatgaaattggctccaaatgaatgaactactttcatgagcagttgtagcaggcctgaccacagattcccagagggccaggtgtggatccacaggacttgaaggtcaaagttcacaaagatgaagaatcagggtagctgaccatgtttggcagatactataatggagacacagaagtgtgcatggcccaaggacaaggacctccagccaggcttcatttatgcacttgtgctgcaaaagaaaagtctaggttttaaggctgtgccagaacccatcccaataaagagaccgagtctgaagtcacattgtaaatctagtgtaggagacttggagtcaggcagtgagactggtggggcacggggggcagtgggtacttgtaaacctttaaagatggttaattcattcaatagatatttattaagaacctatgcggcccggcatggtggctcacacctgtaatcccagcactttgggaggccaaggtgggtgggtcatctgaggtcaggagttcaagaccagcctggccaacatggtgaaaccccatctctactaaagatacaaaaatttgctgagcgtggtggtgtgcacctgtaatcccagctactcgagaggccaaggcatgagaatcgcttgaacctgggaggtggaggttgcagtgagctgagatggcaccactgcactccggcctaggcaacgagagcaaaactccaatacaaacaaacaaacaaacacctgtgctaggtcagtctggcacgtaagatgaacatccctaccaatacagagctcaccatctcttatacttaagtgaaaaacatggggaaggggaaaggggaatggctgcttttgatatgttccctgacacatatcttgaatggagacctccctaccaagtgatgaaagtgttgaaaaacttaataacaaatgcttgttgggcaagaatgggattgaggattatcttctctcagaaaggcattgtgaaggaattgagccagatctctctccctactgcaaaaccctattgtagtaaaaaagtcttctttactatcttaataaaacagatattgtgagattcacatacaaaaa

SEQ ID NO: 28234 - DNA, 2689 bp, Homo sapiens
  source 1..2689: mol_type = unassigned DNA
gtggcttcatttcagtggctgacttccagagagcaatatggctggttccccaacatgcctcaccctcatctatatcctttggcagctcacagggtcagcagcctctggacccgtgaaagagctggtcggttccgttggtggggccgtgactttccccctgaagtccaaagtaaagcaagttgactctattgtctggaccttcaacacaacccctcttgtcaccatacagccagaagggggcactatcatagtgacccaaaatcgtaatagggagagagtagacttcccagatggaggctactccctgaagctcagcaaactgaagaagaatgactcagggatctactatgtggggatatacagctcatcactccagcagccctccacccaggagtacgtgctgcatgtctacgagcacctgtcaaagcctaaagtcaccatgggtctgcagagcaataagaatggcacctgtgtgaccaatctgacatgctgcatggaacatggggaagaggatgtgatttatacctggaaggccctggggcaagcagccaatgagtcccataatgggtccatcctccccatctcctggagatggggagaaagtgatatgaccttcatctgcgttgccaggaaccctgtcagcagaaacttctcaagccccatccttgccaggaagctctgtgaaggtgctgctgatgacccagattcctccatggtcctcctgtgtctcctgttggtgcccctcctgctcagtctctttgtactggggctatttctttggtttctgaagagagagagacaagaagagtacattgaagagaagaagagagtggacatttgtcgggaaactcctaacatatgcccccattctggagagaacacagagtacgacacaatccctcacactaatagaacaatcctaaaggaagatccagcaaatacggtttactccactgtggaaataccgaaaaagatggaaaatccccactcactgctcacgatgccagacacaccaaggctatttgcctatgagaatgttatctagacagcagtgcactcccctaagtctctgctcaaaaaaaaaacaattctcggcccaaagaaaacaatcagaagaattcactgatttgactagaaacatcaaggaagaatgaagaacgttgacttttttccaggataaattatctctgatgcttctttagatttaagagttcataattccatccactgctgagaaatctcctcaaacccagaaggtttaatcacttcatcccaaaaatgggattgtgaatgtcagcaaaccataaaaaaagtgcttagaagtattcctataaaaatgtaaatgcaaggtcacacatattaatgacagcctgttgtattaatgatggctccaggtcagtgtctggagtttcattccatcccagggcttggatgtcaggattataccaagagtcttgctaccaggagggcaagaagaccaaaacagacagacaagtccagcagaagcagatgcacctgacaaaaatggatgtattaattggctctataaactatgtgcccagcactatgctgagcttacactaattggtcagacatgctgtctgccctcatgaaattggctccaaatgaatgaactactttcatgagcagttgtagcaggcctgaccacagattcccagagggccaggtgtggatccacaggacttgaaggtcaaagttcacaaagatgaagaatcagggtagctgaccatgtttggcagatactataatggagacacagaagtgtgcatggcccaaggacaaggacctccagccaggcttcatttatgcacttgtgctgcaaaagaaaagtctaggttttaaggctgtgccagaacccatcccaataaagagaccgagtctgaagtcacattgtaaatctagtgtaggagacttggagtcaggcagtgagactggtggggcacggggggcagtgggtacttgtaaacctttaaagatggttaattcattcaatagatatttattaagaacctatgcggcccggcatggtggctcacacctgtaatcccagcactttgggaggccaaggtgggtgggtcatctgaggtcaggagttcaagaccagcctggccaacatggtgaaaccccatctctactaaagatacaaaaatttgctgagcgtggtggtgtgcacctgtaatcccagctactcgagaggccaaggcatgagaatcgcttgaacctgggaggtggaggttgcagtgagctgagatggcaccactgcactccggcctaggcaacgagagcaaaactccaatacaaacaaacaaacaaacacctgtgctaggtcagtctggcacgtaagatgaacatccctaccaatacagagctcaccatctcttatacttaagtgaaaaacatggggaaggggaaaggggaatggctgcttttgatatgttccctgacacatatcttgaatggagacctccctaccaagtgatgaaagtgttgaaaaacttaataacaaatgcttgttgggcaagaatgggattgaggattatcttctctcagaaaggcattgtgaaggaattgagccagatctctctccctactgcaaaaccctattgtagtaaaaaagtcttctttactatcttaataaaacagatattgtgagattcacatacaaaaa

SEQ ID NO: 28235 - DNA, 1355 bp, Homo sapiens
  source 1..1355: mol_type = unassigned DNA
atacctaagagggaagtggcttcatttcagtggctgacttccagagagcaatatggctggttccccaacatgcctcaccctcatctatatcctttggcagctcacagggtcagcagcctctggacccgtgaaagagctggtcggttccgttggtggggccgtgactttccccctgaagtccaaagtaaagcaagttgactctattgtctggaccttcaacacaacccctcttgtcaccatacagccagaagggggcactatcatagtgacccaaaatcgtaatagggagagagtagacttcccagatggaggctactccctgaagctcagcaaactgaagaagaatgactcagggatctactatgtggggatatacagctcatcactccagcagccctccacccaggagtacgtgctgcatgtctacgagtacattgaagagaagaagagagtggacatttgtcgggaaactcctaacatatgcccccattctggagagaacacagagtacgacacaatccctcacactaatagaacaatcctaaaggaagatccagcaaatacggtttactccactgtggaaataccgaaaaagatggaaaatccccactcactgctcacgatgccagacacaccaaggctatttgcctatgagaatgttatctagacagcagtgcactcccctaagtctctgctcaaaaaaaaaacaattctcggcccaaagaaaacaatcagaagaattcactgatttgactagaaacatcaaggaagaatgaagaacgttgacttttttccaggataaattatctctgatgcttctttagatttaagagttcataattccatccactgctgagaaatctcctcaaacccagaaggtttaatcacttcatcccaaaaatgggattgtgaatgtcagcaaaccataaaaaaagtgcttagaagtattcctataaaaatgtaaatgcaaggtcacacatattaatgacagcctgttgtattaatgatggctccaggtcagtgtctggagtttcattccatcccagggcttggatgtcaggattataccaagagtcttgctaccaggagggcaagaagaccaaaacagacagacaagtccagcagaagcagatgcacctgacaaaaatggatgtattaattggctctataaactatgtgcccagcactatgctgagcttacactaattggtcagacatgctgtctgccctcatgaaattggctccaaatgaatgaactactttcatgagcagttgtagcaggcctgaccacagattcccagagggccaggtgtggatccacaggacttgaaggtcaaagttcacaaagatgaaga

SEQ ID NO: 28236 - DNA, 1039 bp, Homo sapiens
  source 1..1039: mol_type = unassigned DNA
aatacctaagagggaagtggcttcatttcagtggctgacttccagagagcaatatggctggttccccaacatgcctcaccctcatctatatcctttggcagctcacagggtcagcagcctctggacccgtgaaagagctggtcggttccgttggtggggccgtgactttccccctgaagtccaaagtaaagcaagttgactctattgtctggaccttcaacacaacccctcttgtcaccatacagccagaagggggcactatcatagtgacccaaaatcgtaatagggagagagtagacttcccagatggaggctactccctgaagctcagcaaactgaagaagaatgactcagggatctactatgtggggatatacagctcatcactccagcagccctccacccaggagtacgtgctgcatgtctacgagaacaatcctaaaggaagatccagcaaatacggtttactccactgtggaaataccgaaaaagatggaaaatccccactcactgctcacgatgccagacacaccaaggctatttgcctatgagaatgttatctagacagcagtgcactcccctaagtctctgctcaaaaaaaaaacaattctcggcccaaagaaaacaatcagaagaattcactgatttgactagaaacatcaaggaagaatgaagaacgttgacttttttccaggataaattatctctgatgcttctttagatttaagagttcataattccatccactgctgagaaatctcctcaaacccagaaggtttaatcacttcatcccaaaaatgggattgtgaatgtcagcaaaccataaaaaaagtgcttagaagtattcctataaaaatgtaaatgcaaggtcacacatattaatgacagcctgttgtattaatgatggctccaggtcagtgtctggagtttcattccatcccagggcttggatgtcaggattataccaagagtcttgctaccaggagggcaagaagaccaaaacagacagacaagtccagcagaagcagatgcacctgac

SEQ ID NO: 28237 - DNA, 913 bp, Homo sapiens
  source 1..913: mol_type = unassigned DNA
cagtggctgacttccagagagcaatatggctggttccccaacatgcctcaccctcatctatatcctttggcagctcacagagcacctgtcaaagcctaaagtcaccatgggtctgcagagcaataagaatggcacctgtgtgaccaatctgacatgctgcatggaacatggggaagaggatgtgatttatacctggaaggccctggggcaagcagccaatgagtcccataatgggtccatcctccccatctcctggagatggggagaaagtgatatgaccttcatctgcgttgccaggaaccctgtcagcagaaacttctcaagccccatccttgccaggaagctctgtgaagagaacaatcctaaaggaagatccagcaaatacggtttactccactgtggaaataccgaaaaagatggaaaatccccactcactgctcacgatgccagacacaccaaggctatttgcctatgagaatgttatctagacagcagtgcactcccctaagtctctgctcaaaaaaaaaacaattctcggcccaaagaaaacaatcagaagaattcactgatttgactagaaacatcaaggaagaatgaagaacgttgacttttttccaggataaattatctctgatgcttctttagatttaagagttcataattccatccactgctgagaaatctcctcaaacccagaaggtttaatcacttcatcccaaaaatgggattgtgaatgtcagcaaaccataaaaaaagtgcttagaagtattcctataaaaatgtaaatgcaaggtcacacatattaatgacagcctgttgtattaatgatggctccaggtcagtgtctggagtttcattccatcccagggcttggatgtcaggattataccaagagtcttgctaccaggagggc

SEQ ID NO: 28238 - DNA, 1352 bp, Homo sapiens
  source 1..1352: mol_type = unassigned DNA
ttcatttcagtggctgacttccagagagcaatatggctggttccccaacatgcctcaccctcatctatatcctttggcagctcacagagcacctgtcaaagcctaaagtcaccatgggtctgcagagcaataagaatggcacctgtgtgaccaatctgacatgctgcatggaacatggggaagaggatgtgatttatacctggaaggccctggggcaagcagccaatgagtcccataatgggtccatcctccccatctcctggagatggggagaaagtgatatgaccttcatctgcgttgccaggaaccctgtcagcagaaacttctcaagccccatccttgccaggaagctctgtgaagagtacattgaagagaagaagagagtggacatttgtcgggaaactcctaacatatgcccccattctggagagaacacagagtacgacacaatccctcacactaatagaacaatcctaaaggaagatccagcaaatacggtttactccactgtggaaataccgaaaaagatggaaaatccccactcactgctcacgatgccagacacaccaaggctatttgcctatgagaatgttatctagacagcagtgcactcccctaagtctctgctcaaaaaaaaaacaattctcggcccaaagaaaacaatcagaagaattcactgatttgactagaaacatcaaggaagaatgaagaacgttgacttttttccaggataaattatctctgatgcttctttagatttaagagttcataattccatccactgctgagaaatctcctcaaacccagaaggtttaatcacttcatcccaaaaatgggattgtgaatgtcagcaaaccataaaaaaagtgcttagaagtattcctataaaaatgtaaatgcaaggtcacacatattaatgacagcctgttgtattaatgatggctccaggtcagtgtctggagtttcattccatcccagggcttggatgtcaggattataccaagagtcttgctaccaggagggcaagaagaccaaaacagacagacaagtccagcagaagcagatgcacctgacaaaaatggatgtattaattggctctataaactatgtgcccagcactatgctgagcttacactaattggtcagacatgctgtctgccctcatgaaattggctccaaatgaatgaactactttcatgagcagttgtagcaggcctgaccacagattcccagagggccaggtgtggatccacaggacttgaaggtcaaagttcacaaagatgaagaatcagggtagctgaccatgtttggcagatactataatggagacacagaagtgtgcatggcccaag

SEQ ID NO: 28239 - DNA, 2996 bp, Homo sapiens
  source 1..2996: mol_type = unassigned DNA
acttttgggacatcctgttctgagtcaagattcctccttctgaacatgggactttccagaaggaccacagctcctcccgtgcatccactcggcctgggaggttctggattttggctgtcgagggagtttgcctgcctctccagagaaagatggtcatgaggcccctgtggagtctgcttctctgggaagccctacttcccattacagttactggtgcccaagtgctgagcaaagtcgggggctcggtgctgctggtggcagcgcgtccccctggcttccaagtccgtgaggctatctggcgatctctctggccttcagaagagctcctggccacgtttttccgaggctccctggagactctgtaccattcccgcttcctgggccgagcccagctacacagcaacctcagcctggagctcgggccgctggagtctggagacagcggcaacttctccgtgttgatggtggacacaaggggccagccctggacccagaccctccagctcaaggtgtacgatgcagtgcccaggcccgtggtacaagtgttcattgctgtagaaagggatgctcagccctccaagacctgccaggttttcttgtcctgttgggcccccaacatcagcgaaataacctatagctggcgacgggagacaaccatggactttggtatggaaccacacagcctcttcacagacggacaggtgctgagcatttccctgggaccaggagacagagatgtggcctattcctgcattgtctccaaccctgtcagctgggacttggccacagtcacgccctgggatagctgtcatcatgaggcagcaccagggaaggcctcctacaaagatgtgctgctggtggtggtgcctgtctcgctgctcctgatgctggttactctcttctctgcctggcactggtgcccctgctcagggaaaaagaaaaaggatgtccatgctgacagagtgggtccagagacagagaacccccttgtgcaggatctgccataaaggacaatatgaactgatgcctggactatcagtaaccccactgcacaggcacacgatgctctgggacataactggtgcctggaaatcaccatggtcctcatatctcccatgggaatcctgtcctgcctcgaaggagcagcctgggcagccatcacaccacgaggacaggaagcaccagcacgtttcacacctcccccttccctctcccatcttctcatatcctggctcttctctgggcaagatgagccaagcagaacattccatccaggacactggaagttctccaggatccagatccatggggacattaatagtccaaggcattccctcccccaccactattcataaagtattaaccaactggcaccaaggaattgcctccagcctgagtcctaggctctaaaagatattacatatttgaactaatagaggaactctgagtcacccatgccagcatcagcttcagccccagaccctgcagtttgagatctgatgcttcctgagggccaaggcattgctgtaagaaaaggtctagaaataggtgaaagtgagaggtgggggacaggggtttctctttctggcctaaggactttcaggtaatcagagttcatgggccctcaaaggtaaattgcagttgtagacaccgaggatggttgacaacccatggttgagatgggcaccgttttgcaggaaacaccatattaatagacatcctcaccatctccatccgctctcacgcctcctgcaggatctgggagtgagggtggagagtctttcctcacgctccagcacagtggccaggaaaagaaatactgaatttgccccagccaacaggacgttcttgcacaacttcaagaaaagcagctcagctcaggatgagtcttcctgcctgaaactgagagagtgaagaaccataaaacgctatgcagaaggaacattatggagagaaagggtactgaggcactctagaatctgccacattcattttcaaatgcaaatgcagaagacttaccttagttcaaggggaggggacaaagaccccacagcccaacagcaggactgtagaggtcactctgactccatcaaactttttattgtggccatcttaggaaaatacattctgcccctgaatgattctgtctagaaaagctctggagtattgatcactactggaaaaacacttaaggagctaaacttaccttcggggattattagctgataaggttcacagtttctctcacccaggtgtaactggattttttctggggcctcaatccagtcttgataacagcgaggaaagaggtattgaagaaacaggggtgggtttgaagtactattttcccagggtggcttcaatctccccacctaggatgtcagccctgtccaaggaccttccctcttctccccagttcctgggcaatcacttcaccttggacaaaggatcagcacagctggcctccagatccacatcaccactcttccactcgattgttcccagatcctccctgcctggcctgctcagaggttccctgttggtaacctggctttatcaaattctcatccctttcccacacccacttctctcctatcaccttcccccaagattacctgaacagggtccatggccactcaacctgtcagcttgcaccatccccacctgccacctacagtcaggccacatgcctggtcactgaatcatgcaaaactggcctcagtccctaaaaatgatgtggaaaggaaagcccaggatctgacaatgagccctggtggatttgtggggaaaaaatacacagcactccccacctttctttcgttcatctccagggccccacctcagatcaaagcagctctggatgagatgggacctgcagctctccctccacaaggtgactcttagcaacctcatttcgacagtggtttgtagcgtggtgcaccagggccttgttgaacagatccacactgctctaataaagttcccatccttaatga

SEQ ID NO: 28240 - DNA, 1038 bp, Homo sapiens
  source 1..1038: mol_type = unassigned DNA
ggaccacagctcctcccgtgcatccactcggcctgggaggttctggattttggctgtcgagggagtttgcctgcctctccagagaaagatggtcatgaggcccctgtggagtctgcttctctgggaagatgcagtgcccaggcccgtggtacaagtgttcattgctgtagaaagggatgctcagccctccaagacctgccaggttttcttgtcctgttgggcccccaacatcagcgaaataacctatagctggcgacgggagacaaccatggactttggtatggaaccacacagcctcttcacagacggacaggtgctgagcatttccctgggaccaggagacagagatgtggcctattcctgcattgtctccaaccctgtcagctgggacttggccacagtcacgccctgggatagctgtcatcatgaggcagcaccagggaaggcctcctacaaagatgtgctgctggtggtggtgcctgtctcgctgctcctgatgctggttactctcttctctgcctggcactggtgcccctgctcagggaaaaagaaaaaggatgtccatgctgacagagtgggtccagagacagagaacccccttgtgcaggatctgccataaaggacaatatgaactgatgcctggactatcagtaaccccactgcacaggcacacgatgctctgggacataactggtgcctggaaatcaccatggtcctcatatctcccatgggaatcctgtcctgcctcgaaggagcagcctgggcagccatcacaccacgaggacaggaagcaccagcacgtttcacacctcccccttccctctcccatcttctcatatcctggctcttctctgggcaagatgagccaagcagaacattccatccaggacactggaagttctccaggatccagatccatggggacattaatagtccaaggcattccctcccccaccactattcataaagtattaaccaactggcaccaaggaattgcctccagcctgagtcctaggctctaaaagatattacatattt

SEQ ID NO: 28241 - DNA, 1937 bp, Homo sapiens
  source 1..1937: mol_type = unassigned DNA
atgggagggaggcaccacctccaaaggcaggttagtgagagcatgtctgccctgttccaggcagtgcgcctggagagcgcctgggcggaccgggtccggtacatggtggtggtgtacagcagcgggcgccaggacaccgaggagaatatcttgctgggagtggacttttccagtaaggaaagtgggttcagcgtgagcacagcaggaaggatgcacatatttaagcctgtgtctgtccaggccatgtggtctgccctgcaggtgcttcacaaggcctgcgaagtggcccggaggcacaactacttccccgggggtgtagctctcatctgggctacctactatgagagctgcatcagctccgagcagagctgcatcaacgagtggaacgccatgcaggacctggagtctacgcggcccgactcccccgcgctatttgtggacaagcccactgaaggggaaaggaccgagcgcctcatcaaagccaagctccgaagcatcatgatgagccaggatctagaaaatgtgacttccaaagagattcgtaatgaattagagaaacagatgaattgtaacttgaaggaactcaaggaatttatagacaatgagatgctacttatcttgggacagatggacaagccctcccttatcttcgatcatctttatctcggctctgaatggaatgcatccaatctggaggaactgcagggctcaggggttgattacattttaaatgttaccagagaaatcgataatttttttcctggcttatttgcatatcataacatccgagtctacgatgaagagaccacagacctcctcgcccactggaatgaagcgtatcattttataaacaaagcgaagaggaaccattccaagtgcctggtgcattgcaaaatgggcgtgagtcgctcggcctccacagtcatagcctatgcaatgaaggaattcggctggcctctggaaaaagcatataactatgtaaagcagaagcgcagcatcacgcgccccaacgcgggctttatgaggcagctgtctgagtatgaaggcatcttggatgcaagcaaacagcggcacaacaagctgtggcgtcagcagacagacagcagcctccagcagcctgtggatgaccctgcaggacctggcgacttcttgccagagaccccagatggcaccccggaaagccagctgcccttcttggatgatgccgcccagcccggcttagggccccccctcccctgctgtttccggcgactctcagacccccttctgccttcccctgaggatgaaactggcagcttggtccacctggaggatccggagagggaggctctgttggaggaagctgctccacctgcagaggtgcacaggccggccagacagccccagcaaggttccggactctgtgagaaggatgtgaagaagaaactagagtttgggagtcccaaaggtcggagcggctccttgctgcaggtggaggagacggaaagggaggagggcctgggagcagggaggtgggggcagcttccaacccagctcgatcaaaacctgctcaactcggagaacctaaacaacaacagcaagaggagctgtcccaacggcatggaggtaggcagagcccggcctgcagggtggcacaccccatcccttccatcccactctaattggcctacctcagcctctgtagtagggactacaggcacccgccaccacacccagctgatttttttctattgtctcctctgggcccccagctcccatctccagggacctgagggttctttcacagggtgattctgctggtgggtacgtagtgcataccttatatagcaaattgagaatctgttgggaataacacatatctctgcacaccatcttcaccccatgtaccttattcataccctgggcagggcttccaactcaatttctttttgtgtatg

SEQ ID NO: 28242 - DNA, 2432 bp, Homo sapiens
  source 1..2432: mol_type = unassigned DNA
tttttcagccaaaatatcagaggaagacaagagttccacaagagccatttgcttttcgggtaggactctgaggaggagttggctccccagccctcgtggaagcactcggcagcctcctggcttttcctgatctccatagggagcagatggccagagctcggagggcagttgtagggagcgttagagatgtgagcactgcagccacgaacctcttttattttaccgacttctgcatcttccttcagccaacccactgcttctgctgtccagaggtttccagctcaaattacttaagtgagagctttttcatggtgaaaggcgcagccctcttcttacaacagggaagcagccctcaaggccagcggagtcttcagcacccccacaagcatgcaggtgatctgcctcaacatcttcaggtgatgatcaaccttctgcgttgcgaagacagaatcaagctggcagtgcgcctggagagcgcctgggcggaccgggtccggtacatggtggtggtgtacagcagcgggcgccaggacaccgaggagaatatcttgctgggagtggacttttccagtaaggaaagtaaaagctgcaccattgggatggttctccgactgtggagcgacacgaaaatccaccttgatggagatggtgggttcagcgtgagcacagcaggaaggatgcacatatttaagcctgtgtctgtccaggccatgtggtctgccctgcaggtgcttcacaaggcctgcgaagtggcccggaggcacaactacttccccgggggtgtagctctcatctgggctacctactatgagagctgcatcagctccgagcagagctgcatcaacgagtggaacgccatgcaggacctggagtctacgcggcccgactcccccgcgctatttgtggacaagcccactgaaggggaaaggaccgagcgcctcatcaaagccaagctccgaagcatcatgatgagccaggatctagaaaatgtgacttccaaagagattcgtaatgaattagagaaacagatgaattgtaacttgaaggaactcaaggaatttatagacaatgagatgctacttatcttgggacagatggacaagccctcccttatcttcgatcatctttatctcggctctgaatggaatgcatccaatctggaggaactgcagggctcaggggttgattacattttaaatgttaccagagaaatcgataatttttttcctggcttatttgcatatcataacatccgagtctacgatgaagagaccacagacctcctcgcccactggaatgaagcgtatcattttataaacaaagcgaagaggaaccattccaagtgcctggtgcattgcaaaatgggcgtgagtcgctcggcctccacagtcatagcctatgcaatgaaggaattcggctggcctctggaaaaagcatataactatgtaaagcagaagcgcagcatcacgcgccccaacgcgggctttatgaggcagctgtctgagtatgaaggcatcttggatgcaagcaaacagcggcacaacaagctgtggcgtcagcagacagacagcagcctccagcagcctgtggatgaccctgcaggacctggcgacttcttgccagagaccccagatggcaccccggaaagccagctgcccttcttggatgatgccgcccagcccggcttagggccccccctcccctgctgtttccggcgactctcagacccccttctgccttcccctgaggatgaaactggcagcttggtccacctggaggatccggagagggaggctctgttggaggaagctgctccacctgcagaggtgcacaggccggccagacagccccagcaaggttccggactctgtgagaaggatgtgaagaagaaactagagtttgggagtcccaaaggtcggagcggctccttgctgcaggtggaggagacggaaagggaggagggcctgggagcagggaggtgggggcagcttccaacccagctcgatcaaaacctgctcaactcggagaacctaaacaacaacagcaagaggagctgtcccaacggcatggaggtaggcagagcccggcctgcagggtggcacaccccatcccttccatcccactctaattggcctacctcagcctctgtagtagggactacaggcacccgccaccacacccagctgatttttttctattgtctcctctgggcccccagctcccatctccagggacctgagggttctttcacagggtgattctgctggtgggtacgtagtgcataccttatatagcaaattgagaatctgttgggaataacacatatctctgcacaccatcttcaccccatgtaccttattcataccctgggcagggcttccaactcaatttctttttgtgtatgtaaaattaaaacatataatttatcagcc

SEQ ID NO: 28243 - DNA, 8538 bp, Homo sapiens
  source 1..8538: mol_type = unassigned DNA
cggctccaggaggccccgggcccggcccgggcggcggtggcggtggcggctctagctcgagacgtctgtggcgccctcgcaccgcgccgcagccatggccctggtgaccctgcagcgctcgcccacgcccagcgccgcctcctcctcggccagcaacagcgagttggaggctggcagcgaagaagatcgaaaattaaacctcagcttaagtgagagctttttcatggtgaaaggcgcagccctcttcttacaacagggaagcagccctcaaggccagcggagtcttcagcacccccacaagcatgcaggtgatctgcctcaacatcttcaggtgatgatcaaccttctgcgttgcgaagacagaatcaagctggcagtgcgcctggagagcgcctgggcggaccgggtccggtacatggtggtggtgtacagcagcgggcgccaggacaccgaggagaatatcttgctgggagtggacttttccagtaaggaaagtaaaagctgcaccattgggatggttctccgactgtggagcgacacgaaaatccaccttgatggagatggtgggttcagcgtgagcacagcaggaaggatgcacatatttaagcctgtgtctgtccaggccatgtggtctgccctgcaggtgcttcacaaggcctgcgaagtggcccggaggcacaactacttccccgggggtgtagctctcatctgggctacctactatgagagctgcatcagctccgagcagagctgcatcaacgagtggaacgccatgcaggacctggagtctacgcggcccgactcccccgcgctatttgtggacaagcccactgaaggggaaaggaccgagcgcctcatcaaagccaagctccgaagcatcatgatgagccaggatctagaaaatgtgacttccaaagagattcgtaatgaattagagaaacagatgaattgtaacttgaaggaactcaaggaatttatagacaatgagatgctacttatcttgggacagatggacaagccctcccttatcttcgatcatctttatctcggctctgaatggaatgcatccaatctggaggaactgcagggctcaggggttgattacattttaaatgttaccagagaaatcgataatttttttcctggcttatttgcatatcataacatccgagtctacgatgaagagaccacagacctcctcgcccactggaatgaagcgtatcattttataaacaaagcgaagaggaaccattccaagtgcctggtgcattgcaaaatgggcgtgagtcgctcggcctccacagtcatagcctatgcaatgaaggaattcggctggcctctggaaaaagcatataactatgtaaagcagaagcgcagcatcacgcgccccaacgcgggctttatgaggcagctgtctgagtatgaaggcatcttggatgcaagcaaacagcggcacaacaagctgtggcgtcagcagacagacagcagcctccagcagcctgtggatgaccctgcaggacctggcgacttcttgccagagaccccagatggcaccccggaaagccagctgcccttcttggatgatgccgcccagcccggcttagggccccccctcccctgctgtttccggcgactctcagacccccttctgccttcccctgaggatgaaactggcagcttggtccacctggaggatccggagagggaggctctgttggaggaagctgctccacctgcagaggtgcacaggccggccagacagccccagcaaggttccggactctgtgagaaggatgtgaagaagaaactagagtttgggagtcccaaaggtcggagcggctccttgctgcaggtggaggagacggaaagggaggagggcctgggagcagggaggtgggggcagcttccaacccagctcgatcaaaacctgctcaactcggagaacctaaacaacaacagcaagaggagctgtcccaacggcatggaggatgatgctatatttgggatccttaacaaagtgaagccttcctataaatcctgtgccgactgcatgtaccctacagccagcggggctcctgaggcctccagggagcgatgtgaggaccccaatgctcccgccatctgcacccagccagccttcctaccccacatcacgtcctcccctgtggcccacttggccagcaggtcccgtgttccggagaagccagcctctggcccaaccgaacctcccccgttcctaccaccagcaggctccaggagggcagacaccagtggccctggggctggagctgccctagagccaccagccagccttttggaaccttccagagagaccccaaaagtcctgccaaagtccctccttttgaagaattctcactgtgataagaaccctcccagcacagaagtggtaataaaggaagaatcgtcacccaagaaagatatgaagccagccaaggacctgaggcttctgttcagtaatgaatctgagaagccgacaaccaacagctacctgatgcagcaccaggagtccatcattcagctgcagaaggcaggcttggtccgcaagcacaccaaagagctagagcggctgaagagcgtgcctgcagacccagcacctccctccagggatggccctgccagcaggctggaggccagcatccccgaggagagccaggatccagccgcgctccacgagctgggccccctggttatgcccagccaggccgggagtgatgagaagtcagaggccgcccccgcttcattggaaggaggctcactgaagagcccccctcctttcttctaccgcctggaccacaccagtagtttctcaaaagactttctgaagaccatctgctacacccccacctcctcttccatgagctccaacctgacccggagctccagcagcgatagcatccacagtgtccgtgggaagcccgggctggtgaagcagcggacacaggagattgagacccggctccggctggcgggcctcaccgtctcttccccactgaagcgctcacactctcttgccaagctggggagtctcaccttctcaacggaagacctgtccagtgaggctgacccgtccaccgtcgctgactcccaggacaccactttgagtgaatcttccttcttgcatgagccccagggaaccccgagggacccagctgcaacctccaaaccatcagggaaacccgccccagaaaacttaaagagcccttcgtggatgagcaaaagctgacccgccttttgctgcgtcaggctgggcggatattttcatatgatccctccctcactttcactgtggatttggatcgaccccttacatcttgatttcccttaaacgagtgaagtcatcctaacttttcccctactcttgccatagagaggaggagaagaaactaaccaacatgcagcacaagaaggggagctgtcagtcgtgtggcctgggagaaccaggagccgccggccaggagacacaaaactccgctcccaccgtgtcttcaagaagaaccatgttttaggaagaacgtgcacacataggcgcacacatccagactgttcccttcgcatcctgcagaagagtcctggtggtggcagcctcaccgcggcacacgttctagctcattcttggcctcgcagaaaactctcggatggcaacattaagtcctacctctgttctcgctgcgctttttatttttaaaacacacgaatgaccaaggcttgttccagggaataatgctctgtctgaaagcgtttttccaaaaaaagaatttttcgttttgtgttttggttgggaccccagacgtgtcaagacttttaacccgacagccccaagcactgctgagtaaagtcatcagatgagtagtcccacgctgttgttgagctgactctgtgcccgaatggtggtgcaggcgccctgtcctggttgtgttgttacgtgtttgaccagcacaggggtccggtggggaaaatgtatgggttgttctcagttgttgctaatgctgaagtttaaatctcaaggggaagggcccacctgcattgttgagtgtctgctgctgaaacacatgattgtgtttaggtttgaaattgctcaagtgtctggctcaggtggtggttctgagacacatcgtcctgctgagagcccagatgcttaggtccactagggcccatctagggaagggaaaggagatttcagcggcttccccgaaaggaacgggactgtcgggatgcttcccggatgtctacagttgccccttcctgcagtgagattactgcttcctgtttccctccagctcttcccagcagcagtgagggagtataagagggatctgtagtcgctgcctggctctgtgggcggcccctttaagactcaggtgagctcagccagtcccgctgcgccaggcttgaatcaaaggtgtcagcaagctagatgtcaaaacatttcgagagagaggcagcttgcagaaaagcagaaaggttgaattcaggggtcagcaaactatggcatgtggccccgtgagctaggaatggtttttcctctttaagacagggcctggctctgtcacctaggctggagtacagtagtgcaatcatgactcactgcagcatcaacctccctggctcaagcgatggcttttacctttttaaggagttgtaaaaaaaagaaataatatgtgacagaattcatgtggcccacaaagcctgaggtacttactgtcaggccctttgtagaaaaagttgctgacccctggtttgatttgccacacagggctgctcatggccctgtaggaagaaactgggtaaatgtgaagccctctgcctctctgacacctaaggccagacccttccctcctcccgaccacaagctttgccagccccgcactagcctcacctgtgcaggatggagtaggttgcgtacatgggggaaggcaggtgaacacagttggctgaagctcttccacaattccatcttgccctcagctgggtccgccagattaactcagtgaaaccagaaagccttcaaggaccagctgaattctgaaagtgagtgagtgagccatcatcttaacattggccagaactgtgttccccaaagctattctagaaagcaccccaggagggatctgcaggaacaaggctagttcatattttacctagtgagcacagtttttgcaaaaatcctccctccaggactttgtctccttggagtgatttttaaaaatacatacattactttatagggagctgttttcccactagtgtcaattaaaatcaccttaaaaggtgattatccacttattcctaaacccctgtgggttgttccccctttccctcagccaacaaaagcatagcctcaaaaaatatcaagttcggtatgttttgccaaatcaaatttcatgtggtagatcaatttttgtgtcaaaataatcttttaaatttagtgatgacaggcttttgttggttttttaaccacgtctatgtatgagaatgatatatttttgaaaactttaattttgaaagccataatttttcttatctaaagagttggggggtggggtgtggaatctggagagtacaagttggtctttggcttctggcaaacttacccattcatttttggaagcacagctagcatatcaacatccagacgagagcgctggtcccgtccacagagcagagtgaagcattctggacttgatgcttaatagcctggcctggagaaaagggtaaggtttatttttggaaacccagatcagttgcatgtaaacagatggcacatggctatttaaaatgctgtatgatggggccgggcgcggtggctcacgcctgtaatcctagcactttgggaggccgaggcaggcggatcatctgaggtcaggagttctagaccagcctggccaacatggtgaaaccccgtctctactaaaaatacaaaaacttagctgggtgtggtagtgcgtgcctgtaatcctagctacttaggaggctgaggcaggagaatcgcttgaacctgggtggcggaggttgcaatgagccgagatcgcgccactgcactccagcctgggtgcaatgaaactgggagtgaaactccgtctcaaaaaaataaaatgctgtatgaacaagatgagcattctgtcaggtgtcgggacacctgggcaaagacgaattcatgctgtctgtgaaaaggaagtttgcactgtaacatatgccatagcttggcccttgctttgtatgcaaccttagctgatggggaaaattccaaacataagtggcacaggaaagaggcaggcagaggaggcaggggtctgtgctgtgcaagtcactggttttttatgactatcattttcattgaatgcatttgttgaattgggacaaaaggaacattttctaaatcagcttgatactctttataaaaaacagctgaatcttatcttctgcctcacattaattcatgtggcatgccaaaagttagactgaacttttctacatcttcaccttgcattgatacaggaaagtcttctctttaagtcttgctaagtataagggggatagtggtcacgggaagaggagaaccggggctgctctcggatggtaattgacaatgccgatttccatttctttgtcttacggctacttccgagccttctagcaaggtccctggttgcatgtatttcctaagagcagagtttatttctctttacattccctgcttccttgctctccatgcagggaccccagccaacctctgggctgttgaatagctctctgctgggtggcaagcccttctccttggcaccctgttgcttaagcatacagattgctcaccaggtgcacacagacagctgtactgtccaagcccattctgctccaccctgtcctcttcagctaaagagcattccagtaatctaaagcccttttcccctggagaagtccagagtttgcagcagtgtggagctgagcttgaacagaacagaccctcagcacggccctggactaatgcactcttatctgagggcagtccattctagaaggttgatgaatttccctaccactctcctggggaccttttctctctagtgggaacaaatgctacataatttagtcaagatcctattaagtcatctcacctgaggcatctggagagggagttgccttccattggtgggaaattgttggtgccagaatacattttgcccaaaactcttctcattggctggccacctagcagggctcctctaaacacgcaactcagcgaggggacccccttcacctctggcaagagagctgggtagatcagaaacttggtgacacctggctagcacagagcaggctcacttgtcttggtcccactacccagattcctgcagacattgcaaaccaaatgaaggttgttgaatgacccctgtccccagccacttgttttgttatcatctgctctgcagtggaatgcctgtgtgtttgagttcactctgcatctgtatatttgagtatagaaaccgagtcaagtgatcatgtgcatccagacacactgtgtcacctgagccacagagcaaatcaccttaacgatctggaatgaaactgtgaccagtgccgccctgggtggttctggagagactgccgtcttcttgtttggccataggtgctggggccccggcttcagtcactgtctcagacaggagtcccgataagcagatcaccagtcctccactgtccttcctgtcggccttgctgcatgagaagatagctgcttcctccctcttttcctacactgtaattattgttttacaattgagtgccttaataatagtttacaaatactatgtatttatgcaaaactgttaaagtctcatctgttatgattggatacttggtcttgtcagtagtggtcagcattgggttgtgagcttgtcctactccatacgtgtttatcctgctatgcagttttacattgtgtgttcacatctattccaaggagccttgctagaaacaacactggcggttcctgcaggccaggcaggcattggcccatgctgtgtcccataggagccaatgaaagaacgtagcttggtctgctagccagccgtggggtggcgcaggccaggcagcctctgcaccagagtccagcacctgcccattccccagtcacacaatcatactcttctttcatagagattttattaccacctagaccaccctagttttcctctctgttagtgtcctgagctcttttgcaacaaaatgtaggtacagaccaatccctgtcccttccccaatcaggagctccacaccatgagttgtttggttttccagaagctgccagtgggttcccgtgaattgcgttaagatatcgatgattttttttattgtttttcttcttgtttttttaaataatatatttaaaggcagtatcttttgtactgtgaatttgcagtagaagatgcagaatgcactttttttttacttctgttggtgtgtattgtatatagtgtgtgtgcttcttgtgatgaaaataaactttttctttataaattc

SEQ ID NO: 28244 - DNA, 8488 bp, Homo sapiens
  source 1..8488: mol_type = unassigned DNA
aggaggccccgggcccggcccgggcggcggtggcggtggcggctctagctcgagacgtctgtggcgccctcgcaccgcgccgcagccatggccctggtgaccctgcagcgctcgcccacgcccagcgccgcctcctcctcggccagcaacagcgagttggaggctggcagcgaagaagatcgaaaattaaacctcagcttaagtgagagctttttcatggtgaaaggcgcagccctcttcttacaacagggaagcagccctcaaggccagcggagtcttcagcacccccacaagcatgcaggtgatctgcctcaacatcttcaggtgatgatcaaccttctgcgttgcgaagacagaatcaagctggcagtgcgcctggagagcgcctgggcggaccgggtccggtacatggtggtggtgtacagcagcgggcgccaggacaccgaggagaatatcttgctgggagtggacttttccagtaaggaaagtaaaagctgcaccattgggatggttctccgactgtggagcgacacgaaaatccaccttgatggagatggtgggttcagcgtgagcacagcaggaaggatgcacatatttaagcctgtgtctgtccaggccatgtggtctgccctgcaggtgcttcacaaggcctgcgaagtggcccggaggcacaactacttccccgggggtgtagctctcatctgggctacctactatgagagctgcatcagctccgagcagagctgcatcaacgagtggaacgccatgcaggacctggagtctacgcggcccgactcccccgcgctatttgtggacaagcccactgaaggggaaaggaccgagcgcctcatcaaagccaagctccgaagcatcatgatgagccaggatctagaaaatgtgacttccaaagagattcgtaatgaattagagaaacagatgaattgtaacttgaaggaactcaaggaatttatagacaatgagatgctacttatcttgggacagatggacaagccctcccttatcttcgatcatctttatctcggttgattacattttaaatgttaccagagaaatcgataatttttttcctggcttatttgcatatcataacatccgagtctacgatgaagagaccacagacctcctcgcccactggaatgaagcgtatcattttataaacaaagcgaagaggaaccattccaagtgcctggtgcattgcaaaatgggcgtgagtcgctcggcctccacagtcatagcctatgcaatgaaggaattcggctggcctctggaaaaagcatataactatgtaaagcagaagcgcagcatcacgcgccccaacgcgggctttatgaggcagctgtctgagtatgaaggcatcttggatgcaagcaaacagcggcacaacaagctgtggcgtcagcagacagacagcagcctccagcagcctgtggatgaccctgcaggacctggcgacttcttgccagagaccccagatggcaccccggaaagccagctgcccttcttggatgatgccgcccagcccggcttagggccccccctcccctgctgtttccggcgactctcagacccccttctgccttcccctgaggatgaaactggcagcttggtccacctggaggatccggagagggaggctctgttggaggaagctgctccacctgcagaggtgcacaggccggccagacagccccagcaaggttccggactctgtgagaaggatgtgaagaagaaactagagtttgggagtcccaaaggtcggagcggctccttgctgcaggtggaggagacggaaagggaggagggcctgggagcagggaggtgggggcagcttccaacccagctcgatcaaaacctgctcaactcggagaacctaaacaacaacagcaagaggagctgtcccaacggcatggaggatgatgctatatttgggatccttaacaaagtgaagccttcctataaatcctgtgccgactgcatgtaccctacagccagcggggctcctgaggcctccagggagcgatgtgaggaccccaatgctcccgccatctgcacccagccagccttcctaccccacatcacgtcctcccctgtggcccacttggccagcaggtcccgtgttccggagaagccagcctctggcccaaccgaacctcccccgttcctaccaccagcaggctccaggagggcagacaccagtggccctggggctggagctgccctagagccaccagccagccttttggaaccttccagagagaccccaaaagtcctgccaaagtccctccttttgaagaattctcactgtgataagaaccctcccagcacagaagtggtaataaaggaagaatcgtcacccaagaaagatatgaagccagccaaggacctgaggcttctgttcagtaatgaatctgagaagccgacaaccaacagctacctgatgcagcaccaggagtccatcattcagctgcagaaggcaggcttggtccgcaagcacaccaaagagctagagcggctgaagagcgtgcctgcagacccagcacctccctccagggatggccctgccagcaggctggaggccagcatccccgaggagagccaggatccagccgcgctccacgagctgggccccctggttatgcccagccaggccgggagtgatgagaagtcagaggccgcccccgcttcattggaaggaggctcactgaagagcccccctcctttcttctaccgcctggaccacaccagtagtttctcaaaagactttctgaagaccatctgctacacccccacctcctcttccatgagctccaacctgacccggagctccagcagcgatagcatccacagtgtccgtgggaagcccgggctggtgaagcagcggacacaggagattgagacccggctccggctggcgggcctcaccgtctcttccccactgaagcgctcacactctcttgccaagctggggagtctcaccttctcaacggaagacctgtccagtgaggctgacccgtccaccgtcgctgactcccaggacaccactttgagtgaatcttccttcttgcatgagccccagggaaccccgagggacccagctgcaacctccaaaccatcagggaaacccgccccagaaaacttaaagagcccttcgtggatgagcaaaagctgacccgccttttgctgcgtcaggctgggcggatattttcatatgatccctccctcactttcactgtggatttggatcgaccccttacatcttgatttcccttaaacgagtgaagtcatcctaacttttcccctactcttgccatagagaggaggagaagaaactaaccaacatgcagcacaagaaggggagctgtcagtcgtgtggcctgggagaaccaggagccgccggccaggagacacaaaactccgctcccaccgtgtcttcaagaagaaccatgttttaggaagaacgtgcacacataggcgcacacatccagactgttcccttcgcatcctgcagaagagtcctggtggtggcagcctcaccgcggcacacgttctagctcattcttggcctcgcagaaaactctcggatggcaacattaagtcctacctctgttctcgctgcgctttttatttttaaaacacacgaatgaccaaggcttgttccagggaataatgctctgtctgaaagcgtttttccaaaaaaagaatttttcgttttgtgttttggttgggaccccagacgtgtcaagacttttaacccgacagccccaagcactgctgagtaaagtcatcagatgagtagtcccacgctgttgttgagctgactctgtgcccgaatggtggtgcaggcgccctgtcctggttgtgttgttacgtgtttgaccagcacaggggtccggtggggaaaatgtatgggttgttctcagttgttgctaatgctgaagtttaaatctcaaggggaagggcccacctgcattgttgagtgtctgctgctgaaacacatgattgtgtttaggtttgaaattgctcaagtgtctggctcaggtggtggttctgagacacatcgtcctgctgagagcccagatgcttaggtccactagggcccatctagggaagggaaaggagatttcagcggcttccccgaaaggaacgggactgtcgggatgcttcccggatgtctacagttgccccttcctgcagtgagattactgcttcctgtttccctccagctcttcccagcagcagtgagggagtataagagggatctgtagtcgctgcctggctctgtgggcggcccctttaagactcaggtgagctcagccagtcccgctgcgccaggcttgaatcaaaggtgtcagcaagctagatgtcaaaacatttcgagagagaggcagcttgcagaaaagcagaaaggttgaattcaggggtcagcaaactatggcatgtggccccgtgagctaggaatggtttttcctctttaagacagggcctggctctgtcacctaggctggagtacagtagtgcaatcatgactcactgcagcatcaacctccctggctcaagcgatggcttttacctttttaaggagttgtaaaaaaaagaaataatatgtgacagaattcatgtggcccacaaagcctgaggtacttactgtcaggccctttgtagaaaaagttgctgacccctggtttgatttgccacacagggctgctcatggccctgtaggaagaaactgggtaaatgtgaagccctctgcctctctgacacctaaggccagacccttccctcctcccgaccacaagctttgccagccccgcactagcctcacctgtgcaggatggagtaggttgcgtacatgggggaaggcaggtgaacacagttggctgaagctcttccacaattccatcttgccctcagctgggtccgccagattaactcagtgaaaccagaaagccttcaaggaccagctgaattctgaaagtgagtgagtgagccatcatcttaacattggccagaactgtgttccccaaagctattctagaaagcaccccaggagggatctgcaggaacaaggctagttcatattttacctagtgagcacagtttttgcaaaaatcctccctccaggactttgtctccttggagtgatttttaaaaatacatacattactttatagggagctgttttcccactagtgtcaattaaaatcaccttaaaaggtgattatccacttattcctaaacccctgtgggttgttccccctttccctcagccaacaaaagcatagcctcaaaaaatatcaagttcggtatgttttgccaaatcaaatttcatgtggtagatcaatttttgtgtcaaaataatcttttaaatttagtgatgacaggcttttgttggttttttaaccacgtctatgtatgagaatgatatatttttgaaaactttaattttgaaagccataatttttcttatctaaagagttggggggtggggtgtggaatctggagagtacaagttggtctttggcttctggcaaacttacccattcatttttggaagcacagctagcatatcaacatccagacgagagcgctggtcccgtccacagagcagagtgaagcattctggacttgatgcttaatagcctggcctggagaaaagggtaaggtttatttttggaaacccagatcagttgcatgtaaacagatggcacatggctatttaaaatgctgtatgatggggccgggcgcggtggctcacgcctgtaatcctagcactttgggaggccgaggcaggcggatcatctgaggtcaggagttctagaccagcctggccaacatggtgaaaccccgtctctactaaaaatacaaaaacttagctgggtgtggtagtgcgtgcctgtaatcctagctacttaggaggctgaggcaggagaatcgcttgaacctgggtggcggaggttgcaatgagccgagatcgcgccactgcactccagcctgggtgcaatgaaactgggagtgaaactccgtctcaaaaaaataaaatgctgtatgaacaagatgagcattctgtcaggtgtcgggacacctgggcaaagacgaattcatgctgtctgtgaaaaggaagtttgcactgtaacatatgccatagcttggcccttgctttgtatgcaaccttagctgatggggaaaattccaaacataagtggcacaggaaagaggcaggcagaggaggcaggggtctgtgctgtgcaagtcactggttttttatgactatcattttcattgaatgcatttgttgaattgggacaaaaggaacattttctaaatcagcttgatactctttataaaaaacagctgaatcttatcttctgcctcacattaattcatgtggcatgccaaaagttagactgaacttttctacatcttcaccttgcattgatacaggaaagtcttctctttaagtcttgctaagtataagggggatagtggtcacgggaagaggagaaccggggctgctctcggatggtaattgacaatgccgatttccatttctttgtcttacggctacttccgagccttctagcaaggtccctggttgcatgtatttcctaagagcagagtttatttctctttacattccctgcttccttgctctccatgcagggaccccagccaacctctgggctgttgaatagctctctgctgggtggcaagcccttctccttggcaccctgttgcttaagcatacagattgctcaccaggtgcacacagacagctgtactgtccaagcccattctgctccaccctgtcctcttcagctaaagagcattccagtaatctaaagcccttttcccctggagaagtccagagtttgcagcagtgtggagctgagcttgaacagaacagaccctcagcacggccctggactaatgcactcttatctgagggcagtccattctagaaggttgatgaatttccctaccactctcctggggaccttttctctctagtgggaacaaatgctacataatttagtcaagatcctattaagtcatctcacctgaggcatctggagagggagttgccttccattggtgggaaattgttggtgccagaatacattttgcccaaaactcttctcattggctggccacctagcagggctcctctaaacacgcaactcagcgaggggacccccttcacctctggcaagagagctgggtagatcagaaacttggtgacacctggctagcacagagcaggctcacttgtcttggtcccactacccagattcctgcagacattgcaaaccaaatgaaggttgttgaatgacccctgtccccagccacttgttttgttatcatctgctctgcagtggaatgcctgtgtgtttgagttcactctgcatctgtatatttgagtatagaaaccgagtcaagtgatcatgtgcatccagacacactgtgtcacctgagccacagagcaaatcaccttaacgatctggaatgaaactgtgaccagtgccgccctgggtggttctggagagactgccgtcttcttgtttggccataggtgctggggccccggcttcagtcactgtctcagacaggagtcccgataagcagatcaccagtcctccactgtccttcctgtcggccttgctgcatgagaagatagctgcttcctccctcttttcctacactgtaattattgttttacaattgagtgccttaataatagtttacaaatactatgtatttatgcaaaactgttaaagtctcatctgttatgattggatacttggtcttgtcagtagtggtcagcattgggttgtgagcttgtcctactccatacgtgtttatcctgctatgcagttttacattgtgtgttcacatctattccaaggagccttgctagaaacaacactggcggttcctgcaggccaggcaggcattggcccatgctgtgtcccataggagccaatgaaagaacgtagcttggtctgctagccagccgtggggtggcgcaggccaggcagcctctgcaccagagtccagcacctgcccattccccagtcacacaatcatactcttctttcatagagattttattaccacctagaccaccctagttttcctctctgttagtgtcctgagctcttttgcaacaaaatgtaggtacagaccaatccctgtcccttccccaatcaggagctccacaccatgagttgtttggttttccagaagctgccagtgggttcccgtgaattgcgttaagatatcgatgattttttttattgtttttcttcttgtttttttaaataatatatttaaaggcagtatcttttgtactgtgaatttgcagtagaagatgcagaatgcactttttttttacttctgttggtgtgtattgtatatagtgtgtgtgcttcttgtgatgaaaataaactttttctttataaattcctga

SEQ ID NO: 28245 - DNA, 2354 bp, Homo sapiens
  source 1..2354: mol_type = unassigned DNA
cggctccaggaggccccgggcccggcccgggcggcggtggcggtggcggctctagctcgagacgtctgtggcgccctcgcaccgcgccgcagccatggccctggtgaccctgcagcgctcgcccacgcccagcgccgcctcctcctcggccagcaacagcgagttggaggctggcagcgaagaagatcgaaaattaaacctcagcttaagtgagagctttttcatggtgaaaggcgcagccctcttcttacaacagggaagcagccctcaaggccagcggagtcttcagcacccccacaagcatgcaggtgatctgcctcaacatcttcaggtgatgatcaaccttctgcgttgcgaagacagaatcaagctggcagtgcgcctggagagcgcctgggcggaccgggtccggtacatggtggtggtgtacagcagcgggcgccaggacaccgaggagaatatcttgctgggagtggacttttccagtaaggaaagtaaaagctgcaccattgggatggttctccgactgtggagcgacacgaaaatccaccttgatggagatggtgggttcagcgtgagcacagcaggaaggatgcacatatttaagcctgtgtctgtccaggccatgtggtctgccctgcaggtgcttcacaaggcctgcgaagtggcccggaggcacaactacttccccgggggtgtagctctcatctgggctacctactatgagagctgcatcagctccgagcagagctgcatcaacgagtggaacgccatgcaggacctggagtctacgcggcccgactcccccgcgctatttgtggacaagcccactgaaggggaaaggaccgagcgcctcatcaaagccaagctccgaagcatcatgatgagccaggatctagaaaatgtgacttccaaagagattcgtaatgaattagagaaacagatgaattgtaacttgaaggaactcaaggaatttatagacaatgagatgctacttatcttgggacagatggacaagccctcccttatcttcgatcatctttatctcggctctgaatggaatgcatccaatctggaggaactgcagggctcaggggttgattacattttaaatgttaccagagaaatcgataatttttttcctggcttatttgcatatcataacatccgagtctacgatgaagagaccacagacctcctcgcccactggaatgaagcgtatcattttataaacaaagcgaagaggaaccattccaagtgcctggtgcattgcaaaatgggcgtgagtcgctcggcctccacagtcatagcctatgcaatgaaggaattcggctggcctctggaaaaagcatataactatgtaaagcagaagcgcagcatcacgcgccccaacgcgggctttatgaggcagctgtctgagtatgaaggcatcttggatgcaagcaaacagcggcacaacaagctgtggcgtcagcagacagacagcagcctccagcagcctgtggatgaccctgcaggacctggcgacttcttgccagagaccccagatggcaccccggaaagccagctgcccttcttggatgatgccgcccagcccggcttagggccccccctcccctgctgtttccggcgactctcagacccccttctgccttcccctgaggatgaaactggcagcttggtccacctggaggatccggagagggaggctctgttggaggaagctgctccacctgcagaggtgcacaggccggccagacagccccagcaaggttccggactctgtgagaaggatgtgaagaagaaactagagtttgggagtcccaaaggtcggagcggctccttgctgcaggtggaggagacggaaagggaggagggcctgggagcagggaggtgggggcagcttccaacccagctcgatcaaaacctgctcaactcggagaacctaaacaacaacagcaagaggagctgtcccaacggcatggaggtaggcagagcccggcctgcagggtggcacaccccatcccttccatcccactctaattggcctacctcagcctctgtagtagggactacaggcacccgccaccacacccagctgatttttttctattgtctcctctgggcccccagctcccatctccagggacctgagggttctttcacagggtgattctgctggtgggtacgtagtgcataccttatatagcaaattgagaatctgttgggaataacacatatctctgcacaccatcttcaccccatgtaccttattcataccctgggcagggcttccaactcaatttctttttgtgtatgtaaaattaaaacatataatttatcagccaacttca

SEQ ID NO: 28246 - DNA, 9327 bp, Homo sapiens
  source 1..9327: mol_type = unassigned DNA
gcggagtctgcggccgttcccgcggcctcctcctcctccccgttcccttcacccccaccccgcacccctttccccatcccggctccgtcaccctcccgtcccccacactcaggacaagaatgccctgcccggaacaacccagcagcgcctagatggctttggtcacggtccagcggtcacctacccccagcaccacctccagcccctgcgcctcggaggcagacagtggggaggaagaatgccggtcacagcccaggagcatcagcgagagctttctaactgtcaaaggtgctgccctttttctaccacggggaaatggctcatccacaccaagaatcagccacagacggaacaagcatgcaggcgatctccaacagcatctccaagcaatgttcattttactccgcccagaagacaacatcaggctggctgtaagactggaaagtacttaccagaatcgaacacgctatatggtagtggtttcaactaatggtagacaagacactgaagaaagcatcgtcctaggaatggatttctcctctaatgacagtagcacttgtaccatgggcttagttttgcctctctggagcgacacgctaattcatttggatggtgatggtgggttcagtgtatcgacggataacagagttcacatattcaaacctgtatctgtgcaggcaatgtggtctgcactacagagcttacacaaggcttgtgaagtcgccagagcgcataactactacccaggcagcctatttctcacttgggtgagttattatgagagccatatcaactcagatcaatcctcagtcaatgaatggaatgcaatgcaagatgtacagtcccaccggcccgactctccagctctcttcaccgacatacctactgaacgtgaacgaacagaaaggctaattaaaaccaaattaagggagatcatgatgcagaaggatttggagaatattacatccaaagagataagaacagagttggaaatgcaaatggtgtgcaacttgcgggaattcaaggaatttatagacaatgaaatgatagtgatccttggtcaaatggatagccctacacagatatttgagcatgtgttcctgggctcagaatggaatgcctccaacttagaggacttacagaaccgaggggtacggtatatcttgaatgtcactcgagagatagataacttcttcccaggagtctttgagtatcataacattcgggtatatgatgaagaggcaacggatctcctggcgtactggaatgacacttacaaattcatctctaaagcaaagaaacatggatctaaatgccttgtgcactgcaaaatgggggtgagtcgctcagcctccaccgtgattgcctatgcaatgaaggaatatggctggaatctggaccgagcctatgactatgtgaaagaaagacgaacggtaaccaagcccaacccaagcttcatgagacaactggaagagtatcaggggatcttgctggcaagcaaacagcggcataacaaactatggagatctcattcagatagtgacctctcagaccaccacgaacccatctgcaaacctgggctagaactcaacaagaaggatatcaccacctcagcagaccagattgctgaggtgaagaccatggagagtcacccacccatacctcctgtctttgtggaacatatggtcccacaagatgcaaatcagaaaggcctgtgtaccaaagaaagaatgatctgcttggagtttacttctagggaatttcatgctggacagattgaggatgaattaaacttaaatgacatcaatggatgctcatcagggtgttgtctgaatgaatcaaaatttcctcttgacaattgccatgcatccaaagccttaattcagcctggacatgtcccagaaatggccaacaagtttccagacttaacagtggaagatttggagacagatgcactgaaagcagacatgaatgtccacctactgcctatggaagaattgacatctccactgaaagacccccccatgtcccctgatcctgagtcaccaagcccccaacccagttgccagactgaaatctcagatttcagtacagatcgcattgacttttttagtgccctagagaagtttgtggagctctcccaagaaacccggtcacgatctttttcccattcaaggatggaggaactgggtggaggaaggaatgagagctgtcgactgtcagtggtagaagtagccccttccaaagtgacagctgatgaccagagaagcagctctttgagtaatactccccatgcatcagaagaatcttcaatggatgaggaacagtcaaaggcaatttcagaactggtcagcccagacatcttcatgcagtctcactcggaaaatgcaatttcagtcaaagaaattgtcactgaaattgagtccatcagtcaaggagttgggcagattcaactgaaaggagacatcttacccaacccatgccatacaccaaagaagaacagcatccatgagctgctccttgagagggcccagactccagagaacaaacctggacatatggagcaagatgaggactcctgcacagcccagcctgaactagccaaagactcagggatgtgcaacccagaaggctgcctaaccacacactcatctatagcagacttggaagaaggggaaccagctgagggggaacaagagctccagggctcagggatgcacccaggtgccaagtggtaccctgggtctgtgaggcgagccaccttggagttcgaagagcgcttacggcaggagcaagagcatcatggtgctgccccaacatgtacctcattgtccactcgtaagaattcaaagaatgattcttctgtggcagacctagcaccaaaagggaaaagtgatgaagcccccccagaacattcatttgtcctcaaggaaccagaaatgagcaaaggcaaagggaaatacagtgggtctgaggctggctcactgtcccattctgagcagaatgccactgttccagctcccagggtgctggagtttgaccacttgccagatcctcaggagggcccagggtcagatactggaacacagcaggaaggagtcctgaaggatctgaggactgtgattccataccaggagtctgaaacacaagcagtccctcttccccttcccaagagggtagaaatcattgaatatacccacatagttacatcacccaatcacactgggccagggagtgaaatagccaccagtgagaagagcggagagcaagggctgaggaaagtgaacatggaaaaatctgtcactgtgctctgcacactggatgaaaatctaaacaggactctggaccccaaccaggtttctctgcacccccaagtgctacctctgcctcattcttcctcccctgagcacaacagacccactgaccatccaacctccatcctgagtagccctgaagacagaggcagcagcctgtccacagccctggagacagcagcaccttttgtcagtcatacaacccatttactgtctgccagtttggattacctgcatccccagactatggttcacctggagggcttcacagagcagagcagcactacagatgagccctctgcagaacaggttagctgggaagaaagtcaggagagccctctctccagtggcagtgaggtgccatataaggactcccagctaagtagcgcagacctaagtttaattagcaaacttggtgacaacactggggagttacaggagaaaatggacccattgcctgtagcctgtcgactcccacatagctctagtagtgaaaacataaagagtctcagccacagccccggtgtggtgaaggagcgtgctaaagaaatcgagtctcgagtggttttccaggcagggctcaccaaaccatcccaaatgaggcgctcagcttctctcgccaaattaggttacttggacctctgtaaagactgcttaccagagagggagcctgcctcctgtgaatcccctcatctcaaactgcttcagcctttcctcagaacagactcaggcatgcacgcgatggaggaccaagagtccctagaaaacccaggtgccccccacaacccagagcccaccaagtcttttgtagaacaactcacaacaacagagtgtattgtgcagagcaagccagtggagaggccccttgtgcagtatgccaaagaatttggttctagtcagcagtatttgctccccagggcaggacttgaattgactagttctgaaggaggccttcccgtgctacagacccagggactgcagtgtgcatgcccagctccagggctggccgtggcaccccgtcagcaacacggcagaactcacccccttaggagactgaaaaaggcaaatgacaaaaaacggacaaccaaccccttctataataccatgtgattctgagcctacacatgtgactttctagaagaaatgtttgtaaaaggggcaggtgtaatatgtaaggaacatgcactttattggttaattttataatattttggtcattttactgtttctggtgcatgcagggtttgggtgtttttcagtgtgtatgtgtgtgtatatgtaaggggaaagagagattgatctggatggcaagaccgtttatcattttttatttaaaaaaatcaaacctcaaaaaagtcattttcagagaacacctttatcaaaggcaaattgctgtttttcagtcagctgccacctgcttctcattttgccctctgagaaaaggcatggtttcttaattgagggaaggaagcagattcggaggggtggagataaagctggggattggagatgttcccctgcctttgtgatgatggtttggtttccagacctgaggcatcgaatgggctaaaggtcagccagaagtcagagggctctcagccttcatccagccgcagccctttagagttcctgaaggaggcaggttccgctttgctttaaaagagggtcttccggtgttccagagtgtatcgttacagtaagacatgataatggccggctctgcaaatttatcatatagtttttttcccaagaaaattatttttgaaattaaaacaggaccccaaatgaaatccaagtggtcttctgtagaggaaagcatgataagaggaggaagacataaagttgggggtggagaggctgctgcccagaaactgctgggttggtgggatccacacagatgggcatcttggctctccctgccagaaaaatgtgctctgcagtgtcctcccaactgaaaacaacagtgacatgtttgaaaagcagcaatcgaaagtcagtgtgttcttgtaaaatgaatatgtatgtagggttttaacccttccattacttgaataattctttgggccttctgagtttaatggccatattttcttccagtttattttccttccccatgctgttgtccccatgctgcctatttttttaaatttcatagattatatttgaattgttacatatgtttaacatccattgaatgcaacgttttatttttggtattatcactgttaacacttttttttccttttcctggaaggtttgtcatttctctaaagtttgtacacagtatttatgtacataatattgtcactgtcttagtgtcttgttcatgttgtagggtaattttgatttattctttttaagaaggagtagagttgcaactggaaaacacagacaccagaaatgaaagtgttgggtgttgataggaatctgtacaatatgttgatggtggctgtagttgtttaaatggagacttccaatcaccagctcctgccaaattatgcattagtaactttttcctcagagacacccctaaaggctcccattaggtcacagcgtgactgaaagctgatttctctgtgagactgaaatcccagaacattgtttgccagtatctcaaccacagccaggaagtatatgtgagttgcccagagtggaagctcctagtagaggctgaaggccacaggggaggcctcagccaggggcaagtgcccacagtgactccatttaggatgctgtcgttttgctactgttgtggagatccttaacgcagcagcgcctgtcataaacaagcctcttgtagcttcttacagaaaacagatttagtctagcatgaaacacctctgcatctcattgaaactgaagaggcttgcagatttgctttcgttgatgtccacgttactgaggattgactgagtatagactggagacaggtttttggcttatcacagcactgaggaaaatacaaatgcacagactgtcagcatgatgtcagaggccagagtttggtgggggcagatggcagggcgacccaaaagatgcagaaaaggtagactggggccactgggtcttaagaggagctgtgaagttgtgtggaagccaaggctgggtctgacatccctgccaggaagcaggttggacagaaaccacttgctaaaagcgtctctatggtgcagtgattatgtgtaccctgtgctgttgctcagtagtctccttgaatgttcaagtatctcatccactcagttttgtgattcctggatatttgtgtgttgtaaagtgttttgttaggtggtatgaaccaatgtgaggaggcttgagacagggttatggatttccagagctcttccatgtagaataccctgccttcttgaagcagttccaccaccaatatgatggggaagggcaggaacttatggcagggtggggagagggtttgcctggaagttaagagagtggcatccacttgtggtaaccccttacgatgatgacatcccacacactaagaggtacaagcaggaccaaagttttggactgttccctcttctcccctccactgtgtttaatgttcactcactgcattaaataacaacaaagatgggacaaaacccactaatactgtggggaaaaaaaattttcaagagcagaggaaagtctttctgcctttttataattactttttttatcatttaatttacctgcctaaataaacatcttctacagaatatctgtcattcaaccatgccaaggagtttgtgccagccttttcagactcccagaattgggtgttcctgggttatttacatagctgagcagtgtccaggggaggtgcgcagtgaactgtcaaggactttccagactgtcttctcttcagacttttataatctccagtggcatctttcccttttcttttgttcatgacctgacctgaagcagcagatttgatagactggcaaagatgaataggaaaaactttgactcttgcccagtgcctgcctgcctctctctctctcctctctctctctctctttttaaaccaccatagactctcacttattttggaggagtgtatgtgcatgtgtacacatatgtacatatataaaaacagttgatgttttggtgtatggggtaaaagccccaggagcatacagaacttgagctgaacctggtcagtagaaagggaaaccccaaccctttcttgatttttggagacacccaggactaatggatactgtagtagacatgtagtactatagtaccgtaatattcatctctcctcattttagttgcctttcagattctaaatgtttgggatcattcctatcatcttagtctcttcaggatctttagtattttcctggttctgaggaggcttgagacagggttatggatttccttgttctgtgtctttatccctactgatagttcctctttctcattttgcaaactacccagagctccaaggacagcctgaagatctcagtgcctcaggctctgaggtactctgctcacaggccccagacagatgctgttgggtaaactcaaagcttcctatgagaagcttctgagatgtagcaggtcacagaagtgttcacctgtttcatctgaggatttcagttctgaagtgatctaggcatgtttggtaaaaatgtttttgtgagagttctttttttaagaaagcattatgcaaaaagtcacttttaagggcatttaaaaatttttaagtaaagccattctttggcttttttggactatttgtggatactttgtttacattttgaatattaaaatgtgcatcatcttgtcggccatgcagtcctgcaggcatcagtgccctggctgtcctgtgagtcctcatgcagagcagggccatcatggtcagcccttgtgagtaagtgggtatacgctgaagctgacttccgtctgtgtcctgccctcccatccagcactctctatggaaatagttgtcatttcctcagtgatggtgtgtcttatagtgatggttgtaatggtgaatggctagtgtcattttgtttaattttgttttgctttttgatggtggataagatgaaattttagctgtttcagcatcaatccaacttaaaagcatcttggactttgttttcccttccaaactaaaagatcaaggcatgtattagacacaagcatatttgctgcctcaactcctctgacacccatattaggaaaaggcctgccaccaaagcaggaagctgcacactcctaacccttctcccagggtgtggggtcccttgacgtcatgaagagctattgcaaggtgcttctgtacttttccagcctggaaatggagggtgactggccctggctcctgctatgagaagataaccagcctcattttctcagtgccccagaggtctaggataggatttctaaactggaatcatccttaatcaccttgaagatcccttaagaggcatttgactggtgctgccgtctgtgtcctcaaagcaatgctggtggcagcgtcctgtgtacacatgcagagctaatacccaaactaaaaactgggtaactggccctgaagtgcttcccaatcagtaagcccacagggaaatgtttgatttttatgttctgttggattttggtttgcttggcatatctaaaggtgcctttacttttctttttttttttttttctttctgctttgttttgtaggacttgttctaacatggaaaacaagtccagaagactctcctctgactgttacctttgccccaagccaccccaaacttttatgctcatgttttattaaagcaggtgctccctggaatctctgggacatttttgaggcatttgaagcagaatatagagtggtctcatctccttccttaatcttcctggtggttgggatgttccacttgtatcatagatttttttattacagatatgctccactgtttttaaatgtgaacttgtgcgcaaatgtgcagattcaatgttcttgttacagattgaataaatttttattttgaagatgaaa

SEQ ID NO: 28247 - DNA, 795 bp, Homo sapiens
  source 1..795: mol_type = unassigned DNA
atgaccctgagcacgttggcccgcaagaggaaggcgcccctcgcttgcacctgcagcctcggtggccccgacatgattccttacttctccgccaacgcggtcatctcgcagaacgccatcaaccagctcatcagcgagagctttctaactgtcaaaggtgctgccctttttctaccacggggaaatggctcatccacaccaagaatcagccacagacggaacaagcatgcaggcgatctccaacagcatctccaagcaatgttcattttactccgcccagaagacaacatcaggctggctgtaagactggaaagtacttaccagaatcgaacacgctatatggtagtggtttcaactaatggtagacaagacactgaagaaagcatcgtcctaggaatggatttctcctctaatgacagtagcacttgtaccatgggcttagttttgcctctctggagcgacacgctaattcatttggatggtgatggtgggttcagtgtatcgacggataacagagttcacatattcaaacctgtatctgtgcaggcaatgtgggttgacagggattcaaggaacaaacactgtgatgtactattggtggaagaatgaactggagcagcctttctggagagtgatttgccaatatgccttatcattttgcatgatctttgtcctagtaactctatttctatggatttactctaagtttgtaaacatggatgtgtgcaaagattttagctctaagaatgtttgtcagtgttctaataatagcaaaaaataaaaaacaaatgattg

SEQ ID NO: 28248 - DNA, 1796 bp, Homo sapiens
  source 1..1796: mol_type = unassigned DNA
atggctttggtcacggtccagcggtcacctacccccagcaccacctccagcccctgcgcctcggaggcagacagtggggaggaagaatgccggtcacagcccaggagcatcagcgagagctttctaactgtcaaaggtgctgccctttttctaccacggggaaatggctcatccacaccaagaatcagccacagacggaacaagcatgcaggcgatctccaacagcatctccaagcaatgttcattttactccgcccagaagacaacatcaggctggctgtaagactggaaagtacttaccagaatcgaacacgctatatggtagtggtttcaactaatggtagacaagacactgaagaaagcatcgtcctaggaatggatttctcctctaatgacagtagcacttgtaccatgggcttagttttgcctctctggagcgacacgctaattcatttggatggtgatggtgggttcagtgtatcgacggataacagagttcacatattcaaacctgtatctgtgcaggcaatgtggtctgcactacagagcttacacaaggcttgtgaagtcgccagagcgcataactactacccaggcagcctatttctcacttgggtgagttattatgagagccatatcaactcagatcaatcctcagtcaatgaatggaatgcaatgcaagatgtacagtcccaccggcccgactctccagctctcttcaccgacatacctactgaacgtgaacgaacagaaaggctaattaaaaccaaattaagggagatcatgatgcagaaggatttggagaatattacatccaaagagataagaacagagttggaaatgcaaatggtgtgcaacttgcgggaattcaaggaatttatagacaatgaaatgatagtgatccttggtcaaatggatagccctacacagatatttgagcatgtgttcctgggctcagaatggaatgcctccaacttagaggacttacagaaccgaggggtacggtatatcttgaatgtcactcgagagatagataacttcttcccaggagtctttgagtatcataacattcgggtatatgatgaagaggcaacggatctcctggcgtactggaatgacacttacaaattcatctctaaagcaaagaaacatggatctaaatgccttgtgcactgcaaaatgggggtgagtcgctcagcctccaccgtgattgcctatgcaatgaaggaatatggctggaatctggaccgagcctatgactatgtgaaagaaagacgaacggtaaccaagcccaacccaagcttcatgagacaactggaagagtatcaggggatcttgctggcaaggtgagtcagtgactttctccaattctccctccttttaagttccctaaagcaagatgaagtgtccttctctgtagctacttctcaagctgatttggatgtgatattttttcaaaaaagacttatttctctatcaatccagttttcaaaacataagtgtaagcatttaagatttgcatgggctggccgggcacagtggctcacgcctgtaatcccagcactttgggaggctgaggcaagcggatcatttgaggtcaggagttcgagaccagcctggccaacatggtgaaaccccgtctctacttaaaatacaaatattagctgggcatgatgatgggcccctgtaatcccagctacttgggaggctgaggcaggacaatcgcttgaacctgggaggcagaggttgcagtgagctgagattgtaccatgcactccagcctgggtaacagagcg

SEQ ID NO: 28249 - DNA, 4538 bp, Homo sapiens
  source 1..4538: mol_type = unassigned DNA
ccgcacccctttccccatcccggctccgtcaccctcccgtcccccacactcaggacaagaatgccctgcccggaacaacccagcagcgcctagatggctttggtcacggtccagcggtcacctacccccagcaccacctccagcccctgcgcctcgagctctcatttggaagacagtgaatcagcagcattactttgctgtgaatgtgaagaatcagaaatctttactgattccaatgaggcagacagtggggaggaagaatgccggtcacagcccaggagcatcagcgagagctttctaactgtcaaaggtgctgccctttttctaccacggggaaatggctcatccacaccaagaatcagccacagacggaacaagcatgcaggcgatctccaacagcatctccaagcaatgttcattttactccgcccagaagacaacatcaggctggctgtaagactggaaagtacttaccagaatcgaacacgctatatggtagtggtttcaactaatggtagacaagacactgaagaaagcatcgtcctaggaatggatttctcctctaatgacagtagcacttgtaccatgggcttagttttgcctctctggagcgacacgctaattcatttggatggtgatggtgggttcagtgtatcgacggataacagagttcacatattcaaacctgtatctgtgcaggcaatgtggtctgcactacagagcttacacaaggcttgtgaagtcgccagagcgcataactactacccaggcagcctatttctcacttgggtgagttattatgagagccatatcaactcagatcaatcctcagtcaatgaatggaatgcaatgcaagatgtacagtcccaccggcccgactctccagctctcttcaccgacatacctactgaacgtgaacgaacagaaaggctaattaaaaccaaattaagggagatcatgatgcagaaggatttggagaatattacatccaaagagataagaacagagttggaaatgcaaatggtgtgcaacttgcgggaattcaaggaatttatagacaatgaaatgatagtgatccttggtcaaatggatagccctacacagatatttgagcatgtgttcctgggctcagaatggaatgcctccaacttagaggacttacagaaccgaggggtacggtatatcttgaatgtcactcgagagatagataacttcttcccaggagtctttgagtatcataacattcgggtatatgatgaagaggcaacggatctcctggcgtactggaatgacacttacaaattcatctctaaagcaaagaaacatggatctaaatgccttgtgcactgcaaaatgggggtgagtcgctcagcctccaccgtgattgcctatgcaatgaaggaatatggctggaatctggaccgagcctatgactatgtgaaagaaagacgaacggtaaccaagcccaacccaagcttcatgagacaactggaagagtatcaggggatcttgctggcaagcaaacagcggcataacaaactatggagatctcattcagatagtgacctctcagaccaccacgaacccatctgcaaacctgggctagaactcaacaagaaggatatcaccacctcagcagaccagattgctgaggtgaagaccatggagagtcacccacccatacctcctgtctttgtggaacatatggtcccacaagatgcaaatcagaaaggcctgtgtaccaaagaaagaatgatctgcttggagtttacttctagggaatttcatgctggacagattgaggatgaattaaacttaaatgacatcaatggatgctcatcagggtgttgtctgaatgaatcaaaatttcctcttgacaattgccatgcatccaaagccttaattcagcctggacatgtcccagaaatggccaacaagtttccagacttaacagtggaagatttggagacagatgcactgaaagcagacatgaatgtccacctactgcctatggaagaattgacatctccactgaaagacccccccatgtcccctgatcctgagtcaccaagcccccaacccagttgccagactgaaatctcagatttcagtacagatcgcattgacttttttagtgccctagagaagtttgtggagctctcccaagaaacccggtcacgatctttttcccattcaaggatggaggaactgggtggaggaaggaatgagagctgtcgactgtcagtggtagaagtagccccttccaaagtgacagctgatgaccagagaagcagctctttgagtaatactccccatgcatcagaagaatcttcaatggatgaggaacagtcaaaggcaatttcagaactggtcagcccagacatcttcatgcagtctcactcggaaaatgcaatttcagtcaaagaaattgtcactgaaattgagtccatcagtcaaggagttgggcagattcaactgaaaggagacatcttacccaacccatgccatacaccaaagaagaacagcatccatgagctgctccttgagagggcccagactccagagaacaaacctggacatatggagcaagatgaggactcctgcacagcccagcctgaactagccaaagactcagggatgtgcaacccagaaggctgcctaaccacacactcatctatagcagacttggaagaaggggaaccagctgagggggaacaagagctccagggctcagggatgcacccaggtgccaagtggtaccctgggtctgtgaggcgagccaccttggagttcgaagagcgcttacggcaggagcaagagcatcatggtgctgccccaacatgtacctcattgtccactcgtaagaattcaaagaatgattcttctgtggcagacctagcaccaaaagggaaaagtgatgaagcccccccagaacattcatttgtcctcaaggaaccagaaatgagcaaaggcaaagggaaatacagtgggtctgaggctggctcactgtcccattctgagcagaatgccactgttccagctcccagggtgctggagtttgaccacttgccagatcctcaggagggcccagggtcagatactggaacacagcaggaaggagtcctgaaggatctgaggactgtgattccataccaggagtctgaaacacaagcagtccctcttccccttcccaagagggtagaaatcattgaatatacccacatagttacatcacccaatcacactgggccagggagtgaaatagccaccagtgagaagagcggagagcaagggctgaggaaagtgaacatggaaaaatctgtcactgtgctctgcacactggatgaaaatctaaacaggactctggaccccaaccaggtttctctgcacccccaagtgctacctctgcctcattcttcctcccctgagcacaacagacccactgaccatccaacctccatcctgagtagccctgaagacagaggcagcagcctgtccacagccctggagacagcagcaccttttgtcagtcatacaacccatttactgtctgccagtttggattacctgcatccccagactatggttcacctggagggcttcacagagcagagcagcactacagatgagccctctgcagaacaggttagctgggaagaaagtcaggagagccctctctccagtggcagtgaggtgccatataaggactcccagctaagtagcgcagacctaagtttaattagcaaacttggtgacaacactggggagttacaggagaaaatggacccattgcctgtagcctgtcgactcccacatagctctagtagtgaaaacataaagagtctcagccacagccccggtgtggtgaaggagcgtgctaaagaaatcgagtctcgagtggttttccaggcagggctcaccaaaccatcccaaatgaggcgctcagcttctctcgccaaattaggttacttggacctctgtaaagactgcttaccagagagggagcctgcctcctgtgaatcccctcatctcaaactgcttcagcctttcctcagaacagactcaggcatgcacgcgatggaggaccaagagtccctagaaaacccaggtgccccccacaacccagagcccaccaagtcttttgtagaacaactcacaacaacagagtgtattgtgcagagcaagccagtggagaggccccttgtgcagtatgccaaagaatttggttctagtcagcagtatttgctccccagggcaggacttgaattgactagttctgaaggaggccttcccgtgctacagacccagggactgcagtgtgcatgcccagctccagggctggccgtggcaccccgtcagcaacacggcagaactcacccccttaggagactgaaaaaggcaaatgacaaaaaacggacaaccaaccccttctataataccatgtgattctgagcctacacatgtgactttctagaagaaatgtttgtaaaaggggcaggtgtaatatgtaaggaacatgcactttattggttaatttt

SEQ ID NO: 28250 - DNA, 2871 bp, Homo sapiens
  source 1..2871: mol_type = unassigned DNA
gagaagctccgcgggcccggctgggcgagtgtctggccctttaagggccgcccccgaggaggtgccaggcccgggtggcgccgtccgtccttcctggtcctgcgggtccaggactgtccgcggggttgagggaaggggccgtgcccggtgccagcccaggtgctcgcggcctggctccatggccctggtcacagtgagccgttcgcccccgggcagcggcgcctccacgcccgtggggccctgggaccaggcggtccagcgaaggagtcgactccagcgaaggcagagctttgcggtgctccgtggggctgtcctgggactgcaggatggaggggacaatgatgatgcagcagaggccagttctgagccaacagagaaggccccgagtgaggaggagctccacggggaccagacagacttcgggcaaggatcccagagtccccagaagcaggaggagcagaggcagcacctgcacctcatggtacagctgctgaggccgcaggatgacatccgcctggcagcccagctggaggcaccccggcctccccggctccgctacctgctggtagtttctacacgagaaggagaaggtctgagccaggatgagacggtcctcctgggcgtggatttccctgacagcagctcccccagctgcaccctgggcctggtcttgcccctctggagtgacacccaggtgtacttagatggagacgggggcttcagcgtgacgtctggtgggcaaagccggatcttcaagcccatctccatccagaccatgtgggccacactccaggtattgcaccaagcatgtgaggcagctctaggcagcggccttgtaccgggtggcagtgccctcacctgggccagccactaccaggagagactgaactccgaacagagctgcctcaatgagtggacggctatggccgacctggagtctctgcggcctcccagcgccgagcctggcgggtcctcagaacaggagcagatggagcaggcgatccgtgctgagctgtggaaagtgttggatgtcagtgacctggagagtgtcacttccaaagagatccgccaggctctggagctgcgcctggggctccccctccagcagtaccgtgacttcatcgacaaccagatgctgctgctggtggcacagcgggaccgagcctcccgcatcttcccccacctctacctgggctcagagtggaacgcagcaaacctggaggagctgcagaggaacagggtcacccacatcttgaacatggcccgggagattgacaacttctaccctgagcgcttcacctaccacaatgtgcgcctctgggatgaggagtcggcccagctgctgccgcactggaaggagacgcaccgcttcattgaggctgcaagagcacagggcacccacgtgctggtccactgcaagatgggcgtcagccgctcagcggccacagtgctggcctatgccatgaagcagtacgaatgcagcctggagcaggccctgcgccacgtgcaggagctccggcccatcgcccgccccaaccctggcttcctgcgccagctgcagatctaccagggcatcctgacggccagccgccagagccatgtctgggagcagaaagtgggtggggtctccccagaggagcacccagcccctgaagtctctacaccattcccacctcttccgccagaacctgagggtggtggggaggagaaggttgtaggcatggaagagagccaggcagccccgaaagaagagcctgggccacggccacgtataaacctccgaggggtcatgaggtccatcagtcttctggagccctccttggagctggagagcacctcagagaccagtgacatgccagaggtcttctcttcccacgagtcttcacatgaagagcctctgcagcccttcccacagcttgcaaggaccaagggaggccagcaggtggacagggggcctcagcctgccctgaagtcccgccagtcagtggttaccctccagggcagtgccgtggtggccaaccggacccaggccttccaggagcaggagcaggggcaggggcaggggcagggagagccctgcatttcctctacgcccaggttccggaaggtggtgagacaggccagcgtgcatgacagtggagaggagggcgaggcctgagccctcacacatgcccacgctcccctgacactgaagaggatccacaactccttggagaaacaccctcacgtctgttgccgcacacattcctctcagctccgccccatacccgtcactacagcctcacctcccacccctgtcactacggcctcacctcccacccctgtcactacagcctcacctcctacagccttaagtcccaggcccatgtctgcctgtccaagggctcaagactttctaactgggatgtggtagagggactgaaggtacctttgggggcaacagcaccctagtttcattctcaactctagccctgcacactcacctgtggcacggaatgaaaacagagcttcccgtgcaaaaagggtcacgcctcccacccccgccccctccctgcacctcctgtcctctcccagttcattcctggaaccagccaggccaggcaaccagtggcccccaaaggcaggcaggatcctcaggccccagccgcgggaggctggaagggctggcagatcgcttccctcatccacctccaccggtccaggtctttgctgctgtccccagacctcctgtgacaccacgccagatcacagggcaccaggccagagatagtcttctttttgtcctttctggcctctggctagtcagtttttcatagccttacagtatctggctttgtactgagaaataaaacacattttcatatttggtta

SEQ ID NO: 28251 - DNA, 5185 bp, Homo sapiens
  source 1..5185: mol_type = unassigned DNA
cgcgctctcttcctccctcagacaactcgccccccgccctccgcccccctccacgtaattccgaaagagcagaagaaagagaaggagaacaggaaaagaagagctagtaagcgagagcgagagcacagaaaagaaaaaaaaaagccttaagaggaccgaaggggaggaaaggaaaaggatggacaaccacaaaacgcagcgattgcggaaattttccagcgccattggctgggcagcgtgagtccttcggtcgggcgtgatttcagcaccgggggaactggacagcacctcggggggacttctgggcaacccgcaaccacagcaagaactccaccagcagcctcaacaacagaagccgcggaaaaccctgctttgtatcagagaggcaaggtcagtccgacgcacagccatgcacaggcagtgcgcctgtactacgctgcaaaccctctgcttgtttctctaacatgcacttgcttctaattactagcattgtttcatttctgatcagtgaagatcagtagatgagattctgtaagggtgtacttttaatttatatgtatatatttaacttctttttctgttatttttaaagtgttgtgggggagtggggtttttttcctacttttttttttttttttttttctttgcttgccttgcactacgtgcctggatagtttgtggatataattattgactggcgtctgggctattgcagtgcgggggggttagggaggaaggaatccacccccacccccccaaacccttttcttctcctttcctggcttcggacattggagcactaaatgaacttgaattgtgtctgtggcgagcaggatggtcgctgttactttgtgatgagatcggggatgaattgctcgctttaaaaatgctgctttggattctgttgctggagacgtctctttgttttgccgctggaaacgttacaggggacgtttgcaaagagaagatctgttcctgcaatgagatagaaggggacctacacgtagactgtgaaaaaaagggcttcacaagtctgcagcgtttcactgccccgacttcccagttttaccatttatttctgcatggcaattccctcactcgacttttccctaatgagttcgctaacttttataatgcggttagtttgcacatggaaaacaatggcttgcatgaaatcgttccgggggcttttctggggctgcagctggtgaaaaggctgcacatcaacaacaacaagatcaagtcttttcgaaagcagacttttctggggctggacgatctggaatatctccaggctgattttaatttattacgagatatagacccgggggccttccaggacttgaacaagctggaggtgctcattttaaatgacaatctcatcagcaccctacctgccaacgtgttccagtatgtgcccatcacccacctcgacctccggggtaacaggctgaaaacgctgccctatgaggaggtcttggagcaaatccctggtattgcggagatcctgctagaggataacccttgggactgcacctgtgatctgctctccctgaaagaatggctggaaaacattcccaagaatgccctgatcggccgagtggtctgcgaagcccccaccagactgcagggtaaagacctcaatgaaaccaccgaacaggacttgtgtcctttgaaaaaccgagtggattctagtctcccggcgccccctgcccaagaagagacctttgctcctggacccctgccaactcctttcaagacaaatgggcaagaggatcatgccacaccagggtctgctccaaacggaggtacaaagatcccaggcaactggcagatcaaaatcagacccacagcagcgatagcgacgggtagctccaggaacaaacccttagctaacagtttaccctgccctgggggctgcagctgcgaccacatcccagggtcgggtttaaagatgaactgcaacaacaggaacgtgagcagcttggctgatttgaagcccaagctctctaacgtgcaggagcttttcctacgagataacaagatccacagcatccgaaaatcgcactttgtggattacaagaacctcattctgttggatctgggcaacaataacatcgctactgtagagaacaacactttcaagaaccttttggacctcaggtggctatacatggatagcaattacctggacacgctgtcccgggagaaattcgcggggctgcaaaacctagagtacctgaacgtggagtacaacgctatccagctcatcctcccgggcactttcaatgccatgcccaaactgaggatcctcattctcaacaacaacctgctgaggtccctgcctgtggacgtgttcgctggggtctcgctctctaaactcagcctgcacaacaattacttcatgtacctcccggtggcaggggtgctggaccagttaacctccatcatccagatagacctccacggaaacccctgggagtgctcctgcacaattgtgcctttcaagcagtgggcagaacgcttgggttccgaagtgctgatgagcgacctcaagtgtgagacgccggtgaacttctttagaaaggatttcatgctcctctccaatgacgagatctgccctcagctgtacgctaggatctcgcccacgttaacttcgcacagtaaaaacagcactgggttggcggagaccgggacgcactccaactcctacctagacaccagcagggtgtccatctcggtgttggtcccgggactgctgctggtgtttgtcacctccgccttcaccgtggtgggcatgctcgtgtttatcctgaggaaccgaaagcggtccaagagacgagatgccaactcctccgcgtccgagattaattccctacagacagtctgtgactcttcctactggcacaatgggccttacaacgcagatggggcccacagagtgtatgactgtggctctcactcgctctcagactaagaccccaaccccaataggggagggcagagggaaggcgatacatccttccccaccgcaggcaccccgggggctggaggggcgtgtacccaaatccccgcgccatcagcctggatgggcataagtagataaataactgtgagctcgcacaaccgaaagggcctgaccccttacttagctccctccttgaaacaaagagcagactgtggagagctgggagagcgcagccagctcgctctttgctgagagccccttttgacagaaagcccagcacgaccctgctggaagaactgacagtgccctcgccctcggccccggggcctgtggggttggatgccgcggttctatacatatatacatatatccacatctatatagagagatagatatctatttttcccctgtggattagccccgtgatggctccctgttggctacgcagggatgggcagttgcacgaaggcatgaatgtattgtaaataagtaactttgacttctgacaaaaaacaaaaagtgctgcatggctcgcatggaatccacgcgctccagggactctgcccgcccccgcgactggagacggcatctcgttcacagcacccaccctcttacctgataagttccatcgtatcaaactttctataaacaaaatacagtataatcagaaagtgccatttcgccattatttgtgatcggtaggcagttcagagcataagttaactgtgaaaaaaatgtaaaggttttatttaggacatttgcatggctagtcatcagtccattttatgagttaacaatgtattttgttgagggaagtttttaggggttgttttgggttcttttattttgatggtgatgttttattttattttatttttttcagggggtcttttttttaatacatatccaataatgccttccatctgaatgtaaaataagtacccatgatttctattatagtatcagtgtaattatttaaaaaatgattttgaggcagttaagcatgaccaattaatgtcactctagtgcttaggctgcgatcctatggtagcaattctgtgctggtataaatcttacttataaagtaggaaaagagaaccgaggaagcacgtgaaacttactaattctattcgaggattttataatggcatattttttcagtattaaagcgaaaatgttttcaactctgggtccttacctttttccagcttcatatttgcaagtggtaaattggatttgcggtggaagagacaggggagggaaacggttggggttagatcccttcctgagctacattaaggctctttctctaatcgccttacttagctttttaccctttaagtagctcctcttccctcgcccccaccctctaccccacccccaccttcgctcagactttaccggctttccccagtccataaaggtcttgccccaacactcaccccttctttttttcccctctccaaatgcagcagtgaatccctttattaatactggaaatccctctctgctgcttttgttggtgctgcccacactgcagatatattaaggatgttaggagagatttgatttaattgactctgcctagataggtctcattaaacagagtggagatttcattggtcagcactcctcaatgaaagacagacctaatgactggcatttgagatgctgctggcattttgaattcaacatctgctgaaaacggtaaaactaattagtgcccacccaccctccccgccccagcaactgcatattgaaatttgttaaagcactcatctttatggaaattaatcattatcctaaagaagtgtttctctcccatcatccggatttctggttgtggcccagcaattaacaaaaacagcttcaactgttcgaattttatgaaccaatgtaactctggcctcaatcatattcctctgggatttctaaacagcagttaagctacaaaaagcaaacaaaaccacacatattgatggagtctgcattccaccacatatccacccttgagaagtatgtcaaaagactgcagactatagatttttttttaatataggattataaatcagctagtgaaagacctcagagcagttgtaagtagatctgccatctagaactcatattctaaagggaagtgatttctcagaacagtgatgttctggaatatgtattatttattttaacacttttttaataaaatctttattataaacc

SEQ ID NO: 28252 - DNA, 3159 bp, Homo sapiens
  source 1..3159: mol_type = unassigned DNA
cttcctgcaagaagcgttgcccgttggctagctgctcggtggggatctgcctgccctgggggcgccgcccgcgctccccgcggtgctctcgctcctgggctgcgccagtccgaggcggtgccggctcctttgcctccccgagtcgcagatgctgcgggcgcctccgggaaaagatctgggcggcgcgctcgctcgatggacacaggaagatccagaagctagtggcacatctagcaacagagccagatcagaacccaggttggaggtggagtagttcagaatcaactgacgcagccgggaattgagctttgcaaagccacttgcaaggaagggaagcatctgcccaaccctcccccaccgcgcgccctggatcctctgcctgccccctcccccgtgacgtcaccctagtcctgtcccggggagcctgcaaagcctctcagattcaaactgctagacgcactgctgccaccgccaccgaattggaaacgcgcgcccaggctccgtcgtcgccttcgcccgccgaccgggccagccggctctccgacctccctacagaatcgcaccccagtccctccctggcagctcggcttccctcagctccaactcttctcttccgctcctgcctcctgtcggatttttaatttctgcgcacccccagtcaaattaaatcaaccaacaaaaagcagggcatcccccctggaagcagcgtcttattttaccttgttctcccacttcctgaagatgctaaactcctggtggactgcagaggagagggattcagtcttctcctgatgtcgattgcgatttctgctgggagctcaagacgggcgagctgcccgagatctcttcgagataccccaggggaggaggagatgggcaggatttagtaggacaactcggttactaatgacttggcggctggctgcgaccccccgggaaatcaggtttgcctgtaggtacctgagttgacaccgaaggtgcctaaagatgctgagcggcgtttggttcctcagtgtgttaaccgtggccgggatcttacagacagagagtcgcaaaactgccaaagacatttgcaagatccgctgtctgtgcgaagaaaaggaaaacgtactgaatatcaactgtgagaacaaaggatttacaacagttagcctgctccagcccccccagtatcgaatctatcagctttttctcaatggaaacctcttgacaagactgtatccaaacgaatttgtcaattactccaacgcggtgactcttcacctaggtaacaacgggttacaggagatccgaacgggggcattcagtggcctgaaaactctcaaaagactgcatctcaacaacaacaagcttgagatattgagggaggacaccttcctaggcctggagagcctggagtatctccaggccgactacaattacatcagtgccatcgaggctggggcattcagcaaacttaacaagctcaaagtgctcatcctgaatgacaaccttctgctttcactgcccagcaatgtgttccgctttgtcctgctgacccacttagacctcagggggaataggctaaaagtaatgccttttgctggcgtccttgaacatattggagggatcatggagattcagctggaggaaaatccatggaattgcacttgtgacttacttcctctcaaggcctggctagacaccataactgtttttgtgggagagattgtctgtgagactccctttaggttgcatgggaaagacgtgacccagctgaccaggcaagacctctgtcccagaaaaagtgccagtgattccagtcagaggggcagccatgctgacacccacgtccaaaggctgtcacctacaatgaatcctgctctcaacccaaccagggctccgaaagccagccggccgcccaaaatgagaaatcgtccaactcctcgagtgactgtgtcaaaggacaggcaaagttttggacccatcatggtgtaccagaccaagtctcctgtgcctctcacctgtcccagcagctgtgtctgcacctctcagagctcagacaatggtctgaatgtaaactgccaagaaaggaagttcactaatatctctgacctgcagcccaaaccgaccagtccaaagaaactctacctaacagggaactatcttcaaactgtctataagaatgacctcttagaatacagttctttggacttactgcacttaggaaacaacaggattgcagtcattcaggaaggtgcctttacaaacctgaccagtttacgcagactttatctgaatggcaattaccttgaagtgctgtacccttctatgtttgatggactgcagagcttgcaatatctctatttagagtataatgtcattaaggaaattaagcctctgacctttgatgctttgattaacctacagctactgtttctgaacaacaaccttcttcggtccttacctgataatatatttggggggacggccctaaccaggctgaatctgagaaacaaccatttttctcacctgcccgtgaaaggggttctggatcagctcccggctttcatccagatagatctgcaggagaacccctgggactgtacctgtgacatcatggggctgaaagactggacagaacatgccaattcccctgtcatcattaatgaggtgacttgcgaatctcctgctaagcatgcaggggagatactaaaatttctggggagggaggctatctgtccagacagcccaaacttgtcagatggaaccgtcttgtcaatgaatcacaatacagacacacctcggtcgcttagtgtgtctcctagttcctatcctgaactacacactgaagttccactgtctgtcttaattctgggattgcttgttgttttcatcttatctgtctgttttggggctggtttattcgtctttgtcttgaaacgccgaaagggagtgccgagcgttcccaggaataccaacaacttagacgtaagctcctttcaattacagtatgggtcttacaacactgagactcacgataaaacagacggccatgtctacaactatatccccccacctgtgggtcagatgtgccaaaaccccatctacatgcagaaggaaggagacccagtagcctattaccgaaacctgcaagagttcagctatagcaacctggag

SEQ ID NO: 28253 - DNA, 7672 bp, Homo sapiens
  source 1..7672: mol_type = unassigned DNA
gcggccgccctctaccctcaatccccactggagattcctcaccccgggaccgtccgcgcgggcgtggtcgggctccgcgcctcgcgcagcggggtggcacaggcggccagggagggcccacgcacccggcgcgagctagaagcctccggtcggcctgcagtgcccaagtcccatggcgagggcagcccgagtggccgtcgcggctgtaggtccgcatgccgggcaccgcaccaggcgtctagcaggtaggggcagggaaggtagggctgcgctggcggccggtgcccagttaccggcgatcggggacgctcggagacacctggtctcccggaagcgcccttcggaaatgggattcgacccggcttgcgggcggcgggtgtttagaagaagaggctgcgggcaagcagtgccccctctctggttccccggactcctcttagccccctcgtggcctgatgggcggccgggacggaggtgggctgtaagcccgccggcacccaccgtgtcctgtggaaggcttggagacctgagccaggctctactcggttagatgcgagtgagacaggcgacggagttcgtctttaagcctcccttgcctcagcaaggagagggagcgttttccttattttaatgaccgcctttccctcccttggggtcccagttcaccctgaacctttccacagccttaaaagcccgctctccctagcggagtgctgcggcagttcttcagaagacacggggccaaatgaaacttacttaaagtggttatcgcgtttcaggctgatttgttcctagtaactacgttttggaaagcagctgtggactctcaaggacaggcaggaacgaagacctccttagggtccgagtgtcgcttcccacagttagattacccatgaatttccttgattctgtaggtctcaagaatctcatgagcccccaaccacctccacctttctctctgaatctctctcctgtctctgaaattcttcgcaaaaataatctgtcctcaaggaatattgaaagcgtcatcaatgtcttgaaggaaattactgtatctgagaaccgaaactagtatttgatgtttcactttcaaatacatttttttttaataaaaaggatacctttaagtaaaacactaccactgctatttacgtttaagtagatttttaattcatattaagcagtagtgtgctttttggaaagatgatggactgggactcataatccctgggttttgtttctatttgtagtttcttgagtaagtcagcactttccctggttaagaaatgacctcatctgtaaaatgaacctgacttctaaggtcttgttcggctctcacgtctttacttcagttaaatattgacataatacatgtttgttgaatgaatgactgaatgaataaatcttattgctctaggaactatgtgcttttaacctttggaaatacatagaaacaaatgcctcctttgctaggaaagggagcttaattgtgctcccactgcatcagactgcttccatctaatgatgcaattgcaatacagggtgggaggccatccacagggctgtccctctgcctcagagctcatctcaagtttgcccttctctatggagaaggaaaatttgagtctccagaaggaaagtattttgctaaacgccaagcaagaattagagggtaagggggcttctgatgcctggtccaaggctcttagaagaagaagaaggagaaagggagaaagctcaagaaaataatgcacagatcaccagctacaggtggccctagtgcctaagtttataaactacccccgcccttcccggagagaaaggagcttgtataaagggaacaatcctagaacctaggcttaacaaggaaggagaaggggagaagcaagggtcattctgttctcaagtggtttgttgtatctgtgtgtttatctattccacatttggccaggcagtgggactccgggaaagcaagctgaagtgttttgtgggacaggcacatcatttggtcaactccttttccctggttgattccctccttttcctgacccatctcccccttcctaccagaggcaaccaaggcctttccaggcaacagcagacattatttaccccttgcgaattgattccacaatggaagactcttgggtccaaggagctgtaagataattaaggagaaaacagataatgaaggcaaaaatccaacacctggccattagcaatgctctggaaaggctatttaaacccgcattggatatcagagctgggagggcccatacagtctacctacctgccttttgcagatggacacaggaagatccagaagctagtggcacatctagcaacagagccagatcagaacccaggtaagctcggtctcaggccaggattccttttccatctcctctctttctcaggagccagtcttcctgcaccagcttcctcttttctcctagctcccctgcccctgcagcctggagggctcaaccacccttcctttggctcccactcccagctgaggctcagcctggcagtgcttttctgacacccacttcttttctccttcctccaggcaagaagtgcacgtttaaacctcattatctggctaagtataaacctcagggagaaaaggggtttgtttttgtttttctcagtctataagctaacattgagctgactttcagagtccaggcaaatatgtttggtgggtcaccacccagaaaggaattctcttagcactgaatcagggctctgtatgtaaagtataaatcccctaagagaactcctcaccctcctacacagacacattggtgcatgcacacacaccccactctctgcacagagagcatctgagctaggagctggcaagtggggcaccagtcctgtagcaaagaggcacaccacacacacacacacacacacacacacacactctctctctctctctctctcactcacacacacacacacacacacacacacacgcttctcccttgcttgggaatctgggagaagaaccccccacccccacccctgccctccataggcattgtgtaggtgagagaaagagggaggagtgagagagaacacacagaggggcccaaggaggtgccaggccattagcagggcccctccttgagaaacccctctgcaggagcttctcctgccgccagccaggttggaggtggagtagttcagaatcaactgacgcagccgggaattgagctttgcaaagccacttgcaaggaagggaagcatctgcccaaccctcccccaccgcgcgccctggatcctctgcctgccccctcccccgtgacgtcaccctagtcctgtcccggggagcctgcaaagcctctcagattcaaactgctagacgcactgctgccaccgccaccgaattggaaacgcgcgcccaggctccgtcgtcgccttcgcccgccgaccgggccagccggctctccgacctccctacagaatcgcaccccagtccctccctggcagctcggcttccctcagctccaactcttctcttccgctcctgcctcctgtcggatttttaatttctgcgcacccccagtcaaattaaatcaaccaacaaaaagcagggcatcccccctggaagcagcgtcttattttaccttgttctcccacttcctgaagatgctaaactcctggtggactgcagaggagagggattcagtcttctcctgatgtgtgagtaacccccacctcgcactgtctttcccatctctatctctcctctacacctgccgccagccccctgattcctgattttcccaccccctttttgcgctttttttttttttcctaaagcgattgcgatttctgctgggagctcaagacgggcgagctgcccgagatctcttcgagataccccaggggaggaggagatgggcaggatttagtaggacaactcggttactaatgacttggcggctggctgcgaccccccgggaaatcaggtgcaagcatgtgtgttcccggggcgcgtgtgtgggtggcctcgggatgggggaatagggagcggagaaaagaaaccgctttggaaaatgcaatgatttcattctgccgtgttgctaaccccctcattctccctcgctcccactccgcctccttgctttaccatttttaatcgggcttccttgtttctttcttccctgcacccgcttcttccccctgcccccacctaaggtttgcctgtaggtacctgagttgacaccgaaggtgcctaaagatgctgagcggcgtttggttcctcagtgtgttaaccgtggccgggatcttacagacagagagtcgcaaaactgccaaagacatttgcaagatccgctgtctgtgcgaagaaaaggaaaacgtactgaatatcaactgtgagaacaaaggatttacaacagttagcctgctccagcccccccagtatcgaatctatcagctttttctcaatggaaacctcttgacaagactgtatccaaacgaatttgtcaattactccaacgcggtgactcttcacctaggtaacaacgggttacaggagatccgaacgggggcattcagtggcctgaaaactctcaaaagactgcatctcaacaacaacaagcttgagatattgagggaggacaccttcctaggcctggagagcctggagtatctccaggccgactacaattacatcagtgccatcgaggctggggcattcagcaaacttaacaagctcaaagtgctcatcctgaatgacaaccttctgctttcactgcccagcaatgtgttccgctttgtcctgctgacccacttagacctcagggggaataggctaaaagtaatgccttttgctggcgtccttgaacatattggagggatcatggagattcagctggaggaaaatccatggaattgcacttgtgacttacttcctctcaaggcctggctagacaccataactgtttttgtgggagagattgtctgtgagactccctttaggttgcatgggaaagacgtgacccagctgaccaggcaagacctctgtcccagaaaaagtgccagtgattccagtcagaggggcagccatgctgacacccacgtccaaaggctgtcacctacaatgaatcctgctctcaacccaaccagggctccgaaagccagccggccgcccaaaatgagaaatcgtccaactcctcgagtgactgtgtcaaaggacaggcaaagttttggacccatcatggtgtaccagaccaagtctcctgtgcctctcacctgtcccagcagctgtgtctgcacctctcagagctcagacaatggtctgaatgtaaactgccaagaaaggaagttcactaatatctctgacctgcagcccaaaccgaccagtccaaagaaactctacctaacagggaactatcttcaaactgtctataagaatgacctcttagaatacagttctttggacttactgcacttaggaaacaacaggattgcagtcattcaggaaggtgcctttacaaacctgaccagtttacgcagactttatctgaatggcaattaccttgaagtgctgtacccttctatgtttgatggactgcagagcttgcaatatctctatttagagtataatgtcattaaggaaattaagcctctgacctttgatgctttgattaacctacagctactgtttctgaacaacaaccttcttcggtccttacctgataatatatttggggggacggccctaaccaggctgaatctgagaaacaaccatttttctcacctgcccgtgaaaggggttctggatcagctcccggctttcatccagatagatctgcaggagaacccctgggactgtacctgtgacatcatggggctgaaagactggacagaacatgccaattcccctgtcatcattaatgaggtgacttgcgaatctcctgctaagcatgcaggggagatactaaaatttctggggagggaggctatctgtccagacagcccaaacttgtcagatggaaccgtcttgtcaatgaatcacaatacagacacacctcggtcgcttagtgtgtctcctagttcctatcctgaactacacactgaagttccactgtctgtcttaattctgggattgcttgttgttttcatcttatctgtctgttttggggctggtttattcgtctttgtcttgaaacgccgaaagggagtgccgagcgttcccaggaataccaacaacttagacgtaagctcctttcaattacagtatgggtcttacaacactgagactcacgataaaacagacggccatgtctacaactatatccccccacctgtgggtcagatgtgccaaaaccccatctacatgcagaaggaaggagacccagtagcctattaccgaaacctgcaagagttcagctatagcaacctggaggagaaaaaagaagagccagccacacctgcttacacaataagtgccactgagctgctagaaaagcaggccacaccaagagagcctgagctgctgtatcaaaatattgctgagcgagtcaaggaacttcccagcgcaggcctagtccactataacttttgtaccttacctaaaaggcagtttgccccttcctatgaatctcgacgccaaaaccaagacagaatcaataaaaccgttttatatggaactcccaggaaatgctttgtggggcagtcaaaacccaaccaccctttactgcaagctaagccgcaatcagaaccggactacctcgaagttctggaaaaacaaactgcaatcagtcagctgtgaagggaaatcatttacaaccctaaggcatcagaggatgctgctccgaactgttggaaacaaggacattagcttttgtgtttgtttttgttctccctttcccagtgttaatgggggactttgaaaatgtttgggagataggatgaagtcatgattttgcttttgcaagttttcctttaaattatttctctctcgctctcctcccctccttttttttttttttttttttttctttttcccttctcttcttaggaaccatcagtggacatgaatgtttctacaatgcatttcttcatagattttgtttatggttttgtttcttttttcttctttgtttttcagtgtgggagtgggaagaggagattatagtgactgaagaaagaataggcaaacttttcaaatgaaaatggatatttagtgtattttgtagaagatctccaaagatcttttgtgactacaacttcttttgtaaataatgatatatggtatttccatcgtcagttaccgagtatagccactgggtatcactactttgtgttaaagtgccttcgcactttaagtacattacttaaatgttgcttttagctttgataaattgaaaatattttaatgtgttgtatttttgaaattgaaaacactgtaaaatagattgatgtgtcagctatattaagtcaacgtacagtttgcttgagttatagaaaccagcctgtcatcaaatgattctagttctaggactttgtaggcttaactataaaatatttcctttcctctgggtttaagtgattttatttaagtcaactaaggggatttaacagtggactagaggtaataagccacctcagtcaggattaataattcattaataaaatatatttaacccaa

SEQ ID NO: 28254 - DNA, 4142 bp, Homo sapiens
  source 1..4142: mol_type = unassigned DNA
gttggaggtggagtagttcagaatcaactgacgcagccgggaattgagctttgcaaagccacttgcaaggaagggaagcatctgcccaaccctcccccaccgcgcgccctggatcctctgcctgccccctcccccgtgacgtcaccctagtcctgtcccggggagcctgcaaagcctctcagattcaaactgctagacgcactgctgccaccgccaccgaattggaaacgcgcgcccaggctccgtcgtcgccttcgcccgccgaccgggccagccggctctccgacctccctacagaatcgcaccccagtccctccctggcagctcggcttccctcagctccaactcttctcttccgctcctgcctcctgtcggatttttaatttctgcgcacccccagtcaaattaaatcaaccaacaaaaagcagggcatcccccctggaagcagcgtcttattttaccttgttctcccacttcctgaagatgctaaactcctggtggactgcagaggagagggattcagtcttctcctgatgtcgattgcgatttctgctgggagctcaagacgggcgagctgcccgagatctcttcgagataccccaggggaggaggagatgggcaggatttagtaggacaactcggttactaatgacttggcggctggctgcgaccccccgggaaatcaggtgcaagcatgtacctgagttgacaccgaaggtgcctaaagatgctgagcggcgtttggttcctcagtgtgttaaccgtggccgggatcttacagacagagagtcgcaaaactgccaaagacatttgcaagatccgctgtctgtgcgaagaaaaggaaaacgtactgaatatcaactgtgagaacaaaggatttacaacagttagcctgctccagcccccccagtatcgaatctatcagctttttctcaatggaaacctcttgacaagactgtatccaaacgaatttgtcaattactccaacgcggtgactcttcacctaggtaacaacgggttacaggagatccgaacgggggcattcagtggcctgaaaactctcaaaagactgcatctcaacaacaacaagcttgagatattgagggaggacaccttcctaggcctggagagcctggagtatctccaggccgactacaattacatcagtgccatcgaggctggggcattcagcaaacttaacaagctcaaagtgctcatcctgaatgacaaccttctgctttcactgcccagcaatgtgttccgctttgtcctgctgacccacttagacctcagggggaataggctaaaagtaatgccttttgctggcgtccttgaacatattggagggatcatggagattcagctggaggaaaatccatggaattgcacttgtgacttacttcctctcaaggcctggctagacaccataactgtttttgtgggagagattgtctgtgagactccctttaggttgcatgggaaagacgtgacccagctgaccaggcaagacctctgtcccagaaaaagtgccagtgattccagtcagaggggcagccatgctgacacccacgtccaaaggctgtcacctacaatgaatcctgctctcaacccaaccagggctccgaaagccagccggccgcccaaaatgagaaatcgtccaactcctcgagtgactgtgtcaaaggacaggcaaagttttggacccatcatggtgtaccagaccaagtctcctgtgcctctcacctgtcccagcagctgtgtctgcacctctcagagctcagacaatggtctgaatgtaaactgccaagaaaggaagttcactaatatctctgacctgcagcccaaaccgaccagtccaaagaaactctacctaacagggaactatcttcaaactgtctataagaatgacctcttagaatacagttctttggacttactgcacttaggaaacaacaggattgcagtcattcaggaaggtgcctttacaaacctgaccagtttacgcagactttatctgaatggcaattaccttgaagtgctgtacccttctatgtttgatggactgcagagcttgcaatatctctatttagagtataatgtcattaaggaaattaagcctctgacctttgatgctttgattaacctacagctactgtttctgaacaacaaccttcttcggtccttacctgataatatatttggggggacggccctaaccaggctgaatctgagaaacaaccatttttctcacctgcccgtgaaaggggttctggatcagctcccggctttcatccagatagatctgcaggagaacccctgggactgtacctgtgacatcatggggctgaaagactggacagaacatgccaattcccctgtcatcattaatgaggtgacttgcgaatctcctgctaagcatgcaggggagatactaaaatttctggggagggaggctatctgtccagacagcccaaacttgtcagatggaaccgtcttgtcaatgaatcacaatacagacacacctcggtcgcttagtgtgtctcctagttcctatcctgaactacacactgaagttccactgtctgtcttaattctgggattgcttgttgttttcatcttatctgtctgttttggggctggtttattcgtctttgtcttgaaacgccgaaagggagtgccgagcgttcccaggaataccaacaacttagacgtaagctcctttcaattacagtatgggtcttacaacactgagactcacgataaaacagacggccatgtctacaactatatccccccacctgtgggtcagatgtgccaaaaccccatctacatgcagaaggaaggagacccagtagcctattaccgaaacctgcaagagttcagctatagcaacctggaggagaaaaaagaagagccagccacacctgcttacacaataagtgccactgagctgctagaaaagcaggccacaccaagagagcctgagctgctgtatcaaaatattgctgagcgagtcaaggaacttcccagcgcaggcctagtccactataacttttgtaccttacctaaaaggcagtttgccccttcctatgaatctcgacgccaaaaccaagacagaatcaataaaaccgttttatatggaactcccaggaaatgctttgtggggcagtcaaaacccaaccaccctttactgcaagctaagccgcaatcagaaccggactacctcgaagttctggaaaaacaaactgcaatcagtcagctgtgaagggaaatcatttacaaccctaaggcatcagaggatgctgctccgaactgttggaaacaaggacattagcttttgtgtttgtttttgttctccctttcccagtgttaatgggggactttgaaaatgtttgggagataggatgaagtcatgattttgcttttgcaagttttcctttaaattatttctctctcgctctcctcccctccttttttttttttttttttttttctttttcccttctcttcttaggaaccatcagtggacatgaatgtttctacaatgcatttcttcatagattttgtttatggttttgtttcttttttcttctttgtttttcagtgtgggagtgggaagaggagattatagtgactgaagaaagaataggcaaacttttcaaatgaaaatggatatttagtgtattttgtagaagatctccaaagatcttttgtgactacaacttcttttgtaaataatgatatatggtatttccatcgtcagttaccgagtatagccactgggtatcactactttgtgttaaagtgccttcgcactttaagtacattacttaaatgttgcttttagctttgataaattgaaaatattttaatgtgttgtatttttgaaattgaaaacactgtaaaatagattgatgtgtcagctatattaagtcaacgtacagtttgcttgagttatagaaaccagcctgtcatcaaatgattctagttctaggactttgtaggcttaactataaaatatttcctttcctctgggtttaagtgattttatttaagtcaactaaggggatttaacagtggactagaggtaataagccacctcagtcaggattaataattcattaataaaatatatttaaccc

SEQ ID NO: 28255 - DNA, 3995 bp, Homo sapiens
  source 1..3995: mol_type = unassigned DNA
gttggaggtggagtagttcagaatcaactgacgcagccgggaattgagctttgcaaagccacttgcaaggaagggaagcatctgcccaaccctcccccaccgcgcgccctggatcctctgcctgccccctcccccgtgacgtcaccctagtcctgtcccggggagcctgcaaagcctctcagattcaaactgctagacgcactgctgccaccgccaccgaattggaaacgcgcgcccaggctccgtcgtcgccttcgcccgccgaccgggccagccggctctccgacctccctacagaatcgcaccccagtccctccctggcagctcggcttccctcagctccaactcttctcttccgctcctgcctcctgtcggatttttaatttctgcgcacccccagtcaaattaaatcaaccaacaaaaagcagggcatcccccctggaagcagcgtcttattttaccttgttctcccacttcctgaagatgctaaactcctggtggactgcagaggagagggattcagtcttctcctgatgtgtttgcctgtaggtacctgagttgacaccgaaggtgcctaaagatgctgagcggcgtttggttcctcagtgtgttaaccgtggccgggatcttacagacagagagtcgcaaaactgccaaagacatttgcaagatccgctgtctgtgcgaagaaaaggaaaacgtactgaatatcaactgtgagaacaaaggatttacaacagttagcctgctccagcccccccagtatcgaatctatcagctttttctcaatggaaacctcttgacaagactgtatccaaacgaatttgtcaattactccaacgcggtgactcttcacctaggtaacaacgggttacaggagatccgaacgggggcattcagtggcctgaaaactctcaaaagactgcatctcaacaacaacaagcttgagatattgagggaggacaccttcctaggcctggagagcctggagtatctccaggccgactacaattacatcagtgccatcgaggctggggcattcagcaaacttaacaagctcaaagtgctcatcctgaatgacaaccttctgctttcactgcccagcaatgtgttccgctttgtcctgctgacccacttagacctcagggggaataggctaaaagtaatgccttttgctggcgtccttgaacatattggagggatcatggagattcagctggaggaaaatccatggaattgcacttgtgacttacttcctctcaaggcctggctagacaccataactgtttttgtgggagagattgtctgtgagactccctttaggttgcatgggaaagacgtgacccagctgaccaggcaagacctctgtcccagaaaaagtgccagtgattccagtcagaggggcagccatgctgacacccacgtccaaaggctgtcacctacaatgaatcctgctctcaacccaaccagggctccgaaagccagccggccgcccaaaatgagaaatcgtccaactcctcgagtgactgtgtcaaaggacaggcaaagttttggacccatcatggtgtaccagaccaagtctcctgtgcctctcacctgtcccagcagctgtgtctgcacctctcagagctcagacaatggtctgaatgtaaactgccaagaaaggaagttcactaatatctctgacctgcagcccaaaccgaccagtccaaagaaactctacctaacagggaactatcttcaaactgtctataagaatgacctcttagaatacagttctttggacttactgcacttaggaaacaacaggattgcagtcattcaggaaggtgcctttacaaacctgaccagtttacgcagactttatctgaatggcaattaccttgaagtgctgtacccttctatgtttgatggactgcagagcttgcaatatctctatttagagtataatgtcattaaggaaattaagcctctgacctttgatgctttgattaacctacagctactgtttctgaacaacaaccttcttcggtccttacctgataatatatttggggggacggccctaaccaggctgaatctgagaaacaaccatttttctcacctgcccgtgaaaggggttctggatcagctcccggctttcatccagatagatctgcaggagaacccctgggactgtacctgtgacatcatggggctgaaagactggacagaacatgccaattcccctgtcatcattaatgaggtgacttgcgaatctcctgctaagcatgcaggggagatactaaaatttctggggagggaggctatctgtccagacagcccaaacttgtcagatggaaccgtcttgtcaatgaatcacaatacagacacacctcggtcgcttagtgtgtctcctagttcctatcctgaactacacactgaagttccactgtctgtcttaattctgggattgcttgttgttttcatcttatctgtctgttttggggctggtttattcgtctttgtcttgaaacgccgaaagggagtgccgagcgttcccaggaataccaacaacttagacgtaagctcctttcaattacagtatgggtcttacaacactgagactcacgataaaacagacggccatgtctacaactatatccccccacctgtgggtcagatgtgccaaaaccccatctacatgcagaaggaaggagacccagtagcctattaccgaaacctgcaagagttcagctatagcaacctggaggagaaaaaagaagagccagccacacctgcttacacaataagtgccactgagctgctagaaaagcaggccacaccaagagagcctgagctgctgtatcaaaatattgctgagcgagtcaaggaacttcccagcgcaggcctagtccactataacttttgtaccttacctaaaaggcagtttgccccttcctatgaatctcgacgccaaaaccaagacagaatcaataaaaccgttttatatggaactcccaggaaatgctttgtggggcagtcaaaacccaaccaccctttactgcaagctaagccgcaatcagaaccggactacctcgaagttctggaaaaacaaactgcaatcagtcagctgtgaagggaaatcatttacaaccctaaggcatcagaggatgctgctccgaactgttggaaacaaggacattagcttttgtgtttgtttttgttctccctttcccagtgttaatgggggactttgaaaatgtttgggagataggatgaagtcatgattttgcttttgcaagttttcctttaaattatttctctctcgctctcctcccctccttttttttttttttttttttttctttttcccttctcttcttaggaaccatcagtggacatgaatgtttctacaatgcatttcttcatagattttgtttatggttttgtttcttttttcttctttgtttttcagtgtgggagtgggaagaggagattatagtgactgaagaaagaataggcaaacttttcaaatgaaaatggatatttagtgtattttgtagaagatctccaaagatcttttgtgactacaacttcttttgtaaataatgatatatggtatttccatcgtcagttaccgagtatagccactgggtatcactactttgtgttaaagtgccttcgcactttaagtacattacttaaatgttgcttttagctttgataaattgaaaatattttaatgtgttgtatttttgaaattgaaaacactgtaaaatagattgatgtgtcagctatattaagtcaacgtacagtttgcttgagttatagaaaccagcctgtcatcaaatgattctagttctaggactttgtaggcttaactataaaatatttcctttcctctgggtttaagtgattttatttaagtcaactaaggggatttaacagtggactagaggtaataagccacctcagtcaggattaataattcattaataaaatatatttaaccc

SEQ ID NO: 28256 - DNA, 4154 bp, Homo sapiens
  source 1..4154: mol_type = unassigned DNA
gttggaggtggagtagttcagaatcaactgacgcagccgggaattgagctttgcaaagccacttgcaaggaagggaagcatctgcccaaccctcccccaccgcgcgccctggatcctctgcctgccccctcccccgtgacgtcaccctagtcctgtcccggggagcctgcaaagcctctcagattcaaactgctagacgcactgctgccaccgccaccgaattggaaacgcgcgcccaggctccgtcgtcgccttcgcccgccgaccgggccagccggctctccgacctccctacagaatcgcaccccagtccctccctggcagctcggcttccctcagctccaactcttctcttccgctcctgcctcctgtcggatttttaatttctgcgcacccccagtcaaattaaatcaaccaacaaaaagcagggcatcccccctggaagcagcgtcttattttaccttgttctcccacttcctgaagatgctaaactcctggtggactgcagaggagagggattcagtcttctcctgatgtcgattgcgatttctgctgggagctcaagacgggcgagctgcccgagatctcttcgagataccccaggggaggaggagatgggcaggatttagtaggacaactcggttactaatgacttggcggctggctgcgaccccccgggaaatcaggtgcaagcatgtttgcctgtaggtacctgagttgacaccgaaggtgcctaaagatgctgagcggcgtttggttcctcagtgtgttaaccgtggccgggatcttacagacagagagtcgcaaaactgccaaagacatttgcaagatccgctgtctgtgcgaagaaaaggaaaacgtactgaatatcaactgtgagaacaaaggatttacaacagttagcctgctccagcccccccagtatcgaatctatcagctttttctcaatggaaacctcttgacaagactgtatccaaacgaatttgtcaattactccaacgcggtgactcttcacctaggtaacaacgggttacaggagatccgaacgggggcattcagtggcctgaaaactctcaaaagactgcatctcaacaacaacaagcttgagatattgagggaggacaccttcctaggcctggagagcctggagtatctccaggccgactacaattacatcagtgccatcgaggctggggcattcagcaaacttaacaagctcaaagtgctcatcctgaatgacaaccttctgctttcactgcccagcaatgtgttccgctttgtcctgctgacccacttagacctcagggggaataggctaaaagtaatgccttttgctggcgtccttgaacatattggagggatcatggagattcagctggaggaaaatccatggaattgcacttgtgacttacttcctctcaaggcctggctagacaccataactgtttttgtgggagagattgtctgtgagactccctttaggttgcatgggaaagacgtgacccagctgaccaggcaagacctctgtcccagaaaaagtgccagtgattccagtcagaggggcagccatgctgacacccacgtccaaaggctgtcacctacaatgaatcctgctctcaacccaaccagggctccgaaagccagccggccgcccaaaatgagaaatcgtccaactcctcgagtgactgtgtcaaaggacaggcaaagttttggacccatcatggtgtaccagaccaagtctcctgtgcctctcacctgtcccagcagctgtgtctgcacctctcagagctcagacaatggtctgaatgtaaactgccaagaaaggaagttcactaatatctctgacctgcagcccaaaccgaccagtccaaagaaactctacctaacagggaactatcttcaaactgtctataagaatgacctcttagaatacagttctttggacttactgcacttaggaaacaacaggattgcagtcattcaggaaggtgcctttacaaacctgaccagtttacgcagactttatctgaatggcaattaccttgaagtgctgtacccttctatgtttgatggactgcagagcttgcaatatctctatttagagtataatgtcattaaggaaattaagcctctgacctttgatgctttgattaacctacagctactgtttctgaacaacaaccttcttcggtccttacctgataatatatttggggggacggccctaaccaggctgaatctgagaaacaaccatttttctcacctgcccgtgaaaggggttctggatcagctcccggctttcatccagatagatctgcaggagaacccctgggactgtacctgtgacatcatggggctgaaagactggacagaacatgccaattcccctgtcatcattaatgaggtgacttgcgaatctcctgctaagcatgcaggggagatactaaaatttctggggagggaggctatctgtccagacagcccaaacttgtcagatggaaccgtcttgtcaatgaatcacaatacagacacacctcggtcgcttagtgtgtctcctagttcctatcctgaactacacactgaagttccactgtctgtcttaattctgggattgcttgttgttttcatcttatctgtctgttttggggctggtttattcgtctttgtcttgaaacgccgaaagggagtgccgagcgttcccaggaataccaacaacttagacgtaagctcctttcaattacagtatgggtcttacaacactgagactcacgataaaacagacggccatgtctacaactatatccccccacctgtgggtcagatgtgccaaaaccccatctacatgcagaaggaaggagacccagtagcctattaccgaaacctgcaagagttcagctatagcaacctggaggagaaaaaagaagagccagccacacctgcttacacaataagtgccactgagctgctagaaaagcaggccacaccaagagagcctgagctgctgtatcaaaatattgctgagcgagtcaaggaacttcccagcgcaggcctagtccactataacttttgtaccttacctaaaaggcagtttgccccttcctatgaatctcgacgccaaaaccaagacagaatcaataaaaccgttttatatggaactcccaggaaatgctttgtggggcagtcaaaacccaaccaccctttactgcaagctaagccgcaatcagaaccggactacctcgaagttctggaaaaacaaactgcaatcagtcagctgtgaagggaaatcatttacaaccctaaggcatcagaggatgctgctccgaactgttggaaacaaggacattagcttttgtgtttgtttttgttctccctttcccagtgttaatgggggactttgaaaatgtttgggagataggatgaagtcatgattttgcttttgcaagttttcctttaaattatttctctctcgctctcctcccctccttttttttttttttttttttttctttttcccttctcttcttaggaaccatcagtggacatgaatgtttctacaatgcatttcttcatagattttgtttatggttttgtttcttttttcttctttgtttttcagtgtgggagtgggaagaggagattatagtgactgaagaaagaataggcaaacttttcaaatgaaaatggatatttagtgtattttgtagaagatctccaaagatcttttgtgactacaacttcttttgtaaataatgatatatggtatttccatcgtcagttaccgagtatagccactgggtatcactactttgtgttaaagtgccttcgcactttaagtacattacttaaatgttgcttttagctttgataaattgaaaatattttaatgtgttgtatttttgaaattgaaaacactgtaaaatagattgatgtgtcagctatattaagtcaacgtacagtttgcttgagttatagaaaccagcctgtcatcaaatgattctagttctaggactttgtaggcttaactataaaatatttcctttcctctgggtttaagtgattttatttaagtcaactaaggggatttaacagtggactagaggtaataagccacctcagtcaggattaataattcattaataaaatatatttaaccc

SEQ ID NO: 28257 - DNA, 5431 bp, Homo sapiens
  source 1..5431: mol_type = unassigned DNA
gcctccccgagtcgcagatgctgcgggcgcctccgggaaaagatctgggcggcgcgctcgctcgatggacacaggaagatccagaagctagtggcacatctagcaacagagccagatcagaacccaggtaagctcggtctcaggccaggattccttttccatctcctctctttctcaggagccagtcttcctgcaccagcttcctcttttctcctagctcccctgcccctgcagcctggagggctcaaccacccttcctttggctcccactcccagctgaggctcagcctggcagtgcttttctgacacccacttcttttctccttcctccaggcaagaagtgcacgtttaaacctcattatctggctaagtataaacctcagggagaaaaggggtttgtttttgtttttctcagtctataagctaacattgagctgactttcagagtccaggcaaatatgtttggtgggtcaccacccagaaaggaattctcttagcactgaatcagggctctgtatgtaaagtataaatcccctaagagaactcctcaccctcctacacagacacattggtgcatgcacacacaccccactctctgcacagagagcatctgagctaggagctggcaagtggggcaccagtcctgtagcaaagaggcacaccacacacacacacacacacacacacacacactctctctctctctctctctcactcacacacacacacacacacacacacacacgcttctcccttgcttgggaatctgggagaagaaccccccacccccacccctgccctccataggcattgtgtaggtgagagaaagagggaggagtgagagagaacacacagaggggcccaaggaggtgccaggccattagcagggcccctccttgagaaacccctctgcaggagcttctcctgccgccagccaggttggaggtggagtagttcagaatcaactgacgcagccgggaattgagctttgcaaagccacttgcaaggaagggaagcatctgcccaaccctcccccaccgcgcgccctggatcctctgcctgccccctcccccgtgacgtcaccctagtcctgtcccggggagcctgcaaagcctctcagattcaaactgctagacgcactgctgccaccgccaccgaattggaaacgcgcgcccaggctccgtcgtcgccttcgcccgccgaccgggccagccggctctccgacctccctacagaatcgcaccccagtccctccctggcagctcggcttccctcagctccaactcttctcttccgctcctgcctcctgtcggatttttaatttctgcgcacccccagtcaaattaaatcaaccaacaaaaagcagggcatcccccctggaagcagcgtcttattttaccttgttctcccacttcctgaagatgctaaactcctggtggactgcagaggagagggattcagtcttctcctgatgtgtgagtaacccccacctcgcactgtctttcccatctctatctctcctctacacctgccgccagccccctgattcctgattttcccaccccctttttgcgctttttttttttttcctaaagcgattgcgatttctgctgggagctcaagacgggcgagctgcccgagatctcttcgagataccccaggggaggaggagatgggcaggatttagtaggacaactcggttactaatgacttggcggctggctgcgaccccccgggaaatcaggtgcaagcatgtgtgttcccggggcgcgtgtgtgggtggcctcgggatgggggaatagggagcggagaaaagaaaccgctttggaaaatgcaatgatttcattctgccgtgttgctaaccccctcattctccctcgctcccactccgcctccttgctttaccatttttaatcgggcttccttgtttctttcttccctgcacccgcttcttccccctgcccccacctaaggtttgcctgtaggtacctgagttgacaccgaaggtgcctaaagatgctgagcggcgtttggttcctcagtgtgttaaccgtggccgggatcttacagacagagagtcgcaaaactgccaaagacatttgcaagatccgctgtctgtgcgaagaaaaggaaaacgtactgaatatcaactgtgagaacaaaggatttacaacagttagcctgctccagcccccccagtatcgaatctatcagctttttctcaatggaaacctcttgacaagactgtatccaaacgaatttgtcaattactccaacgcggtgactcttcacctaggtaacaacgggttacaggagatccgaacgggggcattcagtggcctgaaaactctcaaaagactgcatctcaacaacaacaagcttgagatattgagggaggacaccttcctaggcctggagagcctggagtatctccaggccgactacaattacatcagtgccatcgaggctggggcattcagcaaacttaacaagctcaaagtgctcatcctgaatgacaaccttctgctttcactgcccagcaatgtgttccgctttgtcctgctgacccacttagacctcagggggaataggctaaaagtaatgccttttgctggcgtccttgaacatattggagggatcatggagattcagctggaggaaaatccatggaattgcacttgtgacttacttcctctcaaggcctggctagacaccataactgtttttgtgggagagattgtctgtgagactccctttaggttgcatgggaaagacgtgacccagctgaccaggcaagacctctgtcccagaaaaagtgccagtgattccagtcagaggggcagccatgctgacacccacgtccaaaggctgtcacctacaatgaatcctgctctcaacccaaccagggctccgaaagccagccggccgcccaaaatgagaaatcgtccaactcctcgagtgactgtgtcaaaggacaggcaaagttttggacccatcatggtgtaccagaccaagtctcctgtgcctctcacctgtcccagcagctgtgtctgcacctctcagagctcagacaatggtctgaatgtaaactgccaagaaaggaagttcactaatatctctgacctgcagcccaaaccgaccagtccaaagaaactctacctaacagggaactatcttcaaactgtctataagaatgacctcttagaatacagttctttggacttactgcacttaggaaacaacaggattgcagtcattcaggaaggtgcctttacaaacctgaccagtttacgcagactttatctgaatggcaattaccttgaagtgctgtacccttctatgtttgatggactgcagagcttgcaatatctctatttagagtataatgtcattaaggaaattaagcctctgacctttgatgctttgattaacctacagctactgtttctgaacaacaaccttcttcggtccttacctgataatatatttggggggacggccctaaccaggctgaatctgagaaacaaccatttttctcacctgcccgtgaaaggggttctggatcagctcccggctttcatccagatagatctgcaggagaacccctgggactgtacctgtgacatcatggggctgaaagactggacagaacatgccaattcccctgtcatcattaatgaggtgacttgcgaatctcctgctaagcatgcaggggagatactaaaatttctggggagggaggctatctgtccagacagcccaaacttgtcagatggaaccgtcttgtcaatgaatcacaatacagacacacctcggtcgcttagtgtgtctcctagttcctatcctgaactacacactgaagttccactgtctgtcttaattctgggattgcttgttgttttcatcttatctgtctgttttggggctggtttattcgtctttgtcttgaaacgccgaaagggagtgccgagcgttcccaggaataccaacaacttagacgtaagctcctttcaattacagtatgggtcttacaacactgagactcacgataaaacagacggccatgtctacaactatatccccccacctgtgggtcagatgtgccaaaaccccatctacatgcagaaggaaggagacccagtagcctattaccgaaacctgcaagagttcagctatagcaacctggaggagaaaaaagaagagccagccacacctgcttacacaataagtgccactgagctgctagaaaagcaggccacaccaagagagcctgagctgctgtatcaaaatattgctgagcgagtcaaggaacttcccagcgcaggcctagtccactataacttttgtaccttacctaaaaggcagtttgccccttcctatgaatctcgacgccaaaaccaagacagaatcaataaaaccgttttatatggaactcccaggaaatgctttgtggggcagtcaaaacccaaccaccctttactgcaagctaagccgcaatcagaaccggactacctcgaagttctggaaaaacaaactgcaatcagtcagctgtgaagggaaatcatttacaaccctaaggcatcagaggatgctgctccgaactgttggaaacaaggacattagcttttgtgtttgtttttgttctccctttcccagtgttaatgggggactttgaaaatgtttgggagataggatgaagtcatgattttgcttttgcaagttttcctttaaattatttctctctcgctctcctcccctccttttttttttttttttttttttctttttcccttctcttcttaggaaccatcagtggacatgaatgtttctacaatgcatttcttcatagattttgtttatggttttgtttcttttttcttctttgtttttcagtgtgggagtgggaagaggagattatagtgactgaagaaagaataggcaaacttttcaaatgaaaatggatatttagtgtattttgtagaagatctccaaagatcttttgtgactacaacttcttttgtaaataatgatatatggtatttccatcgtcagttaccgagtatagccactgggtatcactactttgtgttaaagtgccttcgcactttaagtacattacttaaatgttgcttttagctttgataaattgaaaatattttaatgtgttgtatttttgaaattgaaaacactgtaaaatagattgatgtgtcagctatattaagtcaacgtacagtttgcttgagttatagaaaccagcctgtcatcaaatgattctagttctaggactttgtaggcttaactataaaatatttcctttcctctgggtttaagtgattttatttaagtcaactaaggggatttaacagtggactagaggtaataagccacctcagtcaggattaataattcattaataaaatatatttaaccc

SEQ ID NO: 28258 - DNA, 4391 bp, Homo sapiens
  source 1..4391: mol_type = unassigned DNA
aagccgggattttgcctgcgatgcgcggcgagaggactgcggcggctgatttacacagttggcgcggaggaggggccgggggtgcgggggggacgcgctggcggagctccggcgatgggctgatctgggggctcccgagcgccgctcccttggtgcgcgatttgggggcggctgatggatttgcattcaggttccagccctgcgtttcctatattgactccttatacacgacctggcgctccagtttaggaggagacgttgttttgtaatcaaccacgaacgatgaaaccttccatagctgagatgcttcacagaggaaggatgttgtggataattcttctaagcacaattgctctaggatggactaccccgattcccctaatagaggactcagaggaaatagatgagccctgttttgatccatgctactgtgaagttaaagaaagcctctttcatatacattgtgacagtaaaggatttacaaatattagtcagattaccgagttctggtcaagaccttttaaactgtatctgcagaggaattctatgaggaaattatataccaacagttttcttcatttgaataatgctgtgtctattaatcttgggaacaatgcattgcaggacattcagactggagctttcaatggtcttaagattttaaagagactatatctacatgaaaacaaactagatgtcttcagaaatgacaccttccttggcttggaaagtctagaatatctgcaggcagattacaatgtcattaaacgtattgagagtggggcatttcggaacctaagtaaattgagggttctgattttaaatgataatctcatccccatgcttccaaccaatttatttaaggctgtctctttaacccatttggacctacgtggaaataggttaaaggttcttttttaccgaggaatgctagatcacattggcagaagcctgatggagctccagctggaagaaaacccttggaactgtacatgtgaaattgtacaactgaagagttggctggaacgcattccttatactgccctggtgggagacattacctgtgagacccctttccacttccatggaaaggacctacgagaaatcaggaagacagaactctgtcccttgttgtctgactctgaggtagaggctagtttgggaattccacattcgtcatcaagtaaggagaatgcatggccaactaagccttcctcaatgctatcctctgttcattttactgcttcttctgtcgaatacaagtcctcaaataaacagcctaagcccaccaaacagcctcgaacaccaaggccaccctccacctcccaagctttatatcctggtccaaaccagcctcccattgctccttatcagaccagaccaccaatccccattatatgccccactgggtgtacctgtaatttgcacatcaatgaccttggcttgactgtcaactgcaaagagcgaggatttaataacatttctgaacttcttccaaggcccttgaatgccaagaaactgtatctgagtagcaatctgattcagaaaatataccgttctgatttttggaatttttcttccttggatctcttgcatctggggaacaatcgtatttcctatgtccaagatggggcctttatcaacttgcccaacttaaagagcctcttccttaatggcaacgatatagagaagctgacaccaggcatgttccgaggcctacagagtttgcactacttgtactttgagttcaatgtcatccgggaaatccagcctgcagccttcagcctcatgcccaacttgaagctgctattcctcaataataacttactgaggactctgccaacagacgcctttgctggcacatccctggcccggctcaacctgaggaagaactacttcctctatcttcccgtggctggtgtcctggaacacttgaatgccattgtccagatagacctcaatgagaatccttgggactgcacctgtgacctggtcccctttaaacagtggatcgaaaccatcagctcagtcagtgtggttggtgatgtgctttgcaggagccctgagaacctcacgcaccgtgatgtgcgcactattgagctggaagttctttgcccagagatgctgcacgttgcaccagctggagaatccccagcccagcctggagattctcaccttattggggcaccaaccagtgcatcaccttatgagttttctcctcctgggggccctgtgccactttctgtgttaattctcagcctgctggttctgtttttctcagcagtctttgttgctgcaggcctctttgcctacgtgctccgaaggcgtcgaaagaagctgcccttcagaagcaagcggcaggaaggtgtggaccttactggcatccaaatgcaatgccacaggctgtttgaggatggtggaggtggtggtggcggaagtgggggtggtggtcgaccaactctttcctctccagagaaggcccctcccgtgggtcatgtgtatgagtacatcccccacccggttacccaaatgtgcaacaaccccatctacaagcctcgtgaggaggaggaggtggctgtttcatcagcccaagaagcagggagtgcagaacgtgggggtccagggacacaaccaccgggaatgggtgaggctctcctaggaagtgagcagtttgctgagacacccaaggagaaccatagtaactaccggaccttgctggaaaaagagaaggagtgggccctagcagtgtccagctcccagcttaacaccatagtgacggtgaatcaccatcaccctcaccacccagcagttggtggggtttcaggagtagttgggggaactgggggagacttggcagggttccgccaccatgagaaaaatggtggggtggtgctgtttcctcctgggggaggctgtggtagtggcagtatgctactagatcgagagaggccacagcctgccccctgcacagtgggatttgtggactgtctctatggaacagtgcccaaattaaaggaactgcacgtgcaccctcctggcatgcaatacccagacttacagcaggatgccaggctcaaagaaacccttctcttctcggctggaaagggcttcacagaccaccaaacccaaaaaagtgattacctcgagttaagggccaaacttcaaaccaagccggattacctcgaagtcctggagaagacaacatacaggttctaacagagagaagaaaatatattagtgctttttttttttcaaaagaaaaggaaaataaaagaaatatatcccttgctccctttacacttgtcccagtaactccatcctcacgatctttcctaccctgaacaaaactaaaaccgcatgataactagagaatacagatgtatgctctcccctctcagatgcgatttggaggaagggccatactcagatcattaatcaatgaaagtgccttcgcagacttttgccagcaaatgttatcattatttttttatactgaaacttgagactttgactgtgccatgtataagatatactggggatcattgtatggatcctaattaagtaaaattcaatgtgtctttttattttcagtaactattttttttatagttgtagttttgatttaaagggggggaaacaagttgacatttgtcatttgtggctttctttcttatcatcatggcacagattctgtacatgtattaacaatgcagtttgctgcatgcctggaaactgcaagatggggagggagggggcgggtcttgctcgaatgttctcactcactatcttgtctctcatacacatatccatctgcagaccatggtccctaaacctgcagtttcttcctgctggtgcaggtacacacacacacacacacacacacacacacacacacacacactccataccatttccattcaactcaatctgcttagttcgggtttgatccatttttctcctctccatagttctaccacccttcactgctagtgtacagctcacagcatctctcctaccaccctgggaaaagtcacattctaggctggattctactgaagtagaggcctggtggtttaacagccgaagacacacgcctagggatgagcaccctctttgtgacacttcatcctgatgccaagattttttggagaacatctgcactttcttatatatatatataatattaaaaaaagcaactgggtatatatcactaacagctttgtaggaagcacttttaatgttttctctctcacacacaaagattcaaaagaaatgtgcatatatttattctgtaatttcagtgattataaattgtaaaggtaatgtttaatcattgtatagtgattatgcctctggtatagctttcctaataaaaagtttttgaaaaacat

SEQ ID NO: 28259 - DNA, 4555 bp, Homo sapiens
  source 1..4555: mol_type = unassigned DNA
aaatccagagactgagctcaggctctcgggaacaacgaagctctccactgatccagagcaccgagattttaaatcaaaggaacctagtcctgggacactcactctgcctgcctgcctaccaaccatcgagggcatagggagctgtggtcgtgagctccctgtcgctggcatcgccgcgctaggtgcgcgccccgctctcccattggtatgcagcgaccatttccctgcaagtctcaaaggtggaaacatttaaacggattacaagcgtgattcggtagcctttcggaaagttggtggccagaagaggagaagctacaaggctacagtatgatggatacaattcagcttcgcagagagtttgcccctcctgctgggtagcccctcgcagcaaacctcggagatcctgagcgctctgcaccatagttttgtaatcaaccacgaacgatgaaaccttccatagctgagatgcttcacagaggaaggatgttgtggataattcttctaagcacaattgctctaggatggactaccccgattcccctaatagaggactcagaggaaatagatgagccctgttttgatccatgctactgtgaagttaaagaaagcctctttcatatacattgtgacagtaaaggatttacaaatattagtcagattaccgagttctggtcaagaccttttaaactgtatctgcagaggaattctatgaggaaattatataccaacagttttcttcatttgaataatgctgtgtctattaatcttgggaacaatgcattgcaggacattcagactggagctttcaatggtcttaagattttaaagagactatatctacatgaaaacaaactagatgtcttcagaaatgacaccttccttggcttggaaagtctagaatatctgcaggcagattacaatgtcattaaacgtattgagagtggggcatttcggaacctaagtaaattgagggttctgattttaaatgataatctcatccccatgcttccaaccaatttatttaaggctgtctctttaacccatttggacctacgtggaaataggttaaaggttcttttttaccgaggaatgctagatcacattggcagaagcctgatggagctccagctggaagaaaacccttggaactgtacatgtgaaattgtacaactgaagagttggctggaacgcattccttatactgccctggtgggagacattacctgtgagacccctttccacttccatggaaaggacctacgagaaatcaggaagacagaactctgtcccttgttgtctgactctgaggtagaggctagtttgggaattccacattcgtcatcaagtaaggagaatgcatggccaactaagccttcctcaatgctatcctctgttcattttactgcttcttctgtcgaatacaagtcctcaaataaacagcctaagcccaccaaacagcctcgaacaccaaggccaccctccacctcccaagctttatatcctggtccaaaccagcctcccattgctccttatcagaccagaccaccaatccccattatatgccccactgggtgtacctgtaatttgcacatcaatgaccttggcttgactgtcaactgcaaagagcgaggatttaataacatttctgaacttcttccaaggcccttgaatgccaagaaactgtatctgagtagcaatctgattcagaaaatataccgttctgatttttggaatttttcttccttggatctcttgcatctggggaacaatcgtatttcctatgtccaagatggggcctttatcaacttgcccaacttaaagagcctcttccttaatggcaacgatatagagaagctgacaccaggcatgttccgaggcctacagagtttgcactacttgtactttgagttcaatgtcatccgggaaatccagcctgcagccttcagcctcatgcccaacttgaagctgctattcctcaataataacttactgaggactctgccaacagacgcctttgctggcacatccctggcccggctcaacctgaggaagaactacttcctctatcttcccgtggctggtgtcctggaacacttgaatgccattgtccagatagacctcaatgagaatccttgggactgcacctgtgacctggtcccctttaaacagtggatcgaaaccatcagctcagtcagtgtggttggtgatgtgctttgcaggagccctgagaacctcacgcaccgtgatgtgcgcactattgagctggaagttctttgcccagagatgctgcacgttgcaccagctggagaatccccagcccagcctggagattctcaccttattggggcaccaaccagtgcatcaccttatgagttttctcctcctgggggccctgtgccactttctgtgttaattctcagcctgctggttctgtttttctcagcagtctttgttgctgcaggcctctttgcctacgtgctccgaaggcgtcgaaagaagctgcccttcagaagcaagcggcaggaaggtgtggaccttactggcatccaaatgcaatgccacaggctgtttgaggatggtggaggtggtggtggcggaagtgggggtggtggtcgaccaactctttcctctccagagaaggcccctcccgtgggtcatgtgtatgagtacatcccccacccggttacccaaatgtgcaacaaccccatctacaagcctcgtgaggaggaggaggtggctgtttcatcagcccaagaagcagggagtgcagaacgtgggggtccagggacacaaccaccgggaatgggtgaggctctcctaggaagtgagcagtttgctgagacacccaaggagaaccatagtaactaccggaccttgctggaaaaagagaaggagtgggccctagcagtgtccagctcccagcttaacaccatagtgacggtgaatcaccatcaccctcaccacccagcagttggtggggtttcaggagtagttgggggaactgggggagacttggcagggttccgccaccatgagaaaaatggtggggtggtgctgtttcctcctgggggaggctgtggtagtggcagtatgctactagatcgagagaggccacagcctgccccctgcacagtgggatttgtggactgtctctatggaacagtgcccaaattaaaggaactgcacgtgcaccctcctggcatgcaatacccagacttacagcaggatgccaggctcaaagaaacccttctcttctcggctggaaagggcttcacagaccaccaaacccaaaaaagtgattacctcgagttaagggccaaacttcaaaccaagccggattacctcgaagtcctggagaagacaacatacaggttctaacagagagaagaaaatatattagtgctttttttttttcaaaagaaaaggaaaataaaagaaatatatcccttgctccctttacacttgtcccagtaactccatcctcacgatctttcctaccctgaacaaaactaaaaccgcatgataactagagaatacagatgtatgctctcccctctcagatgcgatttggaggaagggccatactcagatcattaatcaatgaaagtgccttcgcagacttttgccagcaaatgttatcattatttttttatactgaaacttgagactttgactgtgccatgtataagatatactggggatcattgtatggatcctaattaagtaaaattcaatgtgtctttttattttcagtaactattttttttatagttgtagttttgatttaaagggggggaaacaagttgacatttgtcatttgtggctttctttcttatcatcatggcacagattctgtacatgtattaacaatgcagtttgctgcatgcctggaaactgcaagatggggagggagggggcgggtcttgctcgaatgttctcactcactatcttgtctctcatacacatatccatctgcagaccatggtccctaaacctgcagtttcttcctgctggtgcaggtacacacacacacacacacacacacacacacacacacacacactccataccatttccattcaactcaatctgcttagttcgggtttgatccatttttctcctctccatagttctaccacccttcactgctagtgtacagctcacagcatctctcctaccaccctgggaaaagtcacattctaggctggattctactgaagtagaggcctggtggtttaacagccgaagacacacgcctagggatgagcaccctctttgtgacacttcatcctgatgccaagattttttggagaacatctgcactttcttatatatatatataatattaaaaaaagcaactgggtatatatcactaacagctttgtaggaagcacttttaatgttttctctctcacacacaaagattcaaaagaaatgtgcatatatttattctgtaatttcagtgattataaattgtaaaggtaatgtttaatcattgtatagtgattatgcctctggtatagctttcctaataaaaagtttttgaaaaacataa

SEQ ID NO: 28260 - DNA, 585 bp, Homo sapiens
  source 1..585: mol_type = unassigned DNA
acaaatcaatccacgggtacagaatgctgacttcccgacactcaatttcacagggtgtctcttgaagagctgccagttttgtaatcaaccacgaacgatgaaaccttccatagctgagatgcttcacagaggaaggatgttgtggataattcttctaagcacaattgctctaggatggactaccccgattcccctaatagaggactcagaggaaatagatgagccctgttttgatccatgctactgtgaagttaaagaaagcctctttcatatacattgtgacagtaaaggatttacaaatattagtcagattaccgagttctggtcaagaccttttaaactgtatctgcagaggaattctatgaggaaattatataccaacagttttcttcatttgaataatgctgtgtctattaatcttgggaacaatgcattgcaggacattcagactggagctttcaatggtcttaagattttaaagagactatatctacatgaaaacaaactagatgtcttcagaaatgacaccttccttggcttggaaagtctagaatatctgcaggcagattacaatgtcattaaacg

SEQ ID NO: 28261 - DNA, 3357 bp, Homo sapiens
  source 1..3357: mol_type = unassigned DNA
agtggtcgagtgtcgggaggaaggactgcttgtgtgcggggtgggggggggtggtggagagcgggggcggggattcagcgcgtgtatgtaaaggtgcagcccgtgtgctaggcgctgggtgcgcgcgcggtgtctgctcgggtgcgcgcgcgcgccgctgcccgcctgcccgccggcccgcctgctcgcctgctggggctgctccgtgggtttgacgggcgagcgggcgcggaggagctctgtccggaatcacatagataccatcgtggaaacagcagcgcaggtcacggcgccgcgggccctgcaccagacgctgggctctagagattatttctctttattcagaagcatacagttgtttgctgattgcaagaagatgtttctgtggctgtttctgattttgtcagccctgatttcttcgacaaatgcagattctgacatatcggtggaaatttgcaatgtgtgttcctgcgtgtcagttgagaatgtgctctatgtcaactgtgagaaggtttcagtctacagaccaaatcagctgaaaccaccttggtctaatttttatcacctcaatttccaaaataattttttaaatattctgtatccaaatacattcttgaatttttcacatgcagtctccctgcatctggggaataataaactgcagaacattgagggaggagcctttcttgggctcagtgcattaaagcagttgcacttgaacaacaatgaattaaagattctccgagctgacactttccttggcatagagaacttggagtatctccaggctgactacaatttaatcaagtatattgaacgaggagccttcaataagctccacaaactgaaagttctcattcttaatgacaatctgatttcattccttcctgataatattttccgattcgcatctttgacccatctggatatacgagggaacagaatccagaagctcccttatatcggggttctggaacacattggccgtgtcgttgaattgcaactggaagataacccttggaactgtagctgtgatttattgcccttaaaagcttggctggagaacatgccatataacatttacataggagaagctatctgtgaaactcccagtgacttatatggaaggcttttaaaagaaaccaacaaacaagagctatgtcccatgggcaccggcagtgattttgacgtgcgcatcctgcctccatctcagctggaaaatggctacaccactcccaatggtcacactacccaaacatctttacacagattagtaactaaaccaccaaaaacaacaaatccttccaagatctctggaatcgttgcaggcaaagccctctccaaccgcaatctcagtcagattgtgtcttaccaaacaagggtgcctcctctaacaccttgcccggcaccttgcttctgcaaaacacacccttcagatttgggactaagtgtgaactgccaagagaaaaatatacagtctatgtctgaactgataccgaaacctttaaatgcgaagaagctgcacgtcaatggcaatagcatcaaggatgtggacgtatcagacttcactgactttgaaggactggatttgcttcatttaggcagcaatcaaattacagtgattaagggagacgtatttcacaatctcactaatttacgcaggctatatctcaatggcaatcaaattgagagactctatcctgaaatattttcaggtcttcataacctgcagtatctgtatttggaatacaatttgattaaggaaatctcagcaggcacctttgactccatgccaaatttgcagttactgtacttaaacaataatctcctaaagagcctgcctgtttacatcttttccggagcacccttagctagactgaacctgaggaacaacaaattcatgtacctgcctgtcagtggggtccttgatcagttgcaatctcttacacagattgacttggagggcaacccatgggactgtacttgtgacttggtggcattaaagctgtgggtggagaagttgagcgacgggattgttgtgaaagaactgaaatgtgagacgcctgttcagtttgccaacattgaactgaagtccctcaaaaatgaaatcttatgtcccaaacttttaaataagccgtctgcaccattcacaagccctgcacctgccattacattcaccactcctttgggtcccattcgaagtcctcctggtgggccagtgcctctgtctattttaatcttaagtatcttagtggtcctcattttaacggtgtttgttgctttttgccttcttgtttttgtcctgcgacgcaacaagaaacccacagtgaagcacgaaggcctggggaatcctgactgtggctccatgcagctgcagctaaggaagcatgaccacaaaaccaataaaaaagatggactgagcacagaagctttcattccacaaactatagaacagatgagcaagagccacacttgtggcttgaaagagtcagaaactgggttcatgttttcagatcctccaggacagaaagttgttatgagaaatgtggccgacaaggagaaagatttattacatgtagataccaggaagagactgagcacaattgatgagctggatgaattattccctagcagggattccaatgtgtttattcagaattttcttgaaagcaaaaaggagtataatagcataggtgtcagtggctttgagatccgctatccagaaaaacaaccagacaaaaaaagtaagaagtcactgataggtggcaaccacagtaaaattgttgtggaacaaaggaagagtgagtattttgaactgaaggcgaaactgcagagttcccctgactacctacaggtccttgaggagcaaacagctttgaacaagatctaggtcatgtaatcttacttcatacagaggacatttatttaatgatgaaagtgccttttgttgacttctaacttccaaatactatattatcaataggcatggaggcaggtgtttccaagggtgtctcattaactgtagctgcaaagatgtgtcaagtagaagagaatttgtttaatagattttactacataaaacctatactgtggagtcctgtggggatactgcaaactctattgccaaagggatgctttatacacataatactgaatttaacctcaagaggcaaatctgttttgtaccccaatgcaaaaccttcgtctctttgtgctttgtaaagcaaactcaagaaaactggtacacctgtaccagctgggtcctttatcttgcacgtagattaagttggtggaactggaataatccttttgatttgtggcattgtaacaactccgtgtaaagattatctgaaaagt

SEQ ID NO: 28262 - DNA, 3074 bp, Homo sapiens
  source 1..3074: mol_type = unassigned DNA
attccaggagccctccgttctgcggggtgacaattagccaaagattatttctctttattcagaagcatacagttgtttgctgattgcaagaagatgtttctgtggctgtttctgattttgtcagccctgatttcttcgacaaatgcagattctgacatatcggtggaaatttgcaatgtgtgttcctgcgtgtcagttgagaatgtgctctatgtcaactgtgagaaggtttcagtctacagaccaaatcagctgaaaccaccttggtctaatttttatcacctcaatttccaaaataattttttaaatattctgtatccaaatacattcttgaatttttcacatgcagtctccctgcatctggggaataataaactgcagaacattgagggaggagcctttcttgggctcagtgcattaaagcagttgcacttgaacaacaatgaattaaagattctccgagctgacactttccttggcatagagaacttggagtatctccaggctgactacaatttaatcaagtatattgaacgaggagccttcaataagctccacaaactgaaagttctcattcttaatgacaatctgatttcattccttcctgataatattttccgattcgcatctttgacccatctggatatacgagggaacagaatccagaagctcccttatatcggggttctggaacacattggccgtgtcgttgaattgcaactggaagataacccttggaactgtagctgtgatttattgcccttaaaagcttggctggagaacatgccatataacatttacataggagaagctatctgtgaaactcccagtgacttatatggaaggcttttaaaagaaaccaacaaacaagagctatgtcccatgggcaccggcagtgattttgacgtgcgcatcctgcctccatctcagctggaaaatggctacaccactcccaatggtcacactacccaaacatctttacacagattagtaactaaaccaccaaaaacaacaaatccttccaagatctctggaatcgttgcaggcaaagccctctccaaccgcaatctcagtcagattgtgtcttaccaaacaagggtgcctcctctaacaccttgcccggcaccttgcttctgcaaaacacacccttcagatttgggactaagtgtgaactgccaagagaaaaatatacagtctatgtctgaactgataccgaaacctttaaatgcgaagaagctgcacgtcaatggcaatagcatcaaggatgtggacgtatcagacttcactgactttgaaggactggatttgcttcatttaggcagcaatcaaattacagtgattaagggagacgtatttcacaatctcactaatttacgcaggctatatctcaatggcaatcaaattgagagactctatcctgaaatattttcaggtcttcataacctgcagtatctgtatttggaatacaatttgattaaggaaatctcagcaggcacctttgactccatgccaaatttgcagttactgtacttaaacaataatctcctaaagagcctgcctgtttacatcttttccggagcacccttagctagactgaacctgaggaacaacaaattcatgtacctgcctgtcagtggggtccttgatcagttgcaatctcttacacagattgacttggagggcaacccatgggactgtacttgtgacttggtggcattaaagctgtgggtggagaagttgagcgacgggattgttgtgaaagaactgaaatgtgagacgcctgttcagtttgccaacattgaactgaagtccctcaaaaatgaaatcttatgtcccaaacttttaaataagccgtctgcaccattcacaagccctgcacctgccattacattcaccactcctttgggtcccattcgaagtcctcctggtgggccagtgcctctgtctattttaatcttaagtatcttagtggtcctcattttaacggtgtttgttgctttttgccttcttgtttttgtcctgcgacgcaacaagaaacccacagtgaagcacgaaggcctggggaatcctgactgtggctccatgcagctgcagctaaggaagcatgaccacaaaaccaataaaaaagatggactgagcacagaagctttcattccacaaactatagaacagatgagcaagagccacacttgtggcttgaaagagtcagaaactgggttcatgttttcagatcctccaggacagaaagttgttatgagaaatgtggccgacaaggagaaagatttattacatgtagataccaggaagagactgagcacaattgatgagctggatgaattattccctagcagggattccaatgtgtttattcagaattttcttgaaagcaaaaaggagtataatagcataggtgtcagtggctttgagatccgctatccagaaaaacaaccagacaaaaaaagtaagaagtcactgataggtggcaaccacagtaaaattgttgtggaacaaaggaagagtgagtattttgaactgaaggcgaaactgcagagttcccctgactacctacaggtccttgaggagcaaacagctttgaacaagatctaggtcatgtaatcttacttcatacagaggacatttatttaatgatgaaagtgccttttgttgacttctaacttccaaatactatattatcaataggcatggaggcaggtgtttccaagggtgtctcattaactgtagctgcaaagatgtgtcaagtagaagagaatttgtttaatagattttactacataaaacctatactgtggagtcctgtggggatactgcaaactctattgccaaagggatgctttatacacataatactgaatttaacctcaagaggcaaatctgttttgtaccccaatgcaaaaccttcgtctctttgtgctttgtaaagcaaactcaagaaaactggtacacctgtaccagctgggtcctttatcttgcacgtagattaagttggtggaactggaataatccttttgatttgtggcattgtaacaactccgtgtaaagattatctgaaaagt

SEQ ID NO: 28263 - DNA, 8555 bp, Homo sapiens
  source 1..8555: mol_type = unassigned DNA
gtacaggtctcgggtggctccggctgtcgggccgctgggctgggttgggctttatttttgcaccccactcgcagccactttccgcagacgtggatctgaggctcggggcagtggcccgcgggttggtcggagattgctagcgctcggcaagactaggaataccagaggaagagccgattatttctctttattcagaagcatacagttgtttgctgattgcaagaagatgtttctgtggctgtttctgattttgtcagccctgatttcttcgacaaatgcagattctgacatatcggtggaaatttgcaatgtgtgttcctgcgtgtcagttgagaatgtgctctatgtcaactgtgagaaggtttcagtctacagaccaaatcagctgaaaccaccttggtctaatttttatcacctcaatttccaaaataattttttaaatattctgtatccaaatacattcttgaatttttcacatgcagtctccctgcatctggggaataataaactgcagaacattgagggaggagcctttcttgggctcagtgcattaaagcagttgcacttgaacaacaatgaattaaagattctccgagctgacactttccttggcatagagaacttggagtatctccaggctgactacaatttaatcaagtatattgaacgaggagccttcaataagctccacaaactgaaagttctcattcttaatgacaatctgatttcattccttcctgataatattttccgattcgcatctttgacccatctggatatacgagggaacagaatccagaagctcccttatatcggggttctggaacacattggccgtgtcgttgaattgcaactggaagataacccttggaactgtagctgtgatttattgcccttaaaagcttggctggagaacatgccatataacatttacataggagaagctatctgtgaaactcccagtgacttatatggaaggcttttaaaagaaaccaacaaacaagagctatgtcccatgggcaccggcagtgattttgacgtgcgcatcctgcctccatctcagctggaaaatggctacaccactcccaatggtcacactacccaaacatctttacacagattagtaactaaaccaccaaaaacaacaaatccttccaagatctctggaatcgttgcaggcaaagccctctccaaccgcaatctcagtcagattgtgtcttaccaaacaagggtgcctcctctaacaccttgcccggcaccttgcttctgcaaaacacacccttcagatttgggactaagtgtgaactgccaagagaaaaatatacagtctatgtctgaactgataccgaaacctttaaatgcgaagaagctgcacgtcaatggcaatagcatcaaggatgtggacgtatcagacttcactgactttgaaggactggatttgcttcatttaggcagcaatcaaattacagtgattaagggagacgtatttcacaatctcactaatttacgcaggctatatctcaatggcaatcaaattgagagactctatcctgaaatattttcaggtcttcataacctgcagtatctgtatttggaatacaatttgattaaggaaatctcagcaggcacctttgactccatgccaaatttgcagttactgtacttaaacaataatctcctaaagagcctgcctgtttacatcttttccggagcacccttagctagactgaacctgaggaacaacaaattcatgtacctgcctgtcagtggggtccttgatcagttgcaatctcttacacagattgacttggagggcaacccatgggactgtacttgtgacttggtggcattaaagctgtgggtggagaagttgagcgacgggattgttgtgaaagaactgaaatgtgagacgcctgttcagtttgccaacattgaactgaagtccctcaaaaatgaaatcttatgtcccaaacttttaaataagccgtctgcaccattcacaagccctgcacctgccattacattcaccactcctttgggtcccattcgaagtcctcctggtgggccagtgcctctgtctattttaatcttaagtatcttagtggtcctcattttaacggtgtttgttgctttttgccttcttgtttttgtcctgcgacgcaacaagaaacccacagtgaagcacgaaggcctggggaatcctgactgtggctccatgcagctgcagctaaggaagcatgaccacaaaaccaataaaaaagatggactgagcacagaagctttcattccacaaactatagaacagatgagcaagagccacacttgtggcttgaaagagtcagaaactgggttcatgttttcagatcctccaggacagaaagttgttatgagaaatgtggccgacaaggagaaagatttattacatgtagataccaggaagagactgagcacaattgatgagctggatgaattattccctagcagggattccaatgtgtttattcagaattttcttgaaagcaaaaaggagtataatagcataggtgtcagtggctttgagatccgctatccagaaaaacaaccagacaaaaaaagtaagaagtcactgataggtggcaaccacagtaaaattgttgtggaacaaaggaagagtgagtattttgaactgaaggcgaaactgcagagttcccctgactacctacaggtccttgaggagcaaacagctttgaacaagatctaggtcatgtaatcttacttcatacagaggacatttatttaatgatgaaagtgccttttgttgacttctaacttccaaatactatattatcaataggcatggaggcaggtgtttccaagggtgtctcattaactgtagctgcaaagatgtgtcaagtagaagagaatttgtttaatagattttactacataaaacctatactgtggagtcctgtggggatactgcaaactctattgccaaagggatgctttatacacataatactgaatttaacctcaagaggcaaatctgttttgtaccccaatgcaaaaccttcgtctctttgtgctttgtaaagcaaactcaagaaaactggtacacctgtaccagctgggtcctttatcttgcacgtagattaagttggtggaactggaataatccttttgatttgtggcattgtaacaactccgtgtaaagattatctgaaaagtaaaaaaaaaaaaaaaaaaaaaaaaaaaaaaaaaaaaaaaaaaaaaaagcatgcaaagagagaacactcgatagtatttgtaaattggtaacctttatggcctgcatcttgaaaccgctggatttataatgttaatttgtgcaaatacttgtttaaaatataacatacattacataactataaaataaatttgaacactttaagcattacctgtctatacataaaaatctaaaagaaaaaatcaacgtgagttagatagcatttgtgatgatctgaagaaatatgtgacgtttatcagaattaaacatggctcaaattaaactaacactagagtttgttctcagttacgtgaaacacccacaatccttcaaggttgtccaaaataagcagagtgcttactgtgtgagcgcacccaaagctatttttgtaacataattcatatttatgaagtactttgtatactaaataggaaaatatgtactccttaatatgtatttaatatgcctgacttgttttcctgatcacagtgaatttatcagtaagtataaatgtagacagaaagaaatatactaaactgaaacaagctggtgtgaacagaaatattctggactttgtgatcaggtgtaacttaaaaacaaaaaaattttaaaacaaacagaaaagaaaaaaatacaaaagaacagtcaattctgtgctattcttgtgaatttagcgtattatcttcagatttgttaccaattgtgcattcaaaaataagttccttagttttctagtattgtgtctggggcagttgttatttgccatcggttgtcttgcttttcaggattctatgagcttaattcaaatagttttcgctacaagtatttaaaaaataatgaataaggttaatagttatatcttgtatgcatcagtatcctgttctttcatcattcagactactatcagataatctagtagaactgtaaacatcatggtaatcttggctatgaaagccacactgtaaaaatgcttgcattggtttcagatgagttcacagtctgcaactacaaatgatatgcccctgtgtttgcttttgctaagatctaagtcaaaatttgttaaaggaataaagtaactgataatgggtgatgtcggaacttttgtaggagctcccgattaacaaagtgatattcagaaacacattgtcttcttggcctgcctgcatatatatatatagatatatagatatatatagatatacatatatatatatgtgtgtgtgtatatatatatgcgtgtgtatatatatgtgtgtgtatatatatacatatatgtatgtgtgtgtgtatacatatatatatagtgtgtgtgtgtgcatgtgtgagagtgtgtgtcctatctcttataattaccttatgaatcagtaagataaccaagaaggtaaacatagccattcctcatgattgcaagtggcatattttttctgttgcagcttccaaaatgatactatgtttatagttgcagtagctgttcctttattaatcactaatttcagggctttatgtgtttgttgcaagacaaaaaaagaagcttggctttcttgggtgtgtgtgtatgtgtgtgtgtgtctgagtgtgtgtatatatatatatgtgggtatatattcatacatatagataatttggaaatcttttttaaatagcaaaaaccgtctccatgtgtatgtgctggtgctcttaaaactttagtgtgtaattttaatttttatgacatctgtgaaaactttatatgaatataaaataattcaaacaaataattgctttctgatcttgaaagaaaagacaagatgtgtgcccaacagcttttttcatctacaatttcataaggacttttgatatgccattaccatgcatgcacacatccatggattaaagggctcctaatgtatactgacaggataaagatgcaaaggcttcaaagaaagtgttttagtttagtctgtcaataaagtatggcttgaaggatcttaaatagacacttataggaggaatcagaaagttccattcatggtctggggataataggtcatttgaatgatacttttattcagtgtggtgatgttctgaagatgtttcaaggtttctgcagaattctcaatggcaagagtacctgccaccatctcaaaagcttgctgtagcatattggctatctcatactcttctgctaaaaggtataaatgttcaactttttttaaaaagtaatttaacatatgtggttatttggaggttcaaattgtaaatgaaagtaacaaattcttggttaaggctaatatattttccttaactaaagtcattgtgcctacattatatagtgtacacaattttgcacctgtctctcattagttctagttgtacattttatgataatgtagttaggtataagttttgagttgagtacaagaacagttaaaatactgtatctacattttgttggcttcaactataaccttgatgttagtttaacccctggaggtatgatatgtacatcagtacagcatttttagtggaacttggatgcaaacctataaaatccaagaagtgctcatttctaatgtgggctgacacatcatgggcttcttggcactatagtcatgggtatggactacgttagaatgattgcaaacaaatttagatcttatgaaatcagtgaaggggttgagataatatattgtgtccatgtaatataaatcaagttttaaattatttttttatgaaatcaataaagatgattcaattctttaaaagtaagactttgtgtaattttatgagaaagcagctattaaagtagagtgattcaagtctataaggcaatttatattctatatttagtttttcattctgaatagactgaaaaaatatatgaattagaaatttatttaagaccatctttcttttgttgctttttttaaacatttacttttctttaagccataaggatgcataaattatacagggcatgaccttatgagtaacatcaacaggtatttcagaaataacagaacacgtctagaaatgtatggtggtaatattaatctataacattttttgcatgatttgtacattgacattgtatgaaatgagcacactgaggtttttttgttgttactgtcgcatccaaagagttggggagaaactatattaagaatgtatttataatcactattttaaaataaagtaaaaaaaatattgtattgtttttaccctgatttgattatcagtattttaggttaatttgtaagagaaaaatcaagtaatgctgtaaaagctcatgtaaatcacagaaaagaactgttttaatgacttttgtttgcttttaataacatcaaggtattagaatttattaattgccatttttatgaaagtattaataaaattgtttgctacaatgatatttctgaagccacagtttgttaaatatatttgtctttccattatttttcagaaaaatataaagcagtaaccaaactgatcatttcacccagatttgagggtaagatatagctttagcctactgtttatattcaacttaactgctaaatctctgttaaaaaaaaacgctttctttagaaacatattttcaatctgtgttccttcccactggcagcccctttggagaagagtctgacagtgccaagatcaacatgctttgattcttgcccattcttttgaatcagttggattctgacataacttcagataagcaaatactaatattcagtcttaactatctgctcaaatacttttagaaacccttcagtacctctgtattccattgccagtttgcctggttacaggttagttacccacttatggagtgaattgtgatttgtatttggttcttttaaagatgaccaaaattatcaatccatgactttacccaaattattactgttgtggaaaatgaactaattgcattacggttaacttgagggcagaaatgaatgtaactgactatattgaccaatacggtgggtttaaggttcatatatttatggtaagaaaagtaaacacagaaacagagagagagagagaatataaattaagattgttgttgctttacacgtatacataggtatgctgaaggtgtgaacagtatagatagcatatgcaagtacttttagactaaatgccttatgcatctgaggagatacaccgtaggattgtgttattttatttatttatgagtactgagcacagagctttgggttccagccacttctgttatgtagacaagtggcatcaaatcaaggtttggcatcatttctagtgctcatcccattagtcactgtggtcagatgggctgaactaaaataaaatatcctgtttgtggcttcacttacctagaataactggtgacatatatcaagttcacctgataattgttaactctcaatttcagatttcctaaggatctattctttgttaatttaaaagctaatgggaactcaaatgaattttaataacttactttgtacaaaactgcccttaatctaatttggaattttattttgttttatttatttatttatttatttatttaatgtctttttagtttctactggttgataggattgtgttttaaaagggaaaatcgaggaagggaaattgtgttgtttatcttataggaaatgatggttttttttaatttttaaaaattattttaacctgttgttcttatgtctacaaggggaaaataaagtagggctctgaggcatttgaatattttagaccaaataattgctattgagaataaagattcaagcttctcattaatccataattgacatttccactgactgtaggacccagaaccaggagagaattactcaaccctccacttcagtttacttttgtagacactgcctaaatagaaatagaaattctggtgatttcaataacatcaaaaatgacaaattacctgtttaacttaaaaaggtcatgaatgaggccttcagagaaataatattaataatataatgaataaccatagagcagtgcctttaaattagctataggaaggaaatagtcttttcaagtttctgaacaatatatttctcttagttggcacctcacaaatactagatcatgtcagacgctgctggttaatagctgcaggaaggcatgttgtgcagtggatattgctcatggaagtgtgtgaaaatcatagtaagctttgttctccctgctaagacttgctatgtatatttccatcattgtttcatgtaaactgaaccattgtggtaaacttttggagttgatatggaatcactttaatgctgttttcacaaataaaagttttttcttataggtc

SEQ ID NO: 28264 - DNA, 4444 bp, Homo sapiens
  source 1..4444: mol_type = unassigned DNA
cccggaacccgcggtcgccaccgcggcggcggccccaggctggaggcgtccgggcgcctctttcctccagcctctgggactgcgctgctcgcagtctcctcgccctgcctgggcttgagaaacctagtgcataccccaaagagggtttttgtgtatgtgtgtgtttttaaagggtggctatgatgactgggccttggagatgtgagactgggaggtaaaatgcacacttgctgccccccagtaactttggaacaggaccttcacagaaaaatgcatagctggatgctgcagactctagcgtttgctgtaacatctctcgtcctttcgtgtgcagaaaccatcgattattatggggaaatctgtgacaatgcatgtccttgtgaggaaaaggacggcattttaactgtgagctgtgaaaaccgggggatcatcagtctctctgaaattagccctccccgtttcccaatctaccacctcttgttgtccggaaaccttttgaaccgtctctatcccaatgagtttgtcaattacactggggcttcaattttgcatctaggtagcaatgttatccaggacattgagaccggggctttccatgggctacggggtttgaggagattgcatctaaacaataataaactggaacttctgcgagatgataccttccttggcttggagaacctggagtacctacaggtcgattacaactacatcagcgtcattgaacccaatgcttttgggaaactgcatttgttgcaggtgcttatcctcaatgacaatcttttgtccagtttacccaacaatcttttccgttttgtgcccttaacgcacttggacctccgggggaaccggctgaaacttctgccctacgtggggctcttgcagcacatggataaagttgtggagctacagctggaggaaaacccttggaattgttcttgtgagctgatctctctaaaggattggttggacagcatctcctattcagccctggtgggggatgtagtttgtgagacccccttccgcttacacggaagggacttggacgaggtatccaagcaggaactttgcccaaggagacttatttctgactacgagatgaggccgcagacgcctttgagcaccacggggtatttacacaccaccccggcgtcagtgaattctgtggccacttcttcctctgctgtttacaaaccccctttgaagccccctaaggggactcgccaacccaacaagcccagggtgcgccccacctctcggcagccctctaaggacttgggctacagcaactatggccccagcatcgcctatcagaccaaatccccggtgcctttggagtgtcccaccgcgtgctcttgcaacctgcagatctctgatctgggcctcaacgtaaactgccaggagcgaaagatcgagagcatcgctgaactgcagcccaagccctacaatcccaagaaaatgtatctgacagagaactacatcgctgtcgtgcgcaggacagacttcctggaggccacggggctggacctcctgcacctggggaataaccgcatctcgatgatccaggaccgcgctttcggggatctcaccaacctgaggcgcctctacctgaatggcaacaggatcgagaggctgagcccggagttattctatggcctgcagagcctgcagtatctcttcctccagtacaatctcatccgcgagattcagtctggaacttttgacccggtcccaaacctccagctgctattcttgaataacaacctcctgcaggccatgccctcaggcgtcttctctggcttgaccctcctcaggctaaacctgaggagtaaccacttcacctccttgccagtgagtggagttttggaccagctgaagtcactcatccaaatcgacctgcatgacaatccttgggattgtacctgtgacattgtgggcatgaagctgtgggtggagcagctcaaagtgggcgtcctagtggacgaggtgatctgtaaggcgcccaaaaaattcgctgagaccgacatgcgctccattaagtcggagctgctgtgccctgactattcagatgtagtagtttccacgcccacaccctcctctatccaggtccctgcgaggaccagcgccgtgactcctgcggtccggttgaatagcaccggggcccccgcgagcttgggcgcaggcggaggggcgtcgtcggtgcccttgtctgtgttaattctcagcctcctgctggttttcatcatgtccgtcttcgtggccgccgggctcttcgtgctggtcatgaagcgcaggaagaagaaccagagcgaccacaccagcaccaacaactccgacgtgagctcctttaacatgcagtacagcgtgtacggcggcggcggcggcacgggcggccacccacacgcgcacgtgcatcaccgcgggcccgcgctgcccaaggtgaagacgcccgcgggccacgtgtatgaatacatcccccacccactgggccacatgtgcaaaaaccccatctaccgctcccgagagggcaactccgtagaggattacaaagacctgcacgagctcaaggtcacctacagcagcaaccaccacctgcagcagcagcagcagccgccgccgccaccgcagcagccacagcagcagcccccgccgcagctgcagctgcagcccggggaggaggagaggcgggaaagccaccacttgcggagccccgcctacagcgtcagcaccatcgagccccgggaggacctgctgtcgccggtgcaggacgccgaccgcttttacaggggcattttagaaccagacaaacactgctccaccacccccgccggcaatagcctcccggaatatcccaaattcccgtgcagccccgctgcttacactttctcccccaactatgacctgagacgcccccatcagtatttgcacccgggggcaggggacagcaggctacgggaaccggtgctctacagccccccgagtgctgtctttgtagaacccaaccggaacgaatatctggagttaaaagcaaaactaaacgttgagccggactacctcgaagtgctggaaaaacagaccacgtttagccagttctaaaagcaaagaaactctcttggagcttttgcatttaaaacaaacaagcaagcagacacacacagtgaacacatttgattaattgtgttgtttcaacgtttagggtgaagtgccttggcacgggatttctcagcttcggtggaagatacgaaaagggtgtgcaatttcctttaaaatttacacgtgggaaacatttgtgtaaactgggcacatcactttctcttcttgcgtgtggggcaggtgtggagaagggctttaaggaggccaatttgctgcgcgggtgacctgtgaaaggtcacagtcatttttgtagtggttggaagtgctaagaatggtggatgatggcagagcatagattctactcttcctcttttgcttcctccccctcccccgcccctgccccacctctctttctccccttttaagccatgggtgggtctaactggcttttgtggagaaattagcacaccccaactttaataggaaatttgttctctttttccgcccctctccttctctcctcccctcccctcccttctcattccttttctttgtttttaaaggatgtgtttgtatgcattctggacatttgaattaaaaaaaaagtattgtgatcctgtaaaggatcaccatagatgtggacaaatcattaaaattacagagctatatgatccataattgattagtcaaaataacttattgatgaaatatacaaatattttattgtagcacctatttttatatgcacatttagcattcctctttccttcactatttagcctatgattttgcagaggtgtcacactgtattaggatctgcatttctaaaactgacgtggtatcaggaaggcattttcaatcattcaaaatgtggagaatttaatggctaaatctttaaaagccaatgcaacccacccaattgaatctgcattttcttttaagaaaacagagctgattgtatcccaatgtattttaaaaaatagggcaattgattgggccattccgagagaattgtttgcaagttttgggttttattagaaaatatttgaaagtatttttattaatgaaccaaaatgacatgttcatttgactactattgtagccgattttcgattgtttaaccaaacccagttgcatttgtacagatccacgtgtactggcacctcagaagaccaaatcatggactgtacaagtctctatacaatgtctttatccctgtgggcagcaagcaatgatgataatgacaaacaggatatctgtaagatggggctactgttgttacagtctcatatgtatcccagcacatgtaattttttaaatagtttctgaataaacacttgataactatgtc

SEQ ID NO: 28265 - DNA, 2433 bp, Homo sapiens
  source 1..2433: mol_type = unassigned DNA
gcgaatttgcatcggaggtgcgtttccccgtcagaatgtcagcctccccaggctcattcaactttattttctcaaatttttggtctcctttgctagcaaggaggagggggaagggagtgggttgagaggaagctcttcgacccttgctaactagaactgaattaaagttgtaaacgctggagtttaatactggctggactgaatttgcaatgggctttcagatggggtgggaggtgaatgggggcggggaagcacagggagggagggggaggggacccaacctcgctgaatggatgtgcggatttgatccagcggagaactgaaatttcaagggacttggacgaggtatccaagcaggaactttgcccaaggagacttatttctgactacgagatgaggccgcagacgcctttgagcaccacggggtatttacacaccaccccggcgtcagtgaattctgtggccacttcttcctctgctgtttacaaaccccctttgaagccccctaaggggactcgccaacccaacaagcccagggtgcgccccacctctcggcagccctctaaggacttgggctacagcaactatggccccagcatcgcctatcagaccaaatccccggtgcctttggagtgtcccaccgcgtgctcttgcaacctgcagatctctgatctgggcctcaacgtaaactgccaggagcgaaagatcgagagcatcgctgaactgcagcccaagccctacaatcccaagaaaatgtatctgacagagaactacatcgctgtcgtgcgcaggacagacttcctggaggccacggggctggacctcctgcacctggggaataaccgcatctcgatgatccaggaccgcgctttcggggatctcaccaacctgaggcgcctctacctgaatggcaacaggatcgagaggctgagcccggagttattctatggcctgcagagcctgcagtatctcttcctccagtacaatctcatccgcgagattcagtctggaacttttgacccggtcccaaacctccagctgctattcttgaataacaacctcctgcaggccatgccctcaggcgtcttctctggcttgaccctcctcaggctaaacctgaggagtaaccacttcacctccttgccagtgagtggagttttggaccagctgaagtcactcatccaaatcgacctgcatgacaatccttgggattgtacctgtgacattgtgggcatgaagctgtgggtggagcagctcaaagtgggcgtcctagtggacgaggtgatctgtaaggcgcccaaaaaattcgctgagaccgacatgcgctccattaagtcggagctgctgtgccctgactattcagatgtagtagtttccacgcccacaccctcctctatccaggtccctgcgaggaccagcgccgtgactcctgcggtccggttgaatagcaccggggcccccgcgagcttgggcgcaggcggaggggcgtcgtcggtgcccttgtctgtgttaattctcagcctcctgctggttttcatcatgtccgtcttcgtggccgccgggctcttcgtgctggtcatgaagcgcaggaagaagaaccagagcgaccacaccagcaccaacaactccgacgtgagctcctttaacatgcagtacagcgtgtacggcggcggcggcggcacgggcggccacccacacgcgcacgtgcatcaccgcgggcccgcgctgcccaaggtgaagacgcccgcgggccacgtgtatgaatacatcccccacccactgggccacatgtgcaaaaaccccatctaccgctcccgagagggcaactccgtagaggattacaaagacctgcacgagctcaaggtcacctacagcagcaaccaccacctgcagcagcagcagcagccgccgccgccaccgcagcagccacagcagcagcccccgccgcagctgcagctgcagcccggggaggaggagaggcgggaaagccaccacttgcggagccccgcctacagcgtcagcaccatcgagccccgggaggacctgctgtcgccggtgcaggacgccgaccgcttttacaggggcattttagaaccagacaaacactgctccaccacccccgccggcaatagcctcccggaatatcccaaattcccgtgcagccccgctgcttacactttctcccccaactatgacctgagacgcccccatcagtatttgcacccgggggcaggggacagcaggctacgggaaccggtgctctacagccccccgagtgctgtctttgtagaacccaaccggaacgaatatctggagttaaaagcaaaactaaacgttgagccggactacctcgaagtgctggaaaaacagaccacgtttagccagttctaaaagcaaagaaactctcttggagcttttgcatttaaaacaaac

SEQ ID NO: 28266 - DNA, 4318 bp, Homo sapiens
  source 1..4318: mol_type = unassigned DNA
atatgacactggcagattaaaacgctctgatggggaagggcttaaaggctgagtcaaaagccaagaagtctctttatttacgcctacctcccagcccttggcaatctgactaataacaaactgagctaacaagaaatactagaaaaggaggaaggagaacattgctgtagcttggatctacaacctaagaaagcaagagtgatcaatctcagctctgttaaacatcttgtttacttactgcattcagcagcttgcaaatggttaactatatgcaaaaaagtcagcatagctgtgaagtatgccgtgaattttaattgagggaaaaagggacaattgcttcaggatgctctagtatgcactctgcttgaaatattttcaatgaaatgctcagtattctatctttgaccagaggttttaactttatgaagctatgggacttgacaaaaagtgatatttgagaagaaagtacgcagtggttggtgttttcttttttttaataaaggaattgaattactttgaacacctcttccagctgtgcattacagataacgtcaggaagagtctctgctttacagaatcggatttcatcacatgacaacatgaagctgtggattcatctcttttattcatctctccttgcctgtatatctttacactcccaaactccagtgctctcatccagaggctcttgtgattctctttgcaattgtgaggaaaaagatggcacaatgctaataaattgtgaagcaaaaggtatcaagatggtatctgaaataagtgtgccaccatcacgacctttccaactaagcttattaaataacggcttgacgatgcttcacacaaatgacttttctgggcttaccaatgctatttcaatacaccttggatttaacaatattgcagatattgagataggtgcatttaatggccttggcctcctgaaacaacttcatatcaatcacaattctttagaaattcttaaagaggatactttccatggactggaaaacctggaattcctgcaagcagataacaattttatcacagtgattgaaccaagtgcctttagcaagctcaacagactcaaagtgttaattttaaatgacaatgctattgagagtcttcctccaaacatcttccgatttgttcctttaacccatctagatcttcgtggaaatcaattacaaacattgccttatgttggttttctcgaacacattggccgaatattggatcttcagttggaggacaacaaatgggcctgcaattgtgacttattgcagttaaaaacttggttggagaacatgcctccacagtctataattggtgatgttgtctgcaacagccctccattttttaaaggaagtatactcagtagactaaagaaggaatctatttgccctactccaccagtgtatgaagaacatgaggatccttcaggatcattacatctggcagcaacatcttcaataaatgatagtcgcatgtcaactaagaccacgtccattctaaaactacccaccaaagcaccaggtttgataccttatattacaaagccatccactcaacttccaggaccttactgccctattccttgtaactgcaaagtcctatccccatcaggacttctaatacattgtcaggagcgcaacattgaaagcttatcagatctgagacctcctccgcaaaatcctagaaagctcattctagcgggaaatattattcacagtttaatgaagtctgatctagtggaatatttcactttggaaatgcttcacttgggaaacaatcgtattgaagttcttgaagaaggatcgtttatgaacctaacgagattacaaaaactctatctaaatggtaaccacctgaccaaattaagtaaaggcatgttccttggtctccataatcttgaatacttatatcttgaatacaatgccattaaggaaatactgccaggaacctttaatccaatgcctaaacttaaagtcctgtatttaaataacaacctcctccaagttttaccaccacatattttttcaggggttcctctaactaaggtaaatcttaaaacaaaccagtttacccatctacctgtaagtaatattttggatgatcttgatttgctaacccagattgaccttgaggataacccctgggactgctcctgtgacctggttggactgcagcaatggatacaaaagttaagcaagaacacagtgacagatgacatcctctgcacttcccccgggcatctcgacaaaaaggaattgaaagccctaaatagtgaaattctctgtccaggtttagtaaataacccatccatgccaacacagactagttaccttatggtcaccactcctgcaacaacaacaaatacggctgatactattttacgatctcttacggacgctgtgccactgtctgttctaatattgggacttctgattatgttcatcactattgttttctgtgctgcagggatagtggttcttgttcttcaccgcaggagaagatacaaaaagaaacaagtagatgagcaaatgagagacaacagtcctgtgcatcttcagtacagcatgtatggccataaaaccactcatcacactactgaaagaccctctgcctcactctatgaacagcacatggtgagccccatggttcatgtctatagaagtccatcctttggtccaaagcatctggaagaggaagaagagaggaatgagaaagaaggaagtgatgcaaaacatctccaaagaagtcttttggaacaggaaaatcattcaccactcacagggtcaaatatgaaatacaaaaccacgaaccaatcaacagaatttttatccttccaagatgccagctcattgtacagaaacattttagaaaaagaaagggaacttcagcaactgggaatcacagaatacctaaggaaaaacattgctcagctccagcctgatatggaggcacattatcctggagcccacgaagagctgaagttaatggaaacattaatgtactcacgtccaaggaaggtattagtggaacagacaaaaaatgagtattttgaacttaaagctaatttacatgctgaacctgactatttagaagtcctggagcagcaaacatagatggagagtttgagggctttcgcagaaatgctgtgattctgttttaagtccataccttgtaaataagtgccttacgtgagtgtgtcatcaatcagaacctaagcacagcagtaaactatggggaaaaaaaaagaagaagaaaaagaaactcagggatcactgggagaagccatggcattatcttcaggcaatttagtctgtcccaaataaaataaatccttgcatgtaaatcattcaaggattatagtaatatttcatatactgaaaagtgtctcataggagtcctcttgcacatctaaaaaggctgaacatttaagtatcccgaattttcttgaattgctttccctatagattaattacaattggatttcatcatttaaaaaccatacttgtatatgtagttataatatgtaaggaatacattgtttataaccagtatgtacttcaaaaatgtgtattgtcaaacatacctaactttcttgcaataaatgcaaaagaaactggaacttgacaattataaatagtaatagtgaagaaaaaatagaaaggttgcaattatataggccatgggtggctcaaaactttgaacatttgagcttaaacaaatgccactctcatgcattctaaattaaaaagttaaaatgattaatagttcaggtggaagaaataagcatactttttgggttttctacacattttgtgtagacaattttaatgtcagtgctgctgtgaactaaagtatgtcatttatgctcaaagtttaattcttcttcttgggatattttaaaaatgctactgagattctgctgtaaatatgactagagaatatattgggtttgctttatttcataggcttaattctttgtaaatctgaatgaccataatagaaatacatttcttgtggcaagtaattcacagttgtaaagtaaataggaaaaattattttatttttattgatgtacattgatagatgccataaatcagtagcaaaaggcacttctaaaggtaagtggtttaagttgcctcaagagagggacaatgtagctttattttacaagaaggcatagttagatttctatgaaatatttattctgtacagttttatatagttttggttcacaaaagtaattattcttgggtgcctttcaagaaaattaaaaatactactcactacaataaaactaaaatgaaaa

SEQ ID NO: 28267 - DNA, 4938 bp, Homo sapiens
  source 1..4938: mol_type = unassigned DNA
cagaggagggtggagagggcggtgggaggcgtgtgcctgagtgggctctactgccttgttccatattatttggtgcacattttccctggcactctgggttgctagccccgccgggcactgggcctcagacactgcgcggttccctcggagcagcaagctaaagaaagcccccagtgccggcgaggaaggaggcggcggggaaagatgcgcggcgttggctggcagatgctgtccctgtcgctggggttagtgctggcgatcctgaacaaggtggcaccgcaggcgtgcccggcgcagtgctcttgctcgggcagcacagtggactgtcacgggctggcgctgcgcagcgtgcccaggaatatcccccgcaacaccgagagactggatttaaatggaaataacatcacaagaattacgaagacagattttgctggtcttagacatctaagagttcttcagcttatggagaataagattagcaccattgaaagaggagcattccaggatcttaaagaactagagagactgcgtttaaacagaaatcaccttcagctgtttcctgagttgctgtttcttgggactgcgaagctatacaggcttgatctcagtgaaaaccaaattcaggcaatcccaaggaaagctttccgtggggcagttgacataaaaaatttgcaactggattacaaccagatcagctgtattgaagatggggcattcagggctctccgggacctggaagtgctcactctcaacaataacaacattactagactttctgtggcaagtttcaaccatatgcctaaacttaggacttttcgactgcattcaaacaacctgtattgtgactgccacctggcctggctctccgactggcttcgccaaaggcctcgggttggtctgtacactcagtgtatgggcccctcccacctgagaggccataatgtagccgaggttcaaaaacgagaatttgtctgcagtggtaagggagaaggtcaccagtcatttatggctccttcttgtagtgttttgcactgccctgccgcctgtacctgtagcaacaatatcgtagactgtcgtgggaaaggtctcactgagatccccacaaatcttccagagaccatcacagaaatacgtttggaacagaacacaatcaaagtcatccctcctggagctttctcaccatataaaaagcttagacgaattgacctgagcaataatcagatctctgaacttgcaccagatgctttccaaggactacgctctctgaattcacttgtcctctatggaaataaaatcacagaactccccaaaagtttatttgaaggactgttttccttacagctcctattattgaatgccaacaagataaactgccttcgggtagatgcttttcaggatctccacaacttgaaccttctctccctatatgacaacaagcttcagaccatcgccaaggggaccttttcacctcttcgggccattcaaactatgcatttggcccagaacccctttatttgtgactgccatctcaagtggctagcggattatctccataccaacccgattgagaccagtggtgcccgttgcaccagcccccgccgcctggcaaacaaaagaattggacagatcaaaagcaagaaattccgttgttcaggtacagaagattatcgatcaaaattaagtggagactgctttgcggatctggcttgccctgaaaagtgtcgctgtgaaggaaccacagtagattgctctaatcaaaagctcaacaaaatcccggagcacattccccagtacactgcagagttgcgtctcaataataatgaatttaccgtgttggaagccacaggaatctttaagaaacttcctcaattacgtaaaataaactttagcaacaataagatcacagatattgaggagggagcatttgaaggagcatctggtgtaaatgaaatacttcttacgagtaatcgtttggaaaatgtgcagcataagatgttcaagggattggaaagcctcaaaactttgatgttgagaagcaatcgaataacctgtgtggggaatgacagtttcataggactcagttctgtgcgtttgctttctttgtatgataatcaaattactacagttgcaccaggggcatttgatactctccattctttatctactctaaacctcttggccaatccttttaactgtaactgctacctggcttggttgggagagtggctgagaaagaagagaattgtcacgggaaatcctagatgtcaaaaaccatacttcctgaaagaaatacccatccaggatgtggccattcaggacttcacttgtgatgacggaaatgatgacaatagttgctccccactttctcgctgtcctactgaatgtacttgcttggatacagtcgtccgatgtagcaacaagggtttgaaggtcttgccgaaaggtattccaagagatgtcacagagttgtatctggatggaaaccaatttacactggttcccaaggaactctccaactacaaacatttaacacttatagacttaagtaacaacagaataagcacgctttctaatcagagcttcagcaacatgacccagctcctcaccttaattcttagttacaaccgtctgagatgtattcctcctcgcacctttgatggattaaagtctcttcgattactttctctacatggaaatgacatttctgttgtgcctgaaggtgctttcaatgatctttctgcattatcacatctagcaattggagccaaccctctttactgtgattgtaacatgcagtggttatccgactgggtgaagtcggaatataaggagcctggaattgctcgttgtgctggtcctggagaaatggcagataaacttttactcacaactccctccaaaaaatttacctgtcaaggtcctgtggatgtcaatattctagctaagtgtaacccctgcctatcaaatccgtgtaaaaatgatggcacatgtaatagtgatccagttgacttttaccgatgcacctgtccatatggtttcaaggggcaggactgtgatgtcccaattcatgcctgcatcagtaacccatgtaaacatggaggaacttgccacttaaaggaaggagaagaagatggattctggtgtatttgtgctgatggatttgaaggagaaaattgtgaagtcaacgttgatgattgtgaagataatgactgtgaaaataattctacatgtgtcgatggcattaataactacacatgcctttgcccacctgagtatacaggtgagttgtgtgaggagaagctggacttctgtgcccaggacctgaacccctgccagcacgattcaaagtgcatcctaactccaaagggattcaaatgtgactgcacaccagggtacgtaggtgaacactgcgacatcgattttgacgactgccaagacaacaagtgtaaaaacggagcccactgcacagatgcagtgaacggctatacgtgcatatgccccgaaggttacagtggcttgttctgtgagttttctccacccatggtcctccctcgtaccagcccctgtgataattttgattgtcagaatggagctcagtgtatcgtcagaataaatgagccaatatgtcagtgtttgcctggctatcagggagaaaagtgtgaaaaattggttagtgtgaattttataaacaaagagtcttatcttcagattccttcagccaaggttcggcctcagacgaacataacacttcagattgccacagatgaagacagcggaatcctcctgtataagggtgacaaagaccatatcgcggtagaactctatcgggggcgtgttcgtgccagctatgacaccggctctcatccagcttctgccatttacagtgtggagacaatcaatgatggaaacttccacattgtggaactacttgccttggatcagagtctctctttgtccgtggatggtgggaaccccaaaatcatcactaacttgtcaaagcagtccactctgaattttgactctccactctatgtaggaggcatgccagggaagagtaacgtggcatctctgcgccaggcccctgggcagaacggaaccagcttccacggctgcatccggaacctttacatcaacagtgagctgcaggacttccagaaggtgccgatgcaaacaggcattttgcctggctgtgagccatgccacaagaaggtgtgtgcccatggcacatgccagcccagcagccaggcaggcttcacctgcgagtgccaggaaggatggatggggcccctctgtgaccaacggaccaatgacccttgccttggaaataaatgcgtacatggcacctgcttgcccatcaatgcgttctcctacagctgtaagtgcttggagggccatggaggtgtcctctgtgatgaagaggaggatctgtttaacccatgccaggcgatcaagtgcaagcatgggaagtgcaggctttcaggtctggggcagccctactgtgaatgcagcagtggatacacgggggacagctgtgatcgagaaatctcttgtcgaggggaaaggataagagattattaccaaaagcagcagggctatgctgcttgccaaacaaccaagaaggtgtcccgattagagtgcagaggtgggtgtgcaggagggcagtgctgtggaccgctgaggagcaagcggcggaaatactctttcgaatgcactgacggctcctcctttgtggacgaggttgagaaagtggtgaagtgcggctgtacgaggtgtgtgtcctaaacacactcccggcagctctgtctttggaaaaggttgtatacttcttgaccgtgtgggactaatgaatgcttcatagtggaaatatttgaaatatattgtaaaatacagaacagacttatttttattatgagaataaagactttttttctgcatttg

SEQ ID NO: 28268 - DNA, 5233 bp, Homo sapiens
  source 1..5233: mol_type = unassigned DNA
tgccccgcgcgctctgctacgggcccgctgggcttccgcgccttctagcttccggagcccactttgatcggggccataatacctattgagatcccctcttctgtcttgtaccttcgccactggcatcggatttgcagaagcgtgcgtgggatcagaggaccgccctccccacaacaaccggcccctgcatcttagcagccgttggaagccccagctcttttaccgccaagttcatccttgggagacagaagacgcgtgatctcctctccgctgctcttggggtctccttgcagccctggccaggcggattcatcctcaggacctaaagttgcccaaggagctcctgctctgccagaggagggtggagagggcggtgggaggcgtgtgcctgagtgggctctactgccttgttccatattatttggtgcacattttccctggcactctgggttgctagccccgccgggcactgggcctcagacactgcgcggttccctcggagcagcaagctaaagaaagcccccagtgccggcgaggaaggaggcggcggggaaagatgcgcggcgttggctggcagatgctgtccctgtcgctggggttagtgctggcgatcctgaacaaggtggcaccgcaggcgtgcccggcgcagtgctcttgctcgggcagcacagtggactgtcacgggctggcgctgcgcagcgtgcccaggaatatcccccgcaacaccgagagactggatttaaatggaaataacatcacaagaattacgaagacagattttgctggtcttagacatctaagagttcttcagcttatggagaataagattagcaccattgaaagaggagcattccaggatcttaaagaactagagagactgcgtttaaacagaaatcaccttcagctgtttcctgagttgctgtttcttgggactgcgaagctatacaggcttgatctcagtgaaaaccaaattcaggcaatcccaaggaaagctttccgtggggcagttgacataaaaaatttgcaactggattacaaccagatcagctgtattgaagatggggcattcagggctctccgggacctggaagtgctcactctcaacaataacaacattactagactttctgtggcaagtttcaaccatatgcctaaacttaggacttttcgactgcattcaaacaacctgtattgtgactgccacctggcctggctctccgactggcttcgccaaaggcctcgggttggtctgtacactcagtgtatgggcccctcccacctgagaggccataatgtagccgaggttcaaaaacgagaatttgtctgcagtggtcaccagtcatttatggctccttcttgtagtgttttgcactgccctgccgcctgtacctgtagcaacaatatcgtagactgtcgtgggaaaggtctcactgagatccccacaaatcttccagagaccatcacagaaatacgtttggaacagaacacaatcaaagtcatccctcctggagctttctcaccatataaaaagcttagacgaattgacctgagcaataatcagatctctgaacttgcaccagatgctttccaaggactacgctctctgaattcacttgtcctctatggaaataaaatcacagaactccccaaaagtttatttgaaggactgttttccttacagctcctattattgaatgccaacaagataaactgccttcgggtagatgcttttcaggatctccacaacttgaaccttctctccctatatgacaacaagcttcagaccatcgccaaggggaccttttcacctcttcgggccattcaaactatgcatttggcccagaacccctttatttgtgactgccatctcaagtggctagcggattatctccataccaacccgattgagaccagtggtgcccgttgcaccagcccccgccgcctggcaaacaaaagaattggacagatcaaaagcaagaaattccgttgttcaggtacagaagattatcgatcaaaattaagtggagactgctttgcggatctggcttgccctgaaaagtgtcgctgtgaaggaaccacagtagattgctctaatcaaaagctcaacaaaatcccggagcacattccccagtacactgcagagttgcgtctcaataataatgaatttaccgtgttggaagccacaggaatctttaagaaacttcctcaattacgtaaaataaactttagcaacaataagatcacagatattgaggagggagcatttgaaggagcatctggtgtaaatgaaatacttcttacgagtaatcgtttggaaaatgtgcagcataagatgttcaagggattggaaagcctcaaaactttgatgttgagaagcaatcgaataacctgtgtggggaatgacagtttcataggactcagttctgtgcgtttgctttctttgtatgataatcaaattactacagttgcaccaggggcatttgatactctccattctttatctactctaaacctcttggccaatccttttaactgtaactgctacctggcttggttgggagagtggctgagaaagaagagaattgtcacgggaaatcctagatgtcaaaaaccatacttcctgaaagaaatacccatccaggatgtggccattcaggacttcacttgtgatgacggaaatgatgacaatagttgctccccactttctcgctgtcctactgaatgtacttgcttggatacagtcgtccgatgtagcaacaagggtttgaaggtcttgccgaaaggtattccaagagatgtcacagagttgtatctggatggaaaccaatttacactggttcccaaggaactctccaactacaaacatttaacacttatagacttaagtaacaacagaataagcacgctttctaatcagagcttcagcaacatgacccagctcctcaccttaattcttagttacaaccgtctgagatgtattcctcctcgcacctttgatggattaaagtctcttcgattactttctctacatggaaatgacatttctgttgtgcctgaaggtgctttcaatgatctttctgcattatcacatctagcaattggagccaaccctctttactgtgattgtaacatgcagtggttatccgactgggtgaagtcggaatataaggagcctggaattgctcgttgtgctggtcctggagaaatggcagataaacttttactcacaactccctccaaaaaatttacctgtcaaggtcctgtggatgtcaatattctagctaagtgtaacccctgcctatcaaatccgtgtaaaaatgatggcacatgtaatagtgatccagttgacttttaccgatgcacctgtccatatggtttcaaggggcaggactgtgatgtcccaattcatgcctgcatcagtaacccatgtaaacatggaggaacttgccacttaaaggaaggagaagaagatggattctggtgtatttgtgctgatggatttgaaggagaaaattgtgaagtcaacgttgatgattgtgaagataatgactgtgaaaataattctacatgtgtcgatggcattaataactacacatgcctttgcccacctgagtatacaggtgagttgtgtgaggagaagctggacttctgtgcccaggacctgaacccctgccagcacgattcaaagtgcatcctaactccaaagggattcaaatgtgactgcacaccagggtacgtaggtgaacactgcgacatcgattttgacgactgccaagacaacaagtgtaaaaacggagcccactgcacagatgcagtgaacggctatacgtgcatatgccccgaaggttacagtggcttgttctgtgagttttctccacccatggtcctccctcgtaccagcccctgtgataattttgattgtcagaatggagctcagtgtatcgtcagaataaatgagccaatatgtcagtgtttgcctggctatcagggagaaaagtgtgaaaaattggttagtgtgaattttataaacaaagagtcttatcttcagattccttcagccaaggttcggcctcagacgaacataacacttcagattgccacagatgaagacagcggaatcctcctgtataagggtgacaaagaccatatcgcggtagaactctatcgggggcgtgttcgtgccagctatgacaccggctctcatccagcttctgccatttacagtgtggagacaatcaatgatggaaacttccacattgtggaactacttgccttggatcagagtctctctttgtccgtggatggtgggaaccccaaaatcatcactaacttgtcaaagcagtccactctgaattttgactctccactctatgtaggaggcatgccagggaagagtaacgtggcatctctgcgccaggcccctgggcagaacggaaccagcttccacggctgcatccggaacctttacatcaacagtgagctgcaggacttccagaaggtgccgatgcaaacaggcattttgcctggctgtgagccatgccacaagaaggtgtgtgcccatggcacatgccagcccagcagccaggcaggcttcacctgcgagtgccaggaaggatggatggggcccctctgtgaccaacggaccaatgacccttgccttggaaataaatgcgtacatggcacctgcttgcccatcaatgcgttctcctacagctgtaagtgcttggagggccatggaggtgtcctctgtgatgaagaggaggatctgtttaacccatgccaggcgatcaagtgcaagcatgggaagtgcaggctttcaggtctggggcagccctactgtgaatgcagcagtggatacacgggggacagctgtgatcgagaaatctcttgtcgaggggaaaggataagagattattaccaaaagcagcagggctatgctgcttgccaaacaaccaagaaggtgtcccgattagagtgcagaggtgggtgtgcaggagggcagtgctgtggaccgctgaggagcaagcggcggaaatactctttcgaatgcactgacggctcctcctttgtggacgaggttgagaaagtggtgaagtgcggctgtacgaggtgtgtgtcctaaacacactcccggcagctctgtctttggaaaaggttgtatacttcttgaccgtgtgggactaatgaatgcttcatagtggaaatatttgaaatatattgtaaaatacagaac

SEQ ID NO: 28269 - DNA, 4752 bp, Homo sapiens
  source 1..4752: mol_type = unassigned DNA
atgcgcggcgttggctggcagatgctgtccctgtcgctggggttagtgctggcgatcctgaacaaggtggcaccgcaggcgtgcccggcgcagtgctcttgctcgggcagcacagtggactgtcacgggctggcgctgcgcagcgtgcccaggaatatcccccgcaacaccgagagactggatttaaatggaaataacatcacaagaattacgaagacagattttgctggtcttagacatctaagagttcttcagcttatggagaataagattagcaccattgaaagaggagcattccaggatcttaaagaactagagagactgcgtttaaacagaaatcaccttcagctgtttcctgagttgctgtttcttgggactgcgaagctatacaggcttgatctcagtgaaaaccaaattcaggcaatcccaaggaaagctttccgtggggcagttgacataaaaaatttgcaactggattacaaccagatcagctgtattgaagatggggcattcagggctctccgggacctggaagtgctcactctcaacaataacaacattactagactttctgtggcaagtttcaaccatatgcctaaacttaggacttttcgactgcattcaaacaacctgtattgtgactgccacctggcctggctctccgactggcttcgccaaaggcctcgggttggtctgtacactcagtgtatgggcccctcccacctgagaggccataatgtagccgaggttcaaaaacgagaatttgtctgcagtgatgaggaagaaggtcaccagtcatttatggctccttcttgtagtgttttgcactgccctgccgcctgtacctgtagcaacaatatcgtagactgtcgtgggaaaggtctcactgagatccccacaaatcttccagagaccatcacagaaatacgtttggaacagaacacaatcaaagtcatccctcctggagctttctcaccatataaaaagcttagacgaattgacctgagcaataatcagatctctgaacttgcaccagatgctttccaaggactacgctctctgaattcacttgtcctctatggaaataaaatcacagaactccccaaaagtttatttgaaggactgttttccttacagctcctattattgaatgccaacaagataaactgccttcgggtagatgcttttcaggatctccacaacttgaaccttctctccctatatgacaacaagcttcagaccatcgccaaggggaccttttcacctcttcgggccattcaaactatgcatttggcccagaacccctttatttgtgactgccatctcaagtggctagcggattatctccataccaacccgattgagaccagtggtgcccgttgcaccagcccccgccgcctggcaaacaaaagaattggacagatcaaaagcaagaaattccgttgttcaggtacagaagattatcgatcaaaattaagtggagactgctttgcggatctggcttgccctgaaaagtgtcgctgtgaaggaaccacagtagattgctctaatcaaaagctcaacaaaatcccggagcacattccccagtacactgcagagttgcgtctcaataataatgaatttaccgtgttggaagccacaggaatctttaagaaacttcctcaattacgtaaaataaactttagcaacaataagatcacagatattgaggagggagcatttgaaggagcatctggtgtaaatgaaatacttcttacgagtaatcgtttggaaaatgtgcagcataagatgttcaagggattggaaagcctcaaaactttgatgttgagaagcaatcgaataacctgtgtggggaatgacagtttcataggactcagttctgtgcgtttgctttctttgtatgataatcaaattactacagttgcaccaggggcatttgatactctccattctttatctactctaaacctcttggccaatccttttaactgtaactgctacctggcttggttgggagagtggctgagaaagaagagaattgtcacgggaaatcctagatgtcaaaaaccatacttcctgaaagaaatacccatccaggatgtggccattcaggacttcacttgtgatgacggaaatgatgacaatagttgctccccactttctcgctgtcctactgaatgtacttgcttggatacagtcgtccgatgtagcaacaagggtttgaaggtcttgccgaaaggtattccaagagatgtcacagagttgtatctggatggaaaccaatttacactggttcccaaggaactctccaactacaaacatttaacacttatagacttaagtaacaacagaataagcacgctttctaatcagagcttcagcaacatgacccagctcctcaccttaattcttagttacaaccgtctgagatgtattcctcctcgcacctttgatggattaaagtctcttcgattactttctctacatggaaatgacatttctgttgtgcctgaaggtgctttcaatgatctttctgcattatcacatctagcaattggagccaaccctctttactgtgattgtaacatgcagtggttatccgactgggtgaagtcggaatataaggagcctggaattgctcgttgtgctggtcctggagaaatggcagataaacttttactcacaactccctccaaaaaatttacctgtcaaggtcctgtggatgtcaatattctagctaagtgtaacccctgcctatcaaatccgtgtaaaaatgatggcacatgtaatagtgatccagttgacttttaccgatgcacctgtccatatggtttcaaggggcaggactgtgatgtcccaattcatgcctgcatcagtaacccatgtaaacatggaggaacttgccacttaaaggaaggagaagaagatggattctggtgtatttgtgctgatggatttgaaggagaaaattgtgaagtcaacgttgatgattgtgaagataatgactgtgaaaataattctacatgtgtcgatggcattaataactacacatgcctttgcccacctgagtatacaggtgagttgtgtgaggagaagctggacttctgtgcccaggacctgaacccctgccagcacgattcaaagtgcatcctaactccaaagggattcaaatgtgactgcacaccagggtacgtaggtgaacactgcgacatcgattttgacgactgccaagacaacaagtgtaaaaacggagcccactgcacagatgcagtgaacggctatacgtgcatatgccccgaaggttacagtggcttgttctgtgagttttctccacccatggtcctccctcgtaccagcccctgtgataattttgattgtcagaatggagctcagtgtatcgtcagaataaatgagccaatatgtcagtgtttgcctggctatcagggagaaaagtgtgaaaaattggttagtgtgaattttataaacaaagagtcttatcttcagattccttcagccaaggttcggcctcagacgaacataacacttcagattgccacagatgaagacagcggaatcctcctgtataagggtgacaaagaccatatcgcggtagaactctatcgggggcgtgttcgtgccagctatgacaccggctctcatccagcttctgccatttacagtgtggagacaatcaatgatggaaacttccacattgtggaactacttgccttggatcagagtctctctttgtccgtggatggtgggaaccccaaaatcatcactaacttgtcaaagcagtccactctgaattttgactctccactctatgtaggaggcatgccagggaagagtaacgtggcatctctgcgccaggcccctgggcagaacggaaccagcttccacggctgcatccggaacctttacatcaacagtgagctgcaggacttccagaaggtgccgatgcaaacaggcattttgcctggctgtgagccatgccacaagaaggtgtgtgcccatggcacatgccagcccagcagccaggcaggcttcacctgcgagtgccaggaaggatggatggggcccctctgtgaccaacggaccaatgacccttgccttggaaataaatgcgtacatggcacctgcttgcccatcaatgcgttctcctacagctgtaagtgcttggagggccatggaggtgtcctctgtgatgaagaggaggatctgtttaacccatgccaggcgatcaagtgcaagcatgggaagtgcaggctttcaggtctggggcagccctactgtgaatgcagcagtggatacacgggggacagctgtgatcgagaaatctcttgtcgaggggaaaggataagagattattaccaaaagcagcagggctatgctgcttgccaaacaaccaagaaggtgtcccgattagagtgcagaggtgggtgtgcaggagggcagtgctgtggaccgctgaggagcaagcggcggaaatactctttcgaatgcactgacggctcctcctttgtggacgaggttgagaaagtggtgaagtgcggctgtacgaggtgtgtgtcctaaacacactcccggcagctctgtctttggaaaaggttgtatacttcttgaccgtgtgggactaatgaatgcttcatagtggaaatatttgaaatatattgtaaaatacagaacagacttatttttattatgagaataaagactttttttctgcatttggaaaaaaaaaaaaagaaa

SEQ ID NO: 28270 - DNA, 6390 bp, Homo sapiens
  source 1..6390: mol_type = unassigned DNA
cggattcatcctcaggacctaaagttgcccaaggagctcctgctctgccagaggagggtggagagggcggtgggaggcgtgtgcctgagtgggctctactgccttgttccatattatttggtgcacattttccctggcactctgggttgctagccccgccgggcactgggcctcagacactgcgcggttccctcggagcagcaagctaaagaaagcccccagtgccggcgaggaaggaggcggcggggaaagatgcgcggcgttggctggcagatgctgtccctgtcgctggggttagtgctggcgatcctgaacaaggtggcaccgcaggcgtgcccggcgcagtgctcttgctcgggcagcacagtggactgtcacgggctggcgctgcgcagcgtgcccaggaatatcccccgcaacaccgagagactggatttaaatggaaataacatcacaagaattacgaagacagattttgctggtcttagacatctaagagttcttcagcttatggagaataagattagcaccattgaaagaggagcattccaggatcttaaagaactagagagactgcgtttaaacagaaatcaccttcagctgtttcctgagttgctgtttcttgggactgcgaagctatacaggcttgatctcagtgaaaaccaaattcaggcaatcccaaggaaagctttccgtggggcagttgacataaaaaatttgcaactggattacaaccagatcagctgtattgaagatggggcattcagggctctccgggacctggaagtgctcactctcaacaataacaacattactagactttctgtggcaagtttcaaccatatgcctaaacttaggacttttcgactgcattcaaacaacctgtattgtgactgccacctggcctggctctccgactggcttcgccaaaggcctcgggttggtctgtacactcagtgtatgggcccctcccacctgagaggccataatgtagccgaggttcaaaaacgagaatttgtctgcagtggtcaccagtcatttatggctccttcttgtagtgttttgcactgccctgccgcctgtacctgtagcaacaatatcgtagactgtcgtgggaaaggtctcactgagatccccacaaatcttccagagaccatcacagaaatacgtttggaacagaacacaatcaaagtcatccctcctggagctttctcaccatataaaaagcttagacgaattgacctgagcaataatcagatctctgaacttgcaccagatgctttccaaggactacgctctctgaattcacttgtcctctatggaaataaaatcacagaactccccaaaagtttatttgaaggactgttttccttacagctcctattattgaatgccaacaagataaactgccttcgggtagatgcttttcaggatctccacaacttgaaccttctctccctatatgacaacaagcttcagaccatcgccaaggggaccttttcacctcttcgggccattcaaactatgcatttggcccagaacccctttatttgtgactgccatctcaagtggctagcggattatctccataccaacccgattgagaccagtggtgcccgttgcaccagcccccgccgcctggcaaacaaaagaattggacagatcaaaagcaagaaattccgttgttcagctaaagaacagtatttcattccaggtacagaagattatcgatcaaaattaagtggagactgctttgcggatctggcttgccctgaaaagtgtcgctgtgaaggaaccacagtagattgctctaatcaaaagctcaacaaaatcccggagcacattccccagtacactgcagagttgcgtctcaataataatgaatttaccgtgttggaagccacaggaatctttaagaaacttcctcaattacgtaaaataaactttagcaacaataagatcacagatattgaggagggagcatttgaaggagcatctggtgtaaatgaaatacttcttacgagtaatcgtttggaaaatgtgcagcataagatgttcaagggattggaaagcctcaaaactttgatgttgagaagcaatcgaataacctgtgtggggaatgacagtttcataggactcagttctgtgcgtttgctttctttgtatgataatcaaattactacagttgcaccaggggcatttgatactctccattctttatctactctaaacctcttggccaatccttttaactgtaactgctacctggcttggttgggagagtggctgagaaagaagagaattgtcacgggaaatcctagatgtcaaaaaccatacttcctgaaagaaatacccatccaggatgtggccattcaggacttcacttgtgatgacggaaatgatgacaatagttgctccccactttctcgctgtcctactgaatgtacttgcttggatacagtcgtccgatgtagcaacaagggtttgaaggtcttgccgaaaggtattccaagagatgtcacagagttgtatctggatggaaaccaatttacactggttcccaaggaactctccaactacaaacatttaacacttatagacttaagtaacaacagaataagcacgctttctaatcagagcttcagcaacatgacccagctcctcaccttaattcttagttacaaccgtctgagatgtattcctcctcgcacctttgatggattaaagtctcttcgattactttctctacatggaaatgacatttctgttgtgcctgaaggtgctttcaatgatctttctgcattatcacatctagcaattggagccaaccctctttactgtgattgtaacatgcagtggttatccgactgggtgaagtcggaatataaggagcctggaattgctcgttgtgctggtcctggagaaatggcagataaacttttactcacaactccctccaaaaaatttacctgtcaaggtcctgtggatgtcaatattctagctaagtgtaacccctgcctatcaaatccgtgtaaaaatgatggcacatgtaatagtgatccagttgacttttaccgatgcacctgtccatatggtttcaaggggcaggactgtgatgtcccaattcatgcctgcatcagtaacccatgtaaacatggaggaacttgccacttaaaggaaggagaagaagatggattctggtgtatttgtgctgatggatttgaaggagaaaattgtgaagtcaacgttgatgattgtgaagataatgactgtgaaaataattctacatgtgtcgatggcattaataactacacatgcctttgcccacctgagtatacaggtgagttgtgtgaggagaagctggacttctgtgcccaggacctgaacccctgccagcacgattcaaagtgcatcctaactccaaagggattcaaatgtgactgcacaccagggtacgtaggtgaacactgcgacatcgattttgacgactgccaagacaacaagtgtaaaaacggagcccactgcacagatgcagtgaacggctatacgtgcatatgccccgaaggttacagtggcttgttctgtgagttttctccacccatggtcctccctcgtaccagcccctgtgataattttgattgtcagaatggagctcagtgtatcgtcagaataaatgagccaatatgtcagtgtttgcctggctatcagggagaaaagtgtgaaaaattggttagtgtgaattttataaacaaagagtcttatcttcagattccttcagccaaggttcggcctcagacgaacataacacttcagattgccacagatgaagacagcggaatcctcctgtataagggtgacaaagaccatatcgcggtagaactctatcgggggcgtgttcgtgccagctatgacaccggctctcatccagcttctgccatttacagtgtggagacaatcaatgatggaaacttccacattgtggaactacttgccttggatcagagtctctctttgtccgtggatggtgggaaccccaaaatcatcactaacttgtcaaagcagtccactctgaattttgactctccactctatgtaggaggcatgccagggaagagtaacgtggcatctctgcgccaggcccctgggcagaacggaaccagcttccacggctgcatccggaacctttacatcaacagtgagctgcaggacttccagaaggtgccgatgcaaacaggcattttgcctggctgtgagccatgccacaagaaggtgtgtgcccatggcacatgccagcccagcagccaggcaggcttcacctgcgagtgccaggaaggatggatggggcccctctgtgaccaacggaccaatgacccttgccttggaaataaatgcgtacatggcacctgcttgcccatcaatgcgttctcctacagctgtaagtgcttggagggccatggaggtgtcctctgtgatgaagaggaggatctgtttaacccatgccaggcgatcaagtgcaagcatgggaagtgcaggctttcaggtctggggcagccctactgtgaatgcagcagtggatacacgggggacagctgtgatcgagaaatctcttgtcgaggggaaaggataagagattattaccaaaagcagcagggctatgctgcttgccaaacaaccaagaaggtgtcccgattagagtgcagaggtgggtgtgcaggagggcagtgctgtggaccgctgaggagcaagcggcggaaatactctttcgaatgcactgacggctcctcctttgtggacgaggttgagaaagtggtgaagtgcggctgtacgaggtgtgtgtcctaaacacactcccggcagctctgtctttggaaaaggttgtatacttcttgaccgtgtgggactaatgaatgcttcatagtggaaatatttgaaatatattgtaaaatacagaacagacttatttttattatgagaataaagactttttttctgcatttggaaaaaaaaaaaaagaaatgcttgaactaaagcttcccctatgctggagaagtatgaagaaagatatacctggagacattagaacagcgatgggaaccattgcaactcgggtccatctttgtaacatgctgaagacaagcagaagcacatgcacgagggacagaggagctactgtgcactgctgtgaaattgcccagagcataaaacctgtgtaccctccttcacatcaaccaagttcactaggacataccaagcacatgcgtgtgaatgaggatgcaaggcaagagaatggaactccagaattcacagatagaacaaatggatgagaaatatttcatgcaaaatataaagtgtcctgaggatctgggttccatttacgagaggaaatgaaagtgctaaaataaattttatcttccttttaaatgtcagcatgtcagcagaagcagcacacaaaagtctttaccattttccagtattaatttttttgtaatataaatgataaaggagatgataaagaaccaatagattattgataaataaattagtaataatatgattttttgtttctatgagttctaaacagccctatacagtattcagtttccatgagaaatatttattgtatcaaagtacattgtacttaacattttaggccatccttttactgttccttgatgctttaatatatattaatttataattatcctgatatttttgtacatttttcaaacttaaaaatcaggatttttttttttttttttttggcaatagtactaacatagggttttatcttgggatacatatgtattggtctgtttgttgaccttgacatctgatcactgatgtcaatgacctactggcctcattcaggacacctgcagagagtatgcaaagtccgagagaggaaaacagaaatctgtatgtgagatggtcattgtacagaaagaagtggcccctctgcaacatgtcctcacagaaacgaaatggtgtgtagcaatcaacactagaaagtagaccttttgcaaattaatatgtccttgaccttttttgcccttttgtgggggtgaggtggggataaaaagactgtcatatcaagaactgtgacttttctttccctcaaacaataaaactcctttattatcttaatgctcccatgttaacatgtttgctgctaaattacaatgtagaattgataatggtttatagtgaactgtgctcttccctcattaaaatcccagggtgccctgtaaagatgcagatgtttcttcctgaaaacttctttttttacaaagaaaattagatgtacatgtataattcagtgtgctttgtctttctccagattaatatcggttacactgctgatgtttgtaaattaaacagatatttacttca

SEQ ID NO: 28271 - DNA, 4419 bp, Homo sapiens
  source 1..4419: mol_type = unassigned DNA
atggcccccgggtgggcaggggtcggcgccgccgtgcgcgcccgcctggcgctggccttggcgctggcgagcgtcctgagtgggcctccagccgtcgcctgccccaccaagtgtacctgctccgctgccagcgtggactgccacgggctgggcctccgcgcggttcctcggggcatcccccgcaacgctgagcgccttgacctggacagaaataatatcaccaggatcaccaagatggacttcgctgggctcaagaacctccgagtcttgcatctggaagacaaccaggtcagcgtcatcgagagaggcgccttccaggacctgaagcagctagagcgactgcgcctgaacaagaataagctgcaagtccttccagaattgcttttccagagcacgccgaagctcaccagactagatttgagtgaaaaccagatccaggggatcccgaggaaggcgttccgcggcatcaccgatgtgaagaacctgcaactggacaacaaccacatcagctgcattgaagatggagccttccgagcgctgcgcgatttggagatccttaccctcaacaacaacaacatcagtcgcatcctggtcaccagcttcaaccacatgccgaagatccgaactctgcgcctccactccaaccacctgtactgcgactgccacctggcctggctctcggattggctgcgacagcgacggacagttggccagttcacactctgcatggctcctgtgcatttgaggggcttcaacgtggcggatgtgcagaagaaggagtacgtgtgcccagccccccactcggagcccccatcctgcaatgccaactccatctcctgcccttcgccctgcacgtgcagcaataacatcgtggactgtcgaggaaagggcttgatggagattcctgccaacttgccggagggcatcgtcgaaatacgcctagaacagaactccatcaaagccatccctgcaggagccttcacccagtacaagaaactgaagcgaatagacatcagcaagaatcagatatcggatattgctccagatgccttccagggcctgaaatcactcacatcgctggtcctgtatgggaacaagatcaccgagattgtcaagggactgtttgatgggctggtgtccctacagctgctcctcctcaatgccaacaagatcaactgcctgcgggtgaacacgtttcaggacctgcagaacctcaacttgctctccctgtatgacaacaagctgcagaccatcagcaaggggctcttcgcccctctgcagtccatccagacactccacttagcccaaaacccatttgtgtgcgactgccacttgaagtggctggccgactacctccaggacaaccccatcgagacaagcggggcccgctgcagcagcccgcgccgactcgccaacaagcgcatcagccagatcaagagcaagaagttccgctgctcaggctccgaggattaccgcagcaggttcagcagcgagtgcttcatggacctcgtgtgccccgagaagtgtcgctgtgagggcacgattgtggactgctccaaccagaagctggtccgcatcccaagccacctccctgaatatgtcaccgacctgcgactgaatgacaatgaggtatctgttctggaggccactggcatcttcaagaagttgcccaacctgcggaaaataaatctgagtaacaataagatcaaggaggtgcgagagggagctttcgatggagcagccagcgtgcaggagctgatgctgacagggaaccagctggagaccgtgcacgggcgcgtgttccgtggcctcagtggcctcaaaaccttgatgctgaggagtaacttgatcggctgtgtgagtaatgacacctttgccggcctgagttcggtgagactgctgtccctctatgacaatcggatcaccaccatcacccctggggccttcaccacgcttgtctccctgtccaccataaacctcctgtccaaccccttcaactgcaactgccacctggcctggctcggcaagtggttgaggaagaggcggatcgtcagtgggaaccctaggtgccagaagccatttttcctcaaggagattcccatccaggatgtggccatccaggacttcacctgtgatggcaacgaggagagtagctgccagctgagcccgcgctgcccggagcagtgcacctgtatggagacagtggtgcgatgcagcaacaaggggctccgcgccctccccagaggcatgcccaaggatgtgaccgagctgtacctggaaggaaaccacctaacagccgtgcccagagagctgtccgccctccgacacctgacgcttattgacctgagcaacaacagcatcagcatgctgaccaattacaccttcagtaacatgtctcacctctccactctgatcctgagctacaaccggctgaggtgcatccccgtccacgccttcaacgggctgcggtccctgcgagtgctaaccctccatggcaatgacatttccagcgttcctgaaggctccttcaacgacctcacatctctttcccatctggcgctgggaaccaacccactccactgtgactgcagtcttcggtggctgtcggagtgggtgaaggcggggtacaaggagcctggcatcgcccgctgcagtagccctgagcccatggctgacaggctcctgctcaccaccccaacccaccgcttccagtgcaaagggccagtggacatcaacattgtggccaaatgcaatgcctgcctctccagcccgtgcaagaataacgggacatgcacccaggaccctgtggagctgtaccgctgtgcctgcccctacagctacaagggcaaggactgcactgtgcccatcaacacctgcatccagaacccctgtcagcatggaggcacctgccacctgagtgacagccacaaggatgggttcagctgctcctgccctctgggctttgaggggcagcggtgtgagatcaacccagatgactgtgaggacaacgactgcgaaaacaatgccacctgcgtggacgggatcaacaactacgtgtgtatctgtccgcctaactacacaggtgagctatgcgacgaggtgattgaccactgtgtgcctgagctgaacctctgtcagcatgaggccaagtgcatccccctggacaaaggattcagctgcgagtgtgtccctggctacagcgggaagctctgtgagacagacaatgatgactgtgtggcccacaagtgccgccacggggcccagtgcgtggacacaatcaatggctacacatgcacctgcccccagggcttcagtggacccttctgtgaacaccccccacccatggtcctactgcagaccagcccatgcgaccagtacgagtgccagaacggggcccagtgcatcgtggtgcagcaggagcccacctgccgctgcccaccaggcttcgccggccccagatgcgagaagctcatcactgtcaacttcgtgggcaaagactcctacgtggaactggcctccgccaaggtccgaccccaggccaacatctccctgcaggtggccactgacaaggacaacggcatccttctctacaaaggagacaatgaccccctggcactggagctgtaccagggccacgtgcggctggtctatgacagcctgagttcccctccaaccacagtgtacagtgtggagacagtgaatgatgggcagtttcacagtgtggagctggtgacgctaaaccagaccctgaacctagtagtggacaaaggaactccaaagagcctggggaagctccagaagcagccagcagtgggcatcaacagccccctctaccttggaggcatccccacctccaccggcctctctgccttgcgccagggcacggaccggcctctaggcggcttccacggatgcatccatgaggtgcgcatcaacaacgagctgcaggacttcaaggccctcccaccacagtccctgggggtgtcaccaggctgcaagtcctgcaccgtgtgcaagcacggcctgtgccgctccgtggagaaggacagcgtggtgtgcgagtgccgcccaggctggaccggcccactctgcgatcaggaggcccgggacccctgcctcggccacagatgccaccatggaaaatgtgtggcaactgggacctcatacatgtgcaagtgtgccgagggctatggaggggacttgtgtgacaacaagaatgactctgccaatgcctgctcagccttcaagtgtcaccatgggcagtgccacatctcagaccaaggggagccctactgcctgtgccagcccggctttagcggcgagcactgccaacaagtcttcagagcacaagtatttcaaagcagcctacctgggaactgctcatggtcctgctggccacctagaccaccaatgccctga

SEQ ID NO: 28272 - DNA, 9706 bp, Homo sapiens
  source 1..9706: mol_type = unassigned DNA
gagagcgagcgccggccagctcacccggccgccccgtgccccagccgcagccgccgcgctccccagcccagccccaagccggacctccccgggcgccacgccccattgcgctcgccccaggtccccaacccggcccgcgggccagcggggccagggggcgctccgcacctgggcactcccagcgatgcgcagcggggcagcgccggccccgccgatggagctgctgttgctgccgccgccgccgcccggagcgccccgctccgcccgcgccccgtgcgcctgagcaccgagctcgcccctcctccgcgctaactccgccgcccgctccccaggccgcccgcgctccccgcgcgcctcctcgggctccacgcgtcttgccccgcagaggcagcctcctccaggagcggggccctgcacaccatggcccccgggtgggcaggggtcggcgccgccgtgcgcgcccgcctggcgctggccttggcgctggcgagcgtcctgagtgggcctccagccgtcgcctgccccaccaagtgtacctgctccgctgccagcgtggactgccacgggctgggcctccgcgcggttcctcggggcatcccccgcaacgctgagcgccttgacctggacagaaataatatcaccaggatcaccaagatggacttcgctgggctcaagaacctccgagtcttgcatctggaagacaaccaggtcagcgtcatcgagagaggcgccttccaggacctgaagcagctagagcgactgcgcctgaacaagaataagctgcaagtccttccagaattgcttttccagagcacgccgaagctcaccagactagatttgagtgaaaaccagatccaggggatcccgaggaaggcgttccgcggcatcaccgatgtgaagaacctgcaactggacaacaaccacatcagctgcattgaagatggagccttccgagcgctgcgcgatttggagatccttaccctcaacaacaacaacatcagtcgcatcctggtcaccagcttcaaccacatgccgaagatccgaactctgcgcctccactccaaccacctgtactgcgactgccacctggcctggctctcggattggctgcgacagcgacggacagttggccagttcacactctgcatggctcctgtgcatttgaggggcttcaacgtggcggatgtgcagaagaaggagtacgtgtgcccagccccccactcggagcccccatcctgcaatgccaactccatctcctgcccttcgccctgcacgtgcagcaataacatcgtggactgtcgaggaaagggcttgatggagattcctgccaacttgccggagggcatcgtcgaaatacgcctagaacagaactccatcaaagccatccctgcaggagccttcacccagtacaagaaactgaagcgaatagacatcagcaagaatcagatatcggatattgctccagatgccttccagggcctgaaatcactcacatcgctggtcctgtatgggaacaagatcaccgagattgtcaagggactgtttgatgggctggtgtccctacagctgctcctcctcaatgccaacaagatcaactgcctgcgggtgaacacgtttcaggacctgcagaacctcaacttgctctccctgtatgacaacaagctgcagaccatcagcaaggggctcttcgcccctctgcagtccatccagacactccacttagcccaaaacccatttgtgtgcgactgccacttgaagtggctggccgactacctccaggacaaccccatcgagacaagcggggcccgctgcagcagcccgcgccgactcgccaacaagcgcatcagccagatcaagagcaagaagttccgctgctcaggctccgaggattaccgcagcaggttcagcagcgagtgcttcatggacctcgtgtgccccgagaagtgtcgctgtgagggcacgattgtggactgctccaaccagaagctggtccgcatcccaagccacctccctgaatatgtcaccgacctgcgactgaatgacaatgaggtatctgttctggaggccactggcatcttcaagaagttgcccaacctgcggaaaataaatctgagtaacaataagatcaaggaggtgcgagagggagctttcgatggagcagccagcgtgcaggagctgatgctgacagggaaccagctggagaccgtgcacgggcgcgtgttccgtggcctcagtggcctcaaaaccttgatgctgaggagtaacttgatcggctgtgtgagtaatgacacctttgccggcctgagttcggtgagactgctgtccctctatgacaatcggatcaccaccatcacccctggggccttcaccacgcttgtctccctgtccaccataaacctcctgtccaaccccttcaactgcaactgccacctggcctggctcggcaagtggttgaggaagaggcggatcgtcagtgggaaccctaggtgccagaagccatttttcctcaaggagattcccatccaggatgtggccatccaggacttcacctgtgatggcaacgaggagagtagctgccagctgagcccgcgctgcccggagcagtgcacctgtatggagacagtggtgcgatgcagcaacaaggggctccgcgccctccccagaggcatgcccaaggatgtgaccgagctgtacctggaaggaaaccacctaacagccgtgcccagagagctgtccgccctccgacacctgacgcttattgacctgagcaacaacagcatcagcatgctgaccaattacaccttcagtaacatgtctcacctctccactctgatcctgagctacaaccggctgaggtgcatccccgtccacgccttcaacgggctgcggtccctgcgagtgctaaccctccatggcaatgacatttccagcgttcctgaaggctccttcaacgacctcacatctctttcccatctggcgctgggaaccaacccactccactgtgactgcagtcttcggtggctgtcggagtgggtgaaggcggggtacaaggagcctggcatcgcccgctgcagtagccctgagcccatggctgacaggctcctgctcaccaccccaacccaccgcttccagtgcaaagggccagtggacatcaacattgtggccaaatgcaatgcctgcctctccagcccgtgcaagaataacgggacatgcacccaggaccctgtggagctgtaccgctgtgcctgcccctacagctacaagggcaaggactgcactgtgcccatcaacacctgcatccagaacccctgtcagcatggaggcacctgccacctgagtgacagccacaaggatgggttcagctgctcctgccctctgggctttgaggggcagcggtgtgagatcaacccagatgactgtgaggacaacgactgcgaaaacaatgccacctgcgtggacgggatcaacaactacgtgtgtatctgtccgcctaactacacaggtgagctatgcgacgaggtgattgaccactgtgtgcctgagctgaacctctgtcagcatgaggccaagtgcatccccctggacaaaggattcagctgcgagtgtgtccctggctacagcgggaagctctgtgagacagacaatgatgactgtgtggcccacaagtgccgccacggggcccagtgcgtggacacaatcaatggctacacatgcacctgcccccagggcttcagtggacccttctgtgaacaccccccacccatggtcctactgcagaccagcccatgcgaccagtacgagtgccagaacggggcccagtgcatcgtggtgcagcaggagcccacctgccgctgcccaccaggcttcgccggccccagatgcgagaagctcatcactgtcaacttcgtgggcaaagactcctacgtggaactggcctccgccaaggtccgaccccaggccaacatctccctgcaggtggccactgacaaggacaacggcatccttctctacaaaggagacaatgaccccctggcactggagctgtaccagggccacgtgcggctggtctatgacagcctgagttcccctccaaccacagtgtacagtgtggagacagtgaatgatgggcagtttcacagtgtggagctggtgacgctaaaccagaccctgaacctagtagtggacaaaggaactccaaagagcctggggaagctccagaagcagccagcagtgggcatcaacagccccctctaccttggaggcatccccacctccaccggcctctctgccttgcgccagggcacggaccggcctctaggcggcttccacggatgcatccatgaggtgcgcatcaacaacgagctgcaggacttcaaggccctcccaccacagtccctgggggtgtcaccaggctgcaagtcctgcaccgtgtgcaagcacggcctgtgccgctccgtggagaaggacagcgtggtgtgcgagtgccgcccaggctggaccggcccactctgcgatcaggaggcccgggacccctgcctcggccacagatgccaccatggaaaatgtgtggcaactgggacctcatacatgtgcaagtgtgccgagggctatggaggggacttgtgtgacaacaagaatgactctgccaatgcctgctcagccttcaagtgtcaccatgggcagtgccacatctcagaccaaggggagccctactgcctgtgccagcccggctttagcggcgagcactgccaacaagagaatccgtgcctgggacaagtagtccgagaggtgatccgccgccagaaaggttatgcatcatgtgccacagcctccaaggtgcccatcatggaatgtcgtgggggctgtgggccccagtgctgccagcccacccgcagcaagcggcggaaatacgtcttccagtgcacggacggctcctcgtttgtagaagaggtggagagacacttagagtgcggctgcctcgcgtgttcctaagcccctgcccgcctgcctgccacctctcggactccagcttgatggagttgggacagccatgtgggaccccctggtgattcagcatgaaggaaatgaagctggagaggaaggtaaagaagaagagaatattaagtatattgtaaaataaacaaaaaatagaacttatttttattatggaaagtgactattttcatcttttattatataaatatattacaccatctgcgtatatgtaccatatagtgagttatttttaccaagttttgtgttgtgtatttgttgtgtttttaaaaatagctgtttaaaaatttaagaaaaaaatagactaataaaaatgctttaaaacaaaaggataagaataaagaatgatagcctgtctgaggaaggaggaagatgttttcatgtttatgaaacggtattatgtcggcagtagaccaagagctgctcattgagatcagaaaaaggaataagaggaagagagagaaggaaaagacctttgtttcttgttttttaactcccttttatttttcctcccctaaaattacccagcttttcggagtcctggatgtcagtgcccaaaatgcccagttcttccaggaaaagctgctgagccctggccttctcagtctcactgccactcaaaaatattgctgtccctgtctgtcccagaccccccttcagggtatctgaacccactgggggacccctcttctccttcctgggtggccctggcttccgtatctgaacccactgggggacccctcttctccttcctggctggccctggcttccaatcgaggactgactattgaagtctgctacaggtgtcatttggaactgtcttaccaaattttaaaacagctgctatttttcctgctcctccccaggagaggggtcttcctagaggaggcgagggaagagaatatcatggtgtctcctcaggacccatgcactggccctctctcctccttccaggtaatttttcattggaatgtatcccagtagagaaggtagtcagcccttcttggaagcggaaggctgggagccaagtcaagtctgcccacagcgctagatgtccaactctggaaggttcttggaggctcttgttgtaagacaggcctctgccacctgatcctccaggtcaccagcatgacgatagagactccttgcccatctgtgacactttccaatgcatatccaaactttaccttattttatctatgcaacccctgcctccctgggaaggataagggagtagagctgggttcactaagaaggaagtttaggccctcacaggctctggaacttgccttaagccacacaccagataagtggaggagccagaccagaagtccagacccaaagcttgagattcttcctctagaatgggtgagcacaggtgattcaggcggcttaaatccatcagagcagccctgccggaaaaggaaataatatgatgttttttcctgctcttgttctgccttgctcactccttctccctccgcagtatctggaaagattctggagaccagggcttatgcatctagggaaagtgaccaagggcagcctatccagcctctgcctccattcctgaaggggacttccctgcccctgtttctttccatgtctctccctccctcactcccatttgcccccttccaccccatcaggttagccacatatcttccagggctcagctgttcacaccaactccctggctcttatcatccatccctccttcccccaggagcttccactgtaggagtttcagggagaagagtttggaattcattggacctttcagccctcaggttccctagaggagcctagttgatctgtgagtaccaatggtgggccaaagacgcagggaataatgaagggagaaagaaaagaaaggaagatggaggaaaacgaggcaactggaagaaggaaggaaggaaagaaggaagggatggaggggatgaagagaagggagagagggatatagctgaggaatttatctaaaaatgtgcatgtaaatctccattatgttccaggtactgtgccttatgatggctttgttttttgttgtcattagagacaaggtcttgctttgtcacccaggctggagtagagtggttcgatcatagctcaccgcagcctcaacctcctaggctcaagccatcttcctgcctcagtctcccaaaatgctgggattacaggtgtgagccactatgctcagcctgtttcaaacattattataatagcagatttatttagtactttattatacatcagataccactctaattgtgaaatagatatatattcatttaattattgaaacaaccatgtagttaaaacactattaactcattttacagttgagtagactgagacacagagaagttaaagaacttgcccaagagtaaatgtctaataaaccgtagagccaggatctgggcccaggctgtctgactccagaacttgctcactcaaccactaaaccatcctgcttctcatgggaaagaaacacatcctgcctttgaggatcctacagcctgtgacaaaaacagtcataaaaatggacaattgccttattacacaaggagctcttaagtggcaatacaagcaatggaagtggctgtccagaggagggaacttctagtcctaggtctttaaggatgaataggagtttgccagagtgagaaagggaattgaactttcctgggagtggccttttaaaaagcaatgagatatggccaggcctggcttgtttggggaagagtcaaaatctagggtggcaagagtatgggaagcacactgaggagcagagagaaatggggtaggtaggaaggtagggttttgaccacaaagagctgtgcatgctaaactgggccacaggtgccagcagggttgtttgaggaagggaagagcaagacaagctctggtttaggaagagagctgtggcagcataaaggcctgaaagaggagacagagctgtcacccaaaatggacttgagagctccctgtggtttactctgtggctagaaaacactgccggccagatggatcacaaatgtctatggtagcttagaagctctgctcttgaagaggatcctgggatctgcccaacacccttcccaacctccatttccccatccccacctccattgccccatcccccctctccccctaggcaggtggatctgagccttatcccaccaccaatgcccctgctagcctctccccacccagcccagagcctactcagcctgccatctcaagagccccaccgagggtcactggcttcctgggaggagtcaccaggctgccagctttccctctgcctccccaaggaacctgagacctccctctgctcatcaccctgggcccaatcctgaatccagcccccatcaaccaagacagcaaaagggccaggtctgtcccttataattttgagccttctccctcaagtttggaagccctgactttaagaaatgccaaatgcaaggaccattaagaaaattctccccgaaatgaggctcctctaacaaatgatgattaaaacgctctctccttgagcagtcacattctagaaacaggacattccatgaggcaggaagagttcagttaatttgctcctgaaaaagtgtggttcagtgtttgtgtggcaatgtacgtgggcagaagaggccgctcaagctgtgtcccccctgagcaggattcaggaaagggaaaagaagttctcttcaactcagccaaggggccgtacgatggccgatgagattatgtatttaaaagttctttgtaaagtgtaaactaaaaaccttaaatgtaagatgctgttgttattattactgttgttgttgctgttatggacatgccaaaaggcccttgttagaagacagttttgccttttcaatctcatagcaaggaactcaagtctgatgcttcaaaaagatgagaagaagggcaagaagagggataactcccaagctcagagggaaaaaaaaggtgggggaaaagagccccagggtgaccttcaggaaaggccaggaccaggatgatctaacctttcccttcaccagaaacaaagctattgccagactgaaccctaaagtcaagcagtcacccactgcctttgctgggagcagaagcccatagcaacaagtgacctgcccctcagactcaagatcccagataccagagctggaggagtcatagggcattactggtaggcaggaaaactgagggtcgaacaaatggaagaatgcggtgatcatagaccaaagacacacagataattaaccccatgtgtccacccaggccaaagttcttcctgctaccccacagtggatgtccaggcagatggtccccacatgatggggaagcagagggcatagtgtggttttgtgggacttgttcatgttttgtagtgtgggctcaacagtgccaaaggaaacactagggaaaagttggtgaaacatgccagctagcaggaccagtaaaggcataatcaggcatttggcaaagcttgcttttctaattcaatgataggttctaataggaaatttttgaagattttttaaaacaatgttatagtggcacttccccagtatggaataaataacatgcattcttttttcaatatactgtcatattcagatgtcattaaaataaatggatgagtcacagaggagctatcagatgctctcatgactaccataactca

SEQ ID NO: 28273 - DNA, 8943 bp, Homo sapiens
  source 1..8943: mol_type = unassigned DNA
cgggacccttgagcgccggagccgacagctggaggcaggaagggagggttgtggcgcccgagctgggcgcgttcccagcgcctgccctccgccgctggccctgtcccgggcgcccggtgcgggtctcgaacaatggtgcggagcgccggcgcgagccccgcgcccgcccagcggccgtagaggaagtggccgggctcccggcgaggtgggcagggagacgtcccccgccactcgctggctggagtttgcctgcgcgtccggcctctcccccggggatcccctgggattaccgacggagctcaatttcgagagtatggtgccagcgcccgggctaatctagtcctctctactcgctctttttcccctcctcctcctacttctcctctccctcctcccttccctcgggtcggcgctgcctctggattgcctgcgtgtgggagtacaactctgcctctccaaggagaacgggttgtgaccactgaacaaaacttgcccattgaaagcaaacccggaacagctggataatgtccaccccgagccgattcaagaaggacaaagagatcatagccgagtatgaaagtcaagtcaaagaaattcgagctcaactggtagaacaacaaaaatgcctggagcagcaaacggagatgcgagttcagcttctccaggatctgcaagatttcttccgaaaaaaagctgaaattgagacggaatattcccggaatctagagaagttagcagaaaggttcatggcaaaaacaagaagcactaaggatcatcaacaatacaagaaagaccagaacctgttgtctccagtgaactgctggtatttgctcctgaaccaagtaaggagagaaagcaaagaccatgcaaccttgagtgacatctatctgaacaatgtgattatgcggttcatgcagataagtgaggattctaccaggatgtttaaaaagagcaaagagattgcattccaacttcatgaggatttaatgaaggttcttaatgagctttatacggtgatgaaaacataccatatgtatcatgcagagagcatcagtgcagagagcaagctgaaagaggccgaaaaacaagaggaaaagcaaattgggagatctggtgatccagtcttccatattcgactagaggagagacatcaacggcgaagctctgtaaagaaaattgaaaaaatgaaagaaaaaagacaagcaaaatattcagaaaataagctaaaatcaattaaggcacggaacgaatatctcctaacacttgaagccaccaatgcctcagttttcaagtactatattcatgatctttctgatttaattgattgctgtgatcttggctaccatgcaagtctgaacagagccctaagaacatatctgtctgcggagtacaaccttgaaacctccagacatgagggcttagacattattgagaatgcagttgataatttagagcccaggagcgataagcagagattcatggagatgtaccctgctgcgttctgtccaccaatgaagtttgagtttcagtctcacatgggtgatgaggtgtgccaggtcagtgcccagcagccagtccaggcagagctcatgctcaggtaccaacagttgcagtcccgccttgccacgctcaaaatcgagaatgaagaggttaagaaaacgactgaagccaccttgcagacgatacaagatatggtcaccatcgaggactatgatgtttctgaatgcttccagcacagtcgttccacagaatcagtgaagtccactgtctctgaaacctacctgagtaaacccagcatcgccaagagaagagccaaccagcaggaaactgaacagttctacttcatgaaactcagagaatatttggaaggcagtaatctcatcacaaaacttcaagccaaacatgacttgctgcagaggaccctgggagaaggtcatagagctgaatatatgactacaaggcctccaaatgttccccctaagccccagaaacacaggaagtccaggccccgctcacagtataatactaagttgtttaatggggatttggaaacattcgtcaaggactcaggacaggttattcccctcattgtggaaagctgtattcggttcatcaatctctatggtcttcagcatcaggggattttcagagtgtctggttcccaggtggaagtcaatgatattaaaaattcatttgagagaggtgaaaatcctttggctgatgaccagagtaaccatgatattaactcagttgctggcgttctgaagctctatttccgtgggctggaaaaccccctctttcctaaggaaagatttaacgatctgatttcttgtatcagaatagataatctctatgagagggcgcttcacatccgcaaactcctcctgactttgcccaggtcggtccttatagtgatgaggtacctctttgccttcctcaatcatctatcacagtacagcgatgagaatatgatggacccttataacctggccatttgctttggcccaacattgatgcctgtcccagaaatacaggatcaagtgtcttgccaggcacatgtgaatgaaattatcaaaaccatcatcatccaccatgagactattttcccagatgctaaagagctggatggccctgtttatgagaaatgtatggctggagatgactattgcgacagcccatacagtgagcacggtacattggaggaagtggaccaagatgctggtacagagccccacacaagtgaagatgaatgtgagccaatagaagcaatagccaagtttgactatgttgggcggtctgccagagaactatccttcaagaagggtgcctccctgctgctgtatcaccgtgcatctgaggactggtgggaaggcaggcacaacgggattgacgggctggtgcctcaccagtatatagtggtgcaggatatggatgatacgttttcagacactctgagccaaaaagccgacagtgaggccagcagtgggccagtcacggaagacaagtcctcatccaaggacatgaactccccgacagaccgtcatcctgacggctatttagccaggcaacgaaaaagaggagagccaccccctccagtaaggcgtcctggcaggaccagtgatggccattgcccgctccaccctccacatgccctttctaactcctcagttgacctagggtccccaagccttgccagtcacccccggggcctgctgcagaaccgtggcctcaacaatgacagtcctgagcggaggcgcaggcctggccatggcagcctgaccaacatcagccggcacgactccctcaagaagatcgacagccctcccattagaaggtccacgtcatcagggcaatacacgggcttcaatgaccacaagccactggacccagagacaattgctcaggatattgaagaaacgatgaacacagctttgaatgaactccgagaactggagagacagagcacagcaaagcatgcccctgatgtggtgctggataccctggagcaagtgaaaaactctcccacccctgccacttccacggaatctctcagccctttgcacaacgttgccctcaggagctccgagcctcagattcgacgtagcacgagctcctccagtgacacaatgagtactttcaagcctatggtggcacccagaatgggcgtgcagctgaagcctccagcccttaggccaaaacctgctgttcttccaaaaacaaatcctaccataggacctgccccacctccccagggtccaacagacaagtcatgcacaatgtaaaaaccagccaagcaaggccataaagggaggtgacttaaaaaagaaaatggattagtgacaaaagtcactgatccataactttccttagttttgtgcttataactggagatcttttggcttttctatgttgtcgaatgtaatgtctgagactagctaaattaacacgggcatttgtattttgtaatttttttaaataactggacatatgtcattttaaggacaatagaaacacttagacttacttgaaaatccaatgctgcaccacttgtaatgaaggcaacaccgctctccacattgtacagagcttcaggtttaatgtagcccagctgagtcagaaaggttgtgacctgaaggcagaagaacccgaatgccacacctcattggagtatagccagtgttggtctgtggcacttgggctgaaaggtgataatggcattgcgtggtagctgacaatgagcaccttcggttccatgtggagcggggtttagctcatgcaaaagacttgcaattgtctccatgggacgatcccagtgggactgtcagcccacagctcgagtgggttggatgcttgcctctttcctaacagttatttccccgggtccagcttaaagactcgatggaaggaggtagaacctctgctgttactgcttgaacttaacctgggaaaggagaggaagacaccatctccaaagctattaatgtcactccttttgcgagcatgattaggccccggagatttccaagtccccccatctacacttacaaacgattagaagggtttaattttaaagactttctggttacactactccacgaactcctccaaagatccgttattcaataactgcctagaaaatgtttccatctcctctaaatccctgtgttctcctctgtggaaatgaaggcagcaagaagcacctgaggccttggttcatgcagtgttctcttttgactaaatcacctaggttcctttaaacatgctacaaagcccaggcatggtggtgcacacctgtactcccagctactcgggtggtttacacaggaggatggctttgggcctagtagttcgagtccagcctgggcagcatagtgtgagaccctgtctcttaaaaaaaaaaaaaatgctacaaagtcctgatgatcctaaatttgaaatcccaactgtcctctccatttgtctttgagccaaccctgaactggccctggtacctgagtaagagccatgcagggccatcagcagaacatggccttgtggttctcacccagttgtgtacctcacaaccacaacttctttttctttgtcccttttcccctttttggttttggttttgtatgtgggctctatgtaactcccatagtcagctgaactctcaattggagaccctctttctctggcatcctagcacacaggcaattttttaagcctatatttatgctacattttcccccatcttaagaaaatttgctttgatttccattctcctactagcagcagctgatatcacctgtagacctatgagcattttatctattctatcattgaagttactgataaagatttttgttgttgttgttgttgttgggagaaatggatttcccacaactaatccctctggcccaccattaatttccttcttggtttcatttcaaactggcagccaattgcacgcccatctaagagctacacagtgtagattttacttcatcagcccattggtgaatgcatcgtgcagaaaagaactgggatctgtactaaaatcaagatcattactttgatctctacctcagtttgccagtgtagtcattctattgcaggaagagattaaattgatgagatattgttactttcagagtcacactgctgattgcttgcctggggcctaatttcacaaatgaatagtgacttttttcccatgtatttctaggtatggtaaacttttaaacctccaaattttcagagccatactttttgcccattttgaaaaagaagcccaggacagcaccttgtctagcccctccccatttctcctgagcttttggggtccttcagcacccttggacaccgtggagatccagccaagactgagctttgaatagcactagcccttttaaacaatcctcacaaattccttaggaatttaaactttccaaaataatcccccacttttttttttttttttttttttttttgagttggagtcttgctctgtcgcccaggccagagtacagtggtgcaatctcggctccctgcaacctccatctcccgggttcaagcaattctcctgagtagctgggattacaggcgccaccaccacgcccagctaatttttgtatttttagtagagatggggtgtcaccatgttggccaggctggtctcaaactcctgacctcaggtgacccaccagcctcagcctcccaaagtgctgggattacagatgtgagccaccatgcccggccattccaccacttctttaaaatagtaagaattcttaaaaaccatattccttgtttgatggaagagtaagatgttaacagagggcatcaaagggccagaggtgtctttgaatttattttttttcaatgtcttttctgagcttcagccttagcttttcagatcttcctcctacctgttcatttattcagccttctatctggtcatcctccccagcggctcctctctctgatgtgtccacctacggtggaacgaggattgcctttctgtgctccccatcaggactttgctgtcttggccggcaggagtcgtgctgctgcagagcctcacaggctgtgccttgtttcaggaaacagctcctaatactctcccatcactcactttacctgtctccatcttatttccctatactcctattgtcagcttgagactttttttttttttcaattccaaatgaagggtatgacctcagagtgagtgaggactcagtaaagactcacctctccttacttggtttattaaatgtcttcagattccagagataagacaaggtggccacttcacaaagaatccagaatcatgctcagtaaagctcattaaaagccactgcagctgagaaggttcacagcccttctttatagccacagaggcagcacacaggggaggtgggaagacacagggaaacgagagaagaaggataatgaggccttgaggtgttctgcccccaatttcaaggagcttatcaggcttcatgtgcaatttggggaggggagctttttgatggtgggtaaataatggctctacaaagattacctgactccactgacacaagaatatgtattctcagctgatataactgtgtgttcacatcccatccatagaactcactgaaggagattcatcaagtcagccttttggactgggttggggtttggggagtggatttggggatagagagaaaggtgtacttagtacacattttctaatgggcgttacgtgaactgtttgaacctgctgagtggcgctttgtagagctccatgttcacgttcagtgtcaacaccattcaacagctttgcacatcttcgtacaacataatctggctttggtgccccttgagccacctgtagaataatttatagcagggtcccacaatctactgcaatgatcgtgaacagttatcagtggatatagtgctccaagagtcaaattgtatccgttaagggttttctaacttttgctatcccccccgcgaccaaaaaaagggggggtttataatttaaagaaaaggaaaagaggcgtgggttggtagttgtgtccttaacatttaggaatgacatagcctctggagtctacaaactgaagaaactttcatctgatcagccttggaaatccaaagttaaagagcctatgtgtctcttgaggcgggggttagaggattcaaatttgggatgatgctcattgattcctgaccatagcagtgagaggccattttttgtgcaggaaatgtgcttaggactcagtcttgttttcgattatccaccacagaaaccctgagacacagagcagcttagaagtctctacccaggcgtaaatagagctccctactccagaccacctgccacccacctcccaagttgagaacacaagctccagctgggctggagagtcaggcttggtgcagggtgactttggcgaagttttgtcagatccataaagcaaactggaatttgagctttcacttaccctagtatacgttcttaaaaaaaaaaaaaagtctatgtggtataatcgagatggatacctgtgtctttaaattacgtagggaattttgtatgtttaaataattgtactgggttccataatgcttatcttagaaactttagtaaaagaaaatatatgaaccgtgcatttgtgaatgccccccttagagcattcatccaagttcagtgtgtagtgtgatggttattatagatatttaaagtatagtaagtggctgtgtaacaggagagactgctgtttacctacgtactgaagggtaactgctgcccgcgtaattaaatcagtattgtcctttcctgtcggtttgatcaattgcggtaccggtagcttcctgcttgtgactgttacctaattgtgtcaatgtacatctgtagtatgtacatgtgaaagtgcctttctattttagaggagttttagccttgctcttgtaccgttgccccgctctgtgccccacccccacctcctcctcccaattcctgctgcccactcgagtgtttcgaagcttcctccctgtcccccaccttccccatccccgccttcctgtgcctcggtgctcagtaatgtcccatctcacctccctgtcggtcctcagactgtctcgttttccttgtagacgtgattgtgcctttctcacccctgtgtcctcccatcccaccgcatcagtcccccgctcatgtgctgctgacagcatcgcattcgcccgtgctctgtactgcctctcaccatttcattccctcctctctgaggtgaaaataaagggggatgcttttacagtctggaaagaaaaaaaatgttttgttaatctgttgtgacaatgcacttttatgtatagtactgtacatttttggcatgtaccattacaggcttcagtatacagtcaggtttgttcttcacggtgtatctttataataaataagatagttctggc

SEQ ID NO: 28274 - DNA, 8406 bp, Homo sapiens
  source 1..8406: mol_type = unassigned DNA
gttgtgaccactgaacaaaacttgcccattgaaagcaaacccggaacagctggataatgtccaccccgagccgattcaagaaggacaaagagatcatagccgagtatgaaagtcaagtcaaagaaattcgagctcaactggtagaacaacaaaaatgcctggagcagcaaacggagatgcgagttcagcttctccaggatctgcaagatttcttccgaaaaaaagctgaaattgagacggaatattcccggaatctagagaagttagcagaaaggttcatggcaaaaacaagaagcactaaggatcatcaacaatacaagaaagaccagaacctgttgtctccagtgaactgctggtatttgctcctgaaccaagtaaggagagaaagcaaagaccatgcaaccttgagtgacatctatctgaacaatgtgattatgcggttcatgcagataagtgaggattctaccaggatgtttaaaaagagcaaagagattgcattccaacttcatgaggatttaatgaaggttcttaatgagctttatacggtgatgaaaacataccatatgtatcatgcagagagcatcagtgcagagagcaagctgaaagaggccgaaaaacaagaggaaaagcaaattgggagatctggtgatccagtcttccatattcgactagaggagagacatcaacggcgaagctctgtaaagaaaattgaaaaaatgaaagaaaaaagacaagcaaaatattcagaaaataagctaaaatcaattaaggcacggaacgaatatctcctaacacttgaagccaccaatgcctcagttttcaagtactatattcatgatctttctgatttaattgattgctgtgatcttggctaccatgcaagtctgaacagagccctaagaacatatctgtctgcggagtacaaccttgaaacctccagacatgagggcttagacattattgagaatgcagttgataatttagagcccaggagcgataagcagagattcatggagatgtaccctgctgcgttctgtccaccaatgaagtttgagtttcagtctcacatgggtgatgaggtgtgccaggtcagtgcccagcagccagtccaggcagagctcatgctcaggtaccaacagttgcagtcccgccttgccacgctcaaaatcgagaatgaagaggttaagaaaacgactgaagccaccttgcagacgatacaagatatggtcaccatcgaggactatgatgtttctgaatgcttccagcacagtcgttccacagaatcagtgaagtccactgtctctgaaacctacctgagtaaacccagcatcgccaagagaagagccaaccagcaggaaactgaacagttctacttcatgaaactcagagaatatttggaaggcagtaatctcatcacaaaacttcaagccaaacatgacttgctgcagaggaccctgggagaaggtcatagagctgaatatatgactacaagccgaggacgaagaaactcgcacacaagacatcaggactcaggacaggttattcccctcattgtggaaagctgtattcggttcatcaatctctatggtcttcagcatcaggggattttcagagtgtctggttcccaggtggaagtcaatgatattaaaaattcatttgagagaggtgaaaatcctttggctgatgaccagagtaaccatgatattaactcagttgctggcgttctgaagctctatttccgtgggctggaaaaccccctctttcctaaggaaagatttaacgatctgatttcttgtatcagaatagataatctctatgagagggcgcttcacatccgcaaactcctcctgactttgcccaggtcggtccttatagtgatgaggtacctctttgccttcctcaatcatctatcacagtacagcgatgagaatatgatggacccttataacctggccatttgctttggcccaacattgatgcctgtcccagaaatacaggatcaagtgtcttgccaggcacatgtgaatgaaattatcaaaaccatcatcatccaccatgagactattttcccagatgctaaagagctggatggccctgtttatgagaaatgtatggctggagatgactattgcgacagcccatacagtgagcacggtacattggaggaagtggaccaagatgctggtacagagccccacacaagtgaagatgaatgtgagccaatagaagcaatagccaagtttgactatgttgggcggtctgccagagaactatccttcaagaagggtgcctccctgctgctgtatcaccgtgcatctgaggactggtgggaaggcaggcacaacgggattgacgggctggtgcctcaccagtatatagtggtgcaggatatggatgatacgttttcagacactctgagccaaaaagccgacagtgaggccagcagtgggccagtcacggaagacaagtcctcatccaaggacatgaactccccgacagaccgtcatcctgacggctatttagccaggcaacgaaaaagaggagagccaccccctccagtaaggcgtcctggcaggaccagtgatggccattgcccgctccaccctccacatgccctttctaactcctcagttgacctagggtccccaagccttgccagtcacccccggggcctgctgcagaaccgtggcctcaacaatgacagtcctgagcggaggcgcaggcctggccatggcagcctgaccaacatcagccggcacgactccctcaagaagatcgacagccctcccattagaaggtccacgtcatcagggcaatacacgggcttcaatgaccacaagccactggacccagagacaattgctcaggatattgaagaaacgatgaacacagctttgaatgaactccgagaactggagagacagagcacagcaaagcatgcccctgatgtggtgctggataccctggagcaagtgaaaaactctcccacccctgccacttccacggaatctctcagccctttgcacaacgttgccctcaggagctccgagcctcagattcgacgtagcacgagctcctccagtgacacaatgagtactttcaagcctatggtggcacccagaatgggcgtgcagctgaagcctccagcccttaggccaaaacctgctgttcttccaaaaacaaatcctaccataggacctgccccacctccccagggtccaacagacaagtcatgcacaatgtaaaaaccagccaagcaaggccataaagggaggtgacttaaaaaagaaaatggattagtgacaaaagtcactgatccataactttccttagttttgtgcttataactggagatcttttggcttttctatgttgtcgaatgtaatgtctgagactagctaaattaacacgggcatttgtattttgtaatttttttaaataactggacatatgtcattttaaggacaatagaaacacttagacttacttgaaaatccaatgctgcaccacttgtaatgaaggcaacaccgctctccacattgtacagagcttcaggtttaatgtagcccagctgagtcagaaaggttgtgacctgaaggcagaagaacccgaatgccacacctcattggagtatagccagtgttggtctgtggcacttgggctgaaaggtgataatggcattgcgtggtagctgacaatgagcaccttcggttccatgtggagcggggtttagctcatgcaaaagacttgcaattgtctccatgggacgatcccagtgggactgtcagcccacagctcgagtgggttggatgcttgcctctttcctaacagttatttccccgggtccagcttaaagactcgatggaaggaggtagaacctctgctgttactgcttgaacttaacctgggaaaggagaggaagacaccatctccaaagctattaatgtcactccttttgcgagcatgattaggccccggagatttccaagtccccccatctacacttacaaacgattagaagggtttaattttaaagactttctggttacactactccacgaactcctccaaagatccgttattcaataactgcctagaaaatgtttccatctcctctaaatccctgtgttctcctctgtggaaatgaaggcagcaagaagcacctgaggccttggttcatgcagtgttctcttttgactaaatcacctaggttcctttaaacatgctacaaagcccaggcatggtggtgcacacctgtactcccagctactcgggtggtttacacaggaggatggctttgggcctagtagttcgagtccagcctgggcagcatagtgtgagaccctgtctcttaaaaaaaaaaaaaatgctacaaagtcctgatgatcctaaatttgaaatcccaactgtcctctccatttgtctttgagccaaccctgaactggccctggtacctgagtaagagccatgcagggccatcagcagaacatggccttgtggttctcacccagttgtgtacctcacaaccacaacttctttttctttgtcccttttcccctttttggttttggttttgtatgtgggctctatgtaactcccatagtcagctgaactctcaattggagaccctctttctctggcatcctagcacacaggcaattttttaagcctatatttatgctacattttcccccatcttaagaaaatttgctttgatttccattctcctactagcagcagctgatatcacctgtagacctatgagcattttatctattctatcattgaagttactgataaagatttttgttgttgttgttgttgttgggagaaatggatttcccacaactaatccctctggcccaccattaatttccttcttggtttcatttcaaactggcagccaattgcacgcccatctaagagctacacagtgtagattttacttcatcagcccattggtgaatgcatcgtgcagaaaagaactgggatctgtactaaaatcaagatcattactttgatctctacctcagtttgccagtgtagtcattctattgcaggaagagattaaattgatgagatattgttactttcagagtcacactgctgattgcttgcctggggcctaatttcacaaatgaatagtgacttttttcccatgtatttctaggtatggtaaacttttaaacctccaaattttcagagccatactttttgcccattttgaaaaagaagcccaggacagcaccttgtctagcccctccccatttctcctgagcttttggggtccttcagcacccttggacaccgtggagatccagccaagactgagctttgaatagcactagcccttttaaacaatcctcacaaattccttaggaatttaaactttccaaaataatcccccacttttttttttttttttttttttttttgagttggagtcttgctctgtcgcccaggccagagtacagtggtgcaatctcggctccctgcaacctccatctcccgggttcaagcaattctcctgagtagctgggattacaggcgccaccaccacgcccagctaatttttgtatttttagtagagatggggtgtcaccatgttggccaggctggtctcaaactcctgacctcaggtgacccaccagcctcagcctcccaaagtgctgggattacagatgtgagccaccatgcccggccattccaccacttctttaaaatagtaagaattcttaaaaaccatattccttgtttgatggaagagtaagatgttaacagagggcatcaaagggccagaggtgtctttgaatttattttttttcaatgtcttttctgagcttcagccttagcttttcagatcttcctcctacctgttcatttattcagccttctatctggtcatcctccccagcggctcctctctctgatgtgtccacctacggtggaacgaggattgcctttctgtgctccccatcaggactttgctgtcttggccggcaggagtcgtgctgctgcagagcctcacaggctgtgccttgtttcaggaaacagctcctaatactctcccatcactcactttacctgtctccatcttatttccctatactcctattgtcagcttgagactttttttttttttcaattccaaatgaagggtatgacctcagagtgagtgaggactcagtaaagactcacctctccttacttggtttattaaatgtcttcagattccagagataagacaaggtggccacttcacaaagaatccagaatcatgctcagtaaagctcattaaaagccactgcagctgagaaggttcacagcccttctttatagccacagaggcagcacacaggggaggtgggaagacacagggaaacgagagaagaaggataatgaggccttgaggtgttctgcccccaatttcaaggagcttatcaggcttcatgtgcaatttggggaggggagctttttgatggtgggtaaataatggctctacaaagattacctgactccactgacacaagaatatgtattctcagctgatataactgtgtgttcacatcccatccatagaactcactgaaggagattcatcaagtcagccttttggactgggttggggtttggggagtggatttggggatagagagaaaggtgtacttagtacacattttctaatgggcgttacgtgaactgtttgaacctgctgagtggcgctttgtagagctccatgttcacgttcagtgtcaacaccattcaacagctttgcacatcttcgtacaacataatctggctttggtgccccttgagccacctgtagaataatttatagcagggtcccacaatctactgcaatgatcgtgaacagttatcagtggatatagtgctccaagagtcaaattgtatccgttaagggttttctaacttttgctatcccccccgcgaccaaaaaaagggggggtttataatttaaagaaaaggaaaagaggcgtgggttggtagttgtgtccttaacatttaggaatgacatagcctctggagtctacaaactgaagaaactttcatctgatcagccttggaaatccaaagttaaagagcctatgtgtctcttgaggcgggggttagaggattcaaatttgggatgatgctcattgattcctgaccatagcagtgagaggccattttttgtgcaggaaatgtgcttaggactcagtcttgttttcgattatccaccacagaaaccctgagacacagagcagcttagaagtctctacccaggcgtaaatagagctccctactccagaccacctgccacccacctcccaagttgagaacacaagctccagctgggctggagagtcaggcttggtgcagggtgactttggcgaagttttgtcagatccataaagcaaactggaatttgagctttcacttaccctagtatacgttcttaaaaaaaaaaaaaagtctatgtggtataatcgagatggatacctgtgtctttaaattacgtagggaattttgtatgtttaaataattgtactgggttccataatgcttatcttagaaactttagtaaaagaaaatatatgaaccgtgcatttgtgaatgccccccttagagcattcatccaagttcagtgtgtagtgtgatggttattatagatatttaaagtatagtaagtggctgtgtaacaggagagactgctgtttacctacgtactgaagggtaactgctgcccgcgtaattaaatcagtattgtcctttcctgtcggtttgatcaattgcggtaccggtagcttcctgcttgtgactgttacctaattgtgtcaatgtacatctgtagtatgtacatgtgaaagtgcctttctattttagaggagttttagccttgctcttgtaccgttgccccgctctgtgccccacccccacctcctcctcccaattcctgctgcccactcgagtgtttcgaagcttcctccctgtcccccaccttccccatccccgccttcctgtgcctcggtgctcagtaatgtcccatctcacctccctgtcggtcctcagactgtctcgttttccttgtagacgtgattgtgcctttctcacccctgtgtcctcccatcccaccgcatcagtcccccgctcatgtgctgctgacagcatcgcattcgcccgtgctctgtactgcctctcaccatttcattccctcctctctgaggtgaaaataaagggggatgcttttacagtctggaaagaaaaaaaatgttttgttaatctgttgtgacaatgcacttttatgtatagtactgtacatttttggcatgtaccattacaggcttcagtatacagtcaggtttgttcttcacggtgtatctttataataaataagatagttctggc

SEQ ID NO: 28275 - DNA, 5967 bp, Homo sapiens
  source 1..5967: mol_type = unassigned DNA
gaaggatcagaatgttctctctccagtcaactgctggaatctcctcttaaaccaggtgaagcgggaaagcagggaccataccaccctgagtgacatctacctgaataatatcattcctcgatttgtacaagtcagcgaggactcaggaagactctttaaaaagagtaaagaagtcggccagcagctccaagatgatttgatgaaggtcctgaacgagctctactcggtgatgaagacatatcacatgtacaatgccgacagcatcagtgctcagagcaaactaaaggaggcggagaagcaggaggagaagcaaattggtaaatcggtaaagcaggaggaccggcagaccccacgctcccctgactccacggccaacgttcgcattgaggagaaacatgtccggaggagctcagtgaagaagattgagaagatgaaggagaagcgtcaagccaagtacacggagaataagctgaaggccatcaaagcccggaatgagtacttgctggctttggaggcaaccaatgcatctgtcttcaagtactacatccatgacctatctgaccttattgatcagtgttgtgacttaggctaccatgcaagtctgaaccgggctctacgcaccttcctctctgctgagttaaacctggaacagtcgaagcatgagggtctggatgccatcgagaatgcagtagaaaacctggatgccaccagtgacaagcagcgcctcatggagatgtacaacaacgtcttctgcccccctatgaagtttgagtttcagccccacatgggggatatggcttcccagctctgtgcccagcagcctgtccagagtgagctggtacagagatgccaacaactgcagtctcgcttatccactctaaagattgaaaacgaagaggtaaagaagacaatggaggccaccctgcaaaccatccaggacattgtgactgtcgaggactttgatgtgtctgactgcttccagtacagcaactccatggagtccgtcaagtccacggtctctgaaaccttcatgagcaagcccagcattgctaagaggagagccaaccagcaagagacagagcagttttatttcacaaaaatgaaagagtacctggagggcaggaacctcatcaccaagttacaagccaagcatgaccttctgcagaaaaccctgggagaaagtcagcggacagattgcagtctagccaggcgcagctcaactgtgaggaaacaggactccagccaggcaattcctctggtggtggaaagctgtatccggtttatcagcagacacggactacagcatgaaggaattttccgggtgtcaggatcccaggtggaagtgaatgacatcaaaaatgcctttgagagaggagaggaccccctggctggggaccagaacgaccatgacatggattccatagctggtgtcctgaagctttacttccgggggctggaacaccctctcttccccaaggacatctttcatgacctgatggcctgcgtcacaatggacaacctgcaggagagagctctgcacatccggaaagtcctcctagtcctgcccaaaaccactctgattatcatgagatacctctttgccttcctcaatcatttatcacagttcagtgaagagaacatgatggacccctacaacctcgccatctgcttcgggccctcgctaatgtcagtgccagagggccacgaccaggtgtcctgccaagcccacgtgaatgagctgatcaaaaccatcatcatccagcatgagaacatcttcccaagccccagggagctggagggccctgtctacagcagaggaggaagcatggaggattactgtgatagccctcatggagagactacctcggttgaagactcaacccaggatgtgaccgcagagcaccacacgagcgatgacgaatgtgagcccatcgaggccattgccaagtttgactacgtgggccggacagcccgagagctgtcctttaagaagggagcatccctgctgctttaccagcgggcttccgacgactggtgggaaggccggcacaatggcatcgacggactcatcccccatcagtacatcgtggtccaagacaccgaggacggtgtcgtggagaggtccagccccaagtctgagattgaggtcatttctgagccacctgaagaaaaggtgacagccagagcgggggccagctgtcccagtgggggtcatgtagccgatatttatcttgcaaacatcaacaagcaaaggaagcgtccagaatctgggagcatccggaaaacttttcggagtgacagccatgggctgagcagttccctgactgactcctcctccccaggggtgggggctagctgccgcccatcctcccagcccatcatgagccagagcctccccaaagaagggccagataagtgttccatcagtgggcacgggagcctcaactccatcagccgccactcatccctgaagaatcggctggatagtccacagatccggaagactgccacagcgggaaggtcaaaaagcttcaataaccatcggcccatggaccctgaggtcattgctcaggatattgaggcaacaatgaactcggccctgaatgagctacgggaactagaacggcagagcagtgtcaaacacacccctgacgtggttctggacaccttggagcccctcaaaacctccccagtggtggcccccacgtcagagccctccagccctctgcacacccagctcctcaaggaccccgagcccgccttccagcgcagcgccagtactgctggggacatcgcctgcgccttccggcctgtcaagtctgtcaagatggctgccccggtcaaaccaccagccacacggcccaagcccactgtcttccccaaaacaaatgccactagccctggtgtcaactcatcaacttccccacagtctactgacaagtcttgtactgtctgagggataataatttaattgttctagacaaggggactatagggactgactgttattaaaatcttcctatttaactagcttggggacttcagttgaaaattaggttctaagttgttcttgcaggaattagcctccccgtctcccaaaaccttgagaatgaagcccttggtatcgcctctcccttcccactgccctctgcttcccccagtcgtcgtaattcagccagctgcagtccgtaccgttcttaggttagccagagacaggttttcattatcaggtcactgtgaaatctggtaaggcagtcctgaggacatgggctcaagtctcagtcccctcagaccacggtgatgccttgaccagatggttggctactgccatccagctttcagtggcatcttgttttgggaactgattatagagaatcatatatagtccagtcttcattttacatacacacacatattttacacacacacacattttacacacacacacacacacacacacatatgtttttctagtctctggcatgtgtagcctctcctggtcatagaccagtctctttgtaagttattgtggcagttcacacagtagccaccaggggtctctgtttccattacaaactttgttctgtctgggccagagaacctagcctttgaaatctctccatcatatgaaacataacgggatgggacaatcccgtaacctgtttggggttgggggctttctctctgtgttctttccattgatgtgaattggtcattggtgtttgctcttgcctctcctccatcccctagaagtacacccccgtcttattaaggagcttttaaagtttttctgaatgtatagacatttctcgggttcctacctttgtctctgatggaccattttccatttaagacattttcctgtataagacagttttatagctggttccttttagggtaaagagtcttaagagagttttattgtgtctatggcaggtttgggaaaggtaagaaatgggtcctttttcctcctaatgtttttggcacttaaaacataaaattcattatcctattaaaaaattaaattcagctttgctaatccagaaattgttcccaaatgaaaacttgttttaagtccaccccttagtttccttattttacaaggtctctcttcagggaccaacaggggcttagagagccttagttagattaaagggagaccctacctcttaaaaccagttttcatttatgcaaacaaggacaattaagggaaccctgaccccacaggctctcaagtcttcccaaggccagaatcgaaagaaaattaaaatttgaatgctgaatattctggctctactctggccttttttctggttcccttccaaaatgcacaaatcatacccttgtctgctccaattcagtctccaaacctggtgcctgtgctcctggcccccctagcatcatgctatcccaggagtatcaggaccagacacatccacagccaggctcatgggtctcagacagcaacttgagttaaagctgaaactcatccttcttctctgtgttttctggtttaaaagctgcacttatattttagccttattattttctgtagttccggagagatggtgggttgccattctggtaggaaaatctgagttttcttatctttgacctagaagagattctttttggaccaacctgcgaaattggtagttaggtctatggaaagtggtaggattttttttttttaatcctgtgcaaaggaaaagaggtgctttgtgggaaatcactaatgagaaggctaacctgcagcaccagagaaacctttccaagtgctaggcaggagaactgaagaactctttcagtgaagtgagtcagcctagaagaggcaacccacagtcttgatttttgttgctgtttcctgacctgttcttgcctgtcacctgggcctacacaggtcccgagccaacggggctttcatacccaaggatctgtttccttgctgaaaatgaaaccctatctttcactttacattcctttcaatccaactgatcaaaactggtacccacacttgccctttctccctctctccagcacactcccctctaagaaagtaaaagcaaagctttcttaatggcaacactttgggcctgttctgttgctcctgccttatttctctttcaaccctgtacatgactcgtgttcaccatccccttgatcagtgtccatccgcgctaatttgcatcatgaactgaacagtgtgtgagtggtcacctactaaacccagctctgggggcagagctgtcttccccatctctggtgctcctaacacctgtgagatggtcctgtcgagaggactaggaaccgataggaggagagtccttctcggcagagctcactgcaaacaactggaattgaggttgcacactgtgatttttacaccgaaaagccaaaaggagctggccatccagggcctagggagaccagccttcctcagctatgcttgccgaaaccagcatgatgcttcaaagagccctgctccacccctcatggcatggatccttttcctggtgtggactctgaagggtcagtcttcggggaagagaggtggggtggggctactagcatcccaatttagaaaacagaggagtttgtagccagcagcctgtaaactggaaacactggtctcagccaacctcctcagggcgccctggcttctccccaaggagatgaggagcggtgatgccagcaccgggatgcgcagagcactggaagggctggtgcagatctacttcccatgcagaagagaagtcacatcttccagggaatcgcaatgttgtggcgtctgacttgtatgtcacatttgtgtaaaatggtatattctttaaaatagtgttgataactggaatattgtatgtatgcttggagatgctttgtgtgaacctaagactgtcactcaacagatgttggattggggaaaatccaaagcacaacttcaaaataaaatacatttttaggtttcga

SEQ ID NO: 28276 - DNA, 5814 bp, Homo sapiens
  source 1..5814: mol_type = unassigned DNA
cagagtaaagaagtcggccagcagctccaagatgatttgatgaaggtcctgaacgagctctactcggtgatgaagacatatcacatgtacaatgccgacagcatcagtgctcagagcaaactaaaggaggcggagaagcaggaggagaagcaaattggtaaatcggtaaagcaggaggaccggcagaccccacgctcccctgactccacggccaacgttcgcattgaggagaaacatgtccggaggagctcagtgaagaagattgagaagatgaaggagaagcgtcaagccaagtacacggagaataagctgaaggccatcaaagcccggaatgagtacttgctggctttggaggcaaccaatgcatctgtcttcaagtactacatccatgacctatctgaccttattgatcagtgttgtgacttaggctaccatgcaagtctgaaccgggctctacgcaccttcctctctgctgagttaaacctggaacagtcgaagcatgagggtctggatgccatcgagaatgcagtagaaaacctggatgccaccagtgacaagcagcgcctcatggagatgtacaacaacgtcttctgcccccctatgaagtttgagtttcagccccacatgggggatatggcttcccagctctgtgcccagcagcctgtccagagtgagctggtacagagatgccaacaactgcagtctcgcttatccactctaaagattgaaaacgaagaggtaaagaagacaatggaggccaccctgcaaaccatccaggacattgtgactgtcgaggactttgatgtgtctgactgcttccagtacagcaactccatggagtccgtcaagtccacggtctctgaaaccttcatgagcaagcccagcattgctaagaggagagccaaccagcaagagacagagcagttttatttcacaaaaatgaaagagtacctggagggcaggaacctcatcaccaagttacaagccaagcatgaccttctgcagaaaaccctgggagaaagtcagcggacagattgcagtctagccaggcgcagctcaactgtgaggaaacaggactccagccaggcaattcctctggtggtggaaagctgtatccggtttatcagcagacacggactacagcatgaaggaattttccgggtgtcaggatcccaggtggaagtgaatgacatcaaaaatgcctttgagagaggagaggaccccctggctggggaccagaacgaccatgacatggattccatagctggtgtcctgaagctttacttccgggggctggaacaccctctcttccccaaggacatctttcatgacctgatggcctgcgtcacaatggacaacctgcaggagagagctctgcacatccggaaagtcctcctagtcctgcccaaaaccactctgattatcatgagatacctctttgccttcctcaatcatttatcacagttcagtgaagagaacatgatggacccctacaacctcgccatctgcttcgggccctcgctaatgtcagtgccagagggccacgaccaggtgtcctgccaagcccacgtgaatgagctgatcaaaaccatcatcatccagcatgagaacatcttcccaagccccagggagctggagggccctgtctacagcagaggaggaagcatggaggattactgtgatagccctcatggagagactacctcggttgaagactcaacccaggatgtgaccgcagagcaccacacgagcgatgacgaatgtgagcccatcgaggccattgccaagtttgactacgtgggccggacagcccgagagctgtcctttaagaagggagcatccctgctgctttaccagcgggcttccgacgactggtgggaaggccggcacaatggcatcgacggactcatcccccatcagtacatcgtggtccaagacaccgaggacggtgtcgtggagaggtccagccccaagtctgagattgaggtcatttctgagccacctgaagaaaaggtgacagccagagcgggggccagctgtcccagtgggggtcatgtagccgatatttatcttgcaaacatcaacaagcaaaggaagcgtccagaatctgggagcatccggaaaacttttcggagtgacagccatgggctgagcagttccctgactgactcctcctccccaggggtgggggctagctgccgcccatcctcccagcccatcatgagccagagcctccccaaagaagggccagataagtgttccatcagtgggcacgggagcctcaactccatcagccgccactcatccctgaagaatcggctggatagtccacagatccggaagactgccacagcgggaaggtcaaaaagcttcaataaccatcggcccatggaccctgaggtcattgctcaggatattgaggcaacaatgaactcggccctgaatgagctacgggaactagaacggcagagcagtgtcaaacacacccctgacgtggttctggacaccttggagcccctcaaaacctccccagtggtggcccccacgtcagagccctccagccctctgcacacccagctcctcaaggaccccgagcccgccttccagcgcagcgccagtactgctggggacatcgcctgcgccttccggcctgtcaagtctgtcaagatggctgccccggtcaaaccaccagccacacggcccaagcccactgtcttccccaaaacaaatgccactagccctggtgtcaactcatcaacttccccacagtctactgacaagtcttgtactgtctgagggataataatttaattgttctagacaaggggactatagggactgactgttattaaaatcttcctatttaactagcttggggacttcagttgaaaattaggttctaagttgttcttgcaggaattagcctccccgtctcccaaaaccttgagaatgaagcccttggtatcgcctctcccttcccactgccctctgcttcccccagtcgtcgtaattcagccagctgcagtccgtaccgttcttaggttagccagagacaggttttcattatcaggtcactgtgaaatctggtaaggcagtcctgaggacatgggctcaagtctcagtcccctcagaccacggtgatgccttgaccagatggttggctactgccatccagctttcagtggcatcttgttttgggaactgattatagagaatcatatatagtccagtcttcattttacatacacacacatattttacacacacacacattttacacacacacacacacacacacacatatgtttttctagtctctggcatgtgtagcctctcctggtcatagaccagtctctttgtaagttattgtggcagttcacacagtagccaccaggggtctctgtttccattacaaactttgttctgtctgggccagagaacctagcctttgaaatctctccatcatatgaaacataacgggatgggacaatcccgtaacctgtttggggttgggggctttctctctgtgttctttccattgatgtgaattggtcattggtgtttgctcttgcctctcctccatcccctagaagtacacccccgtcttattaaggagcttttaaagtttttctgaatgtatagacatttctcgggttcctacctttgtctctgatggaccattttccatttaagacattttcctgtataagacagttttatagctggttccttttagggtaaagagtcttaagagagttttattgtgtctatggcaggtttgggaaaggtaagaaatgggtcctttttcctcctaatgtttttggcacttaaaacataaaattcattatcctattaaaaaattaaattcagctttgctaatccagaaattgttcccaaatgaaaacttgttttaagtccaccccttagtttccttattttacaaggtctctcttcagggaccaacaggggcttagagagccttagttagattaaagggagaccctacctcttaaaaccagttttcatttatgcaaacaaggacaattaagggaaccctgaccccacaggctctcaagtcttcccaaggccagaatcgaaagaaaattaaaatttgaatgctgaatattctggctctactctggccttttttctggttcccttccaaaatgcacaaatcatacccttgtctgctccaattcagtctccaaacctggtgcctgtgctcctggcccccctagcatcatgctatcccaggagtatcaggaccagacacatccacagccaggctcatgggtctcagacagcaacttgagttaaagctgaaactcatccttcttctctgtgttttctggtttaaaagctgcacttatattttagccttattattttctgtagttccggagagatggtgggttgccattctggtaggaaaatctgagttttcttatctttgacctagaagagattctttttggaccaacctgcgaaattggtagttaggtctatggaaagtggtaggattttttttttttaatcctgtgcaaaggaaaagaggtgctttgtgggaaatcactaatgagaaggctaacctgcagcaccagagaaacctttccaagtgctaggcaggagaactgaagaactctttcagtgaagtgagtcagcctagaagaggcaacccacagtcttgatttttgttgctgtttcctgacctgttcttgcctgtcacctgggcctacacaggtcccgagccaacggggctttcatacccaaggatctgtttccttgctgaaaatgaaaccctatctttcactttacattcctttcaatccaactgatcaaaactggtacccacacttgccctttctccctctctccagcacactcccctctaagaaagtaaaagcaaagctttcttaatggcaacactttgggcctgttctgttgctcctgccttatttctctttcaaccctgtacatgactcgtgttcaccatccccttgatcagtgtccatccgcgctaatttgcatcatgaactgaacagtgtgtgagtggtcacctactaaacccagctctgggggcagagctgtcttccccatctctggtgctcctaacacctgtgagatggtcctgtcgagaggactaggaaccgataggaggagagtccttctcggcagagctcactgcaaacaactggaattgaggttgcacactgtgatttttacaccgaaaagccaaaaggagctggccatccagggcctagggagaccagccttcctcagctatgcttgccgaaaccagcatgatgcttcaaagagccctgctccacccctcatggcatggatccttttcctggtgtggactctgaagggtcagtcttcggggaagagaggtggggtggggctactagcatcccaatttagaaaacagaggagtttgtagccagcagcctgtaaactggaaacactggtctcagccaacctcctcagggcgccctggcttctccccaaggagatgaggagcggtgatgccagcaccgggatgcgcagagcactggaagggctggtgcagatctacttcccatgcagaagagaagtcacatcttccagggaatcgcaatgttgtggcgtctgacttgtatgtcacatttgtgtaaaatggtatattctttaaaatagtgttgataactggaatattgtatgtatgcttggagatgctttgtgtgaacctaagactgtcactcaacagatgttggattggggaaaatccaaagcacaacttcaaaataaaatacatttttaggtttcgatgctgca

SEQ ID NO: 28277 - DNA, 2484 bp, Homo sapiens
  source 1..2484: mol_type = unassigned DNA
aggaaggatcagaatgttctctctccagtcaactgctggaatctcctcttaaaccaggtgaagcgggaaagcagggaccataccaccctgagtgacatctacctgaataatatcattcctcgatttgtacaagtcagcgaggactcaggaagactctttaaaaagagtaaagaagtcggccagcagctccaagatgatttgatgaaggtcctgaacgagctctactcggtgatgaagacatatcacatgtacaatgccgacagcatcagtgctcagagcaaactaaaggaggcggagaagcaggaggagaagcaaattggtaaatcggtaaagcaggaggaccggcagaccccacgctcccctgactccacggccaacgttcgcattgaggagaaacatgtccggaggagctcagtgaagaagattgagaagatgaaggagaagcgtcaagccaagtacacggagaataagctgaaggccatcaaagcccggaatgagtacttgctggctttggaggcaaccaatgcatctgtcttcaagtactacatccatgacctatctgaccttattgattgttgtgacttaggctaccatgcaagtctgaaccgggctctacgcaccttcctctctgctgagttaaacctggaacagtcgaagcatgagggtctggatgccatcgagaatgcagtagaaaacctggatgccaccagtgacaagcagcgcctcatggagatgtacaacaacgtcttctgcccccctatgaagtttgagtttcagccccacatgggggatatggcttcccagctctgtgcccagcagcctgtccagagtgagctggtacagagatgccaacaactgcagtctcgcttatccactctaaagattgaaaacgaagaggtaaagaagacaatggaggccaccctgcaaaccatccaggacattgtgactgtcgaggactttgatgtgtctgactgcttccagtacagcaactccatggagtccgtcaagtccacggtctctgaaaccttcatgagcaagcccagcattgctaagaggagagccaaccagcaagagacagagcagttttatttcacaaaaatgaaagagtacctggagggcaggaacctcatcaccaagttacaagccaagcatgaccttctgcagaaaaccctgggagaaagtcagcggacagattgcagtctagccaggcgcagctcaactgtgaggaaacaggactccagccaggcaattcctctggtggtggaaagctgtatccggtttatcagcagacacggactacagcatgaaggaattttccgggtgtcaggatcccaggtggaagtgaatgacatcaaaaatgcctttgagagaggagaggaccccctggctggggaccagaacgaccatgacatggattccatagctggtgtcctgaagctttacttccgggggctggaacaccctctcttccccaaggacatctttcatgacctgatggcctgcgtcacaatggacaacctgcaggagagagctctgcacatccggaaagtcctcctagtcctgcccaaaaccactctgattatcatgagatacctctttgccttcctcaatcatttatcacagttcagtgaagagaacatgatggacccctacaacctcgccatctgcttcgggccctcgctaatgtcagtgccagagggccacgaccaggtgtcctgccaagcccacgtgaatgagctgatcaaaaccatcatcatccagcatgagaacatcttcccaagccccagggagctggagggccctgtctacagcagaggaggaagcatggaggattactgtgatagccctcatggagagactacctcggttgaagactcaacccaggatgtgaccgcagagcaccacacgagcgatgacgaatgtgagcccatcgaggccattgccaagtttgactacgtgggccggacagcccgagagctgtcctttaagaagggagcatccctgctgctttaccagcgggcttccgacgactggtgggaaggccggcacaatggcatcgacggactcatcccccatcagtacatcgtggtccaagacacgttgatatcctgagtgagtctgcaccctcccagcctcttcccggctcgttctgcagggaaatcctccctctgttgatagcatcgcaaacctggtggcaatctgtgcgtggacaggaccctcccaaatttagcattatgacttcaccacaggatcaagagaagatgaattgtgggggagaaggggctttctttgtcatcagtagccagaggggccaggagagcagtggagagacctgggaccggcttggatgctctgagcggggctagaggcgctacgacagtgtgtggcggtgtcctgccacgacgccgccgtctccagagccaccacacagttgactgtccttacccggcagtgctcaggacctcagccgataaaccacaacct

SEQ ID NO: 28278 - DNA, 2419 bp, Homo sapiens
  source 1..2419: mol_type = unassigned DNA
gagtaaagaagtcggccagcagctccaagatgatttgatgaaggtcctgaacgagctctactcggtgatgaagacatatcacatgtacaatgccgacagcatcagtgctcagagcaaactaaaggaggcggagaagcaggaggagaagcaaattggtaaatcggtaaagcaggaggaccggcagaccccacgctcccctgactccacggccaacgttcgcattgaggagaaacatgtccggaggagctcagtgaagaagattgagaagatgaaggagaagcgtcaagccaagtacacggagaataagctgaaggccatcaaagcccggaatgagtacttgctggctttggaggcaaccaatgcatctgtcttcaagtactacatccatgacctatctgaccttattgatcagtgttgtgacttaggctaccatgcaagtctgaaccgggctctacgcaccttcctctctgctgagttaaacctggaacagtcgaagcatgagggtctggatgccatcgagaatgcagtagaaaacctggatgccaccagtgacaagcagcgcctcatggagatgtacaacaacgtcttctgcccccctatgaagtttgagtttcagccccacatgggggatatggcttcccagctctgtgcccagcagcctgtccagagtgagctggtacagagatgccaacaactgcagtctcgcttatccactctaaagattgaaaacgaagaggtaaagaagacaatggaggccaccctgcaaaccatccaggacattgtgactgtcgaggactttgatgtgtctgactgcttccagtacagcaactccatggagtccgtcaagtccacggtctctgaaaccttcatgagcaagcccagcattgctaagaggagagccaaccagcaagagacagagcagttttatttcacaaaaatgaaagagtacctggagggcaggaacctcatcaccaagttacaagccaagcatgaccttctgcagaaaaccctgggagaaagtcagcggacagattgcagtctagccaggcgcagctcaactgtgaggaaacaggactccagccaggcaattcctctggtggtggaaagctgtatccggtttatcagcagacacggactacagcatgaaggaattttccgggtgtcaggatcccaggtggaagtgaatgacatcaaaaatgcctttgagagaggagaggaccccctggctggggaccagaacgaccatgacatggattccatagctggtgtcctgaagctttacttccgggggctggaacaccctctcttccccaaggacatctttcatgacctgatggcctgcgtcacaatggacaacctgcaggagagagctctgcacatccggaaagtcctcctagtcctgcccaaaaccactctgattatcatgagatacctctttgccttcctcaatcatttatcacagttcagtgaagagaacatgatggacccctacaacctcgccatctgcttcgggccctcgctaatgtcagtgccagagggccacgaccaggtgtcctgccaagcccacgtgaatgagctgatcaaaaccatcatcatccagcatgagaacatcttcccaagccccagggagctggagggccctgtctacagcagaggaggaagcatggaggattactgtgatagccctcatggagagactacctcggttgaagactcaacccaggatgtgaccgcagagcaccacacgagcgatgacgaatgtgagcccatcgaggccattgccaagtttgactacgtgggccggacagcccgagagctgtcctttaagaagggagcatccctgctgctttaccagcgggcttccgacgactggtgggaaggccggcacaatggcatcgacggactcatcccccatcagtacatcgtggtccaagacaccgaggacggtgtcgtggagaggtccagccccaagtctgagattgaggtcatttctgagccacctgaagaaaaggtgacagccagagcgggggccagctgtcccagtgggggtcatgtagccgatatttatcttgcaaacatcaacaacaacttacatcttgacaacacaaagcccgtgaccaccaagcaaaggaagcgtccagaatctgggagcatccggaaaacttttcggagtgacagccatgggctgagcagttccctgactgactcctcctccccaggggtgggggctagctgccgcccatcctcccagcccatcatgagccagagcctccccaaagaagggccagataagtgttccatcagtgggcacgggagcctcaactccatcagccgccactcatccctgaagaatcggctggatagtccacagatccggaagactgccacagcgggaaggtcaaaaagcttcaataaccat

SEQ ID NO: 28279 - DNA, 690 bp, Homo sapiens
  source 1..690: mol_type = unassigned DNA
ccgcagagcaccacacgagcgatgacgaatgtgagcccatcgaggccattgccaagtttgactacgtgggccggacagcccgagagctgtcctttaagaagggagcatccctgctgctttaccagcgggcttccgacgactggtgggaaggccggcacaatggcatcgacggactcatcccccatcagtacatcgtggtccaagacaccgaggacggtgtcgtggagaggtccagccccaagtctgagattgaggtcatttctgagccacctgaagaaaaggtgacagccagagcgggggccagctgtcccagtgggggtcatgtagccgatatttatcttgcaaacatcaacaacaacttacatcttgacaacacaaagcccgtgaccaccaagcaaaggaagcgtccagaatctgggagcatccggaaaacttttcggagtgacagccatgggctgagcagttccctgactgactcctcctccccaggggtgggggctagctgccgcccatcctcccagcccatcatgagccagagcctccccaaagaagggccagataagtgttccatcagtgggcacgggagcctcaactccatcagccgccactcatccctgaagaatcggctggatagtccacagatccggaagactgccacagcgggaaggtcaaaaagcttcaataaccatc

SEQ ID NO: 28280 - DNA, 2486 bp, Homo sapiens
  source 1..2486: mol_type = unassigned DNA
gtaaagaagacaatggaggccaccctgcaaaccatccaggacattgtgactgtcgaggactttgatgtgtctgactgcttccagtacagcaactccatggagtccgtcaagtccacggtctctgaaaccttcatgagcaagcccagcattgctaagaggagagccaaccagcaagagacagagcagttttatttcacaaaaatgaaagagtacctggagggcaggaacctcatcaccaagttacaagccaagcatgaccttctgcagaaaaccctgggagaaagtcagcggacagattgcagtctagccaggcgcagctcaactgtgaggaaacaggactccagccaggcaattcctctggtggtggaaagctgtatccggtttatcagcagacacggactacagcatgaaggaattttccgggtgtcaggatcccaggtggaagtgaatgacatcaaaaatgcctttgagagaggagaggaccccctggctggggaccagaacgaccatgacatggattccatagctggtgtcctgaagctttacttccgggggctggaacaccctctcttccccaaggacatctttcatgacctgatggcctgcgtcacaatggacaacctgcaggagagagctctgcacatccggaaagtcctcctagtcctgcccaaaaccactctgattatcatgagatacctctttgccttcctcaatcatttatcacagttcagtgaagagaacatgatggacccctacaacctcgccatctgcttcgggccctcgctaatgtcagtgccagagggccacgaccaggtgtcctgccaagcccacgtgaatgagctgatcaaaaccatcatcatccagcatgagaacatcttcccaagccccagggagctggagggccctgtctacagcagaggaggaagcatggaggattactgtgatagccctcatggagagactacctcggttgaagactcaacccaggatgtgaccgcagagcaccacacgagcgatgacgaatgtgagcccatcgaggccattgccaagtttgactacgtgggccggacagcccgagagctgtcctttaagaagggagcatccctgctgctttaccagcgggcttccgacgactggtgggaaggccggcacaatggcatcgacggactcatcccccatcagtacatcgtggtccaagacaccgaggacggtgtcgtggagaggtccagccccaagtctgagattgaggtcatttctgagccacctgaagaaaaggtgacagccagagcgggggccagctgtcccagtgggggtcatgtagccgatatttatcttgcaaacatcaacaagtaagctctgcttttcattttctgctcccctgaatgacttgcaacacccagcctcaccctctggcctaacccccatctccattcctgtgctgcacgtagggctcccagctcccccagcctaacagtttgcatgtggtcattgctgctgcaaggcggacagggctgaggatgctgctacaagcctcggggcaggtccaggtctccagctagctgccctcgtgctgtggaagggtgctttactgtgtgttcccgcagtgtctgtccacccagacctttgtggcagtcttacagctaaaactttgaccaaagctttggtcactttatgcaacctggttttgtactgtttctcagaggtgccttcttttttccaatccatactcaaataatagtctttgatgtctgtcttccttgacccgtgttcgtgcaaagattcagagtctgtgtgtggcttctactaggctgatgttacaccaggtgggtttattgagatatcatgtgtctgttcctccccctgtcctgcattcactcctgtggaggaaaggaggccacgatgtccctaaggaaagctttgtcctgagctcttcattcattggctaacccctagctcccttttcttctgccctttcacaccaggagaaataattttccattttgttcctattgctttggccttttgtattattctacccccttagtccctttgcagatccccactcctgctcagcaggctcttacctctgacccccagctttcattgtggctgttagcaacatcctggggtttaaactccacccacgcccgatctggctgtctagagggattctacgcctgcgtgctgccgcctccccaagaggcattcaggttattggagaactaatctcatctcaaggggccagacaccaagtcccaaagcctacagacctctttccgccaggccctgaaacctggccccgtgccagcaggatgacaagccccagggcgctcctgatgaatatggattggagatgatgtacagtttttattcccctctggcttttgaggaatgaaatgatttgcactttgaaaacctgttaaccgtagcctctggacactgagactggaaggagaataaaggatgcttgttgtttttaaactata

SEQ ID NO: 28281 - DNA, 8415 bp, Homo sapiens
  source 1..8415: mol_type = unassigned DNA
ctgtgctcctagggtgattcttcttttgcaagaggagctgaccagggcaagctactagagccatttctcggcaagtaaagagatttttccttccagaaggagaaggatttttctccctgctctgcagccaagtgaaagagattagtccctaaacctgtgaaatcgaccagagctgtgtgattaccagggcttgagagaggactcgaaaagaaaaggagaaataaatcaaacagcctgtcagttcctttggccacgtcagaagatgtcatctcaaactaagttcaagaaagacaaagagatcattgctgaatatgaagcccaaataaaagagatccgcacgcagctggtggagcagttcaaatgtctggagcagcaatcagagtcgcgactgcagctgcttcaagacctccaggagtttttccgccggaaagctgagattgagctcgagtactcccgcagcctggagaagctggctgagcgcttctcctccaaaatccgcagctcccgggagcaccagttcaagaaggaccagtacctcctctcgcctgtgaactgttggtatctggttctgcatcagacccggcgggagagccgagaccatgccaccctcaatgacatcttcatgaacaatgtcatcgtccgcctctcccagatcagtgaggatgtcatcagactcttcaaaaagagcaaggagattggcctgcagatgcacgaggagctcctgaaggtgaccaatgagctctacacagtcatgaaaacctaccacatgtaccatgcagagagcatcagtgcggaaagcaagctgaaggaggctgagaagcaggaggagaagcagttcaataagtcaggagacctcagcatgaacctgctccggcacgaggaccggccccagcgccgcagctctgtgaagaagattgagaagatgaaggagaagaggcaggccaagtactctgagaacaagctgaaatgcacaaaggcccggaatgactacttgctcaatctggcagccaccaacgcagctataagcaaatactacatccatgatgtctctgatctgatcgattgctgtgatttgggcttccatgccagcctggcccgcaccttccggacctatctctcagctgaatacaacctggagacctctcgccacgaagggctggatgtcattgagaatgcagtggacaacctggattcccgaagtgacaagcacacagtcatggacatgtgcaatcaagtcttctgccctccactcaagttcgagttccagccccacatgggggatgaggtctgccaggtcagcgctcagcagcccgtccagacagaactgctcatgcgttatcaccagctgcagtccagactggccaccctcaagatagagaatgaggaggttaggaaaaccctggatgccaccatgcagacattacaggacatgctgactgtggaggactttgatgtctccgatgccttccaacacagtcgatcgacagagtccgtcaagtcggctgcctctgagacctacatgagcaagatcaacattgccaagaggagagccaaccagcaggaaacagaaatgttttattttacaaaatttaaagagtatgtgaatggcagtaacctcatcaccaagctgcaggccaagcacgatttactcaagcagaccctgggcgaaggggaaagagcagaatgcggcaccaccagaggaagaagaaatgctcgaaccaggaaccaggattcaggacaagctataccgcttgtagtcgagagctgcatccgttacatcaatttatatggactccagcagcaggggatcttcagagtgccaggatctcaggtggaagtcaatgacatcaaaaattcctttgagagaggtgaagacccccttgtggacgatcaaaatgaacgagatatcaattcagtcgctggtgttttaaaactgtatttccgaggactggaaaacccactctttcctaaggaaaggtttcaagatttgatatctactattaaactggagaacccagccgagagggtgcaccagatccaacaaatcctcgtcacccttccccgcgtggtcattgtggtcatgagatacctcttcgctttcctcaaccacctctcccagtatagcgacgagaacatgatggatccctacaacctggccatctgcttcgggcctaccctcatgcacatccctgatgggcaggaccctgtgtcctgccaggcacacatcaatgaagtcatcaaaaccatcatcatccatcatgaagccatcttccccagcccccgggagctagagggacctgtgtatgaaaaatgcatggctggaggggaagaatattgtgacagcccacacagcgagccaggggccatcgatgaagttgaccatgacaatggcactgagcctcataccagcgatgaagaagtggagcagatcgaggctattgccaagtttgactacatggggcggtccccgcgtgagctatccttcaagaagggggcctcgctgctcctgtaccaccgcgcctcggaggactggtgggagggccggcacaacggcgtggatggactcatcccccatcagtacatagttgtacaggacatggatgatgccttctccgacagcctgagccagaaggctgacagcgaggccagcagtgggccattgctggatgacaaggcctcttccaaaaacgacctccagtcccccacggagcacatctcggattacggctttgggggggtgatgggccgagtgcggttacgatctgatggagcagccatccccagacgccgaagcgggggcgacacacacagcccgccccggggcctgggccccagcatagacacaccaccccgggctgctgcctgccccagcagcccccacaaaatccccctcacccgggggaggatcgagagccctgagaagcggaggatggcgacgttcgggagcgctggcagcatcaactaccctgacaagaaggcgctctccgaagggcactcgatgaggtcgacctgcggttccaccaggcacagcagcctaggggaccacaagtccctggaggccgaggccctggcagaagacatcgagaagaccatgagcacggctctgcacgagttgcgggaactcgagaggcagaacacggtcaagcaggcgccagatgtggtgctggacaccctggagcccctgaagaacccgccaggccccgtcagctcggagcccgccagtccccttcacaccatcgtcatccgcgaccccgatgccgccatgcgccgcagcagcagctcctccaccgagatgatgaccaccttcaagccagccctgtccgcccgcctggctggcgcccagctccgcccgccccccatgcggcccgtgcggccggtggtccagcaccggtccagcagcagcagcagctcgggcgtgggcagcccggccgtgacgcccaccgagaagatgttccccaacagctcagcggacaagtcgggcaccatgtgacctgcaggatgggccgcgccgccgtggcccgctgtggctcaccacggcccagggtggccttggtggcttccacgtgcttcccagtgaccctggccttggagggcagaggtccgtctgggagggtgtgtctgtgcagagctgaggcccgggcgctggctgcagctcacgtccagccatgggaatcccacggacctctcgcgtgtcaacagacgaccagaggagtgctggagctccagcagccccaaccacagcattccctaacatggaggcaaaataccacatggcttctcccgcatatcgtcactggaaacttcctctctcgacattctctctacatacgtatatgtgtgtgtatatcgatgtgtgcatatatacacatgtatacgtatgtacgtgtctgtaggtgtgtgtatatatatatatatttatgcatctatatacatatactagatctggacacacgcatactaagtgtatatagtatctcctttttctttttatgaaacttagatttacctcagatccatgccaccaaacatctcccaccgagttatttggtgggatttgcagggacttttctgggagaacttaaaggcccatagtaactgcgaatgaagcaatataccactaacctgcagaaaaacacaaacaaaaacagactcccactgtctccagaagtcgtggccttccagaacagtctgcccctcaaggaagggtggggcaggcagtacccccaagcaggctgctcccagaggtggggaacccttcataggaaatccccacccccgtccaccccagagaccctgcccttccacccggaggccaaaggccaactgtactcccaaaggcatgggagaaggttggcgagaagacccctgactaccacatccttgtgtttgtgtgtagagacgggggatagtgagaacctaagccccatcgtagcacagtattacatgtggttgggaaaaataaaaatacagtggtgtggaatactccaaaacctagaaatgctgtaggaataaatctgtggtaactatagaggtttaacttatatcattttcaaactatttaattttttcttttcctggttctactaattatactgtgtcagatttggaactaaacaggcaaggaggctttgagtcacatcgttttcattttaaatcaggctgtgatgcactgtggctggtgccgtcttgcatgaaacgcatgagccgtgagcgcccagttcagactggggccagggaggggcagtccttggcactttctgtcctagaggacactgtcagttgagttaatacaagtgacatagcttcccttccctcccccttcacccactccctccagaacatttagtgtagatgaaaatgtggtgatagaaatgggtgcatgatcttcacgtgtgacagccaggcctttgcctcttggccaagtaaagcccttccgggtcgctctccttcgattccattttacctcctcttctgatcacttccagagatgagctgtttctggataatggcacacgggcaaatctgtgtgccctgtgggccgctgttacttaccctctcctgcgagacccaggggcttttccctactgttcccacgcttcctctctctcgaggccactgaagtttggagtcaaaaggcccagagtctgagtcccagccctgagcacttaggagccttctgacttagggtttgtcactccacctcattgagcctgactgttctgctccataaaatagggtaataaaggtcaaacatcagtgagcaagctgtgtacactggaaaacactgaatcaatacaatgcgtttgtgattatcattagtaaggtaagtcttagatcagagccctccagcccttctttttgaaacctcccaatggcatttcagaagtgagcagtggaattttcctgccatcctaataagagccctggattccatcattaacatttcagcccattggatgaagtggtgccctctcctctggtcccccgcgaaaaggtaaatacacccaaagggagggacctagttaagtcactggcacctagataagttaggagggtaaagccactacctcgtctgaaggactggacttgacaccccacagtggaagggagcatcaggagaggaacaaaaaaagggatctcagggagaggccagtgtcaaacttgacctcccttgtttggcctagaatgaacccttctctttagctcctggatatgaaaggccatctgcttggagcacagaaagatattgccattttacagcttaagagagtaaggccttgggctgtgctgtgacctgcccaagatttgacactggctaggagcagaggctgcgtcaggctcttaaagtcatgtgtttgcatgctggatgctatactgtccagccaggacacaagacttctgatttctaccctcaagatactcccagatcctaaatccagtagcctcccaggcaaaatatagcaatctgccacaactgccagatgaaaagcaacaatcagagtagaaaaatctgttgcctgatatacataacaccaatcagaccgtgtggatttttctctgaattgactgattttgtttttttcttactgaaaatggacctgcctttcactgaattttctgagggcagagtcttagctgttttctttaagcaccttttttttttttttccattgggaaatggctgatgagttcacatttagggatgtacacacacagatggcagacgtctccccactcatccagccccagatctgagccttgacgcaggccaagtggaaaaatactttcccgcccccctcccctgttcccacttcctcatctggcactatgcatgtctcactcaccctccacagcactcagtcccatcgacgttcactgaacattggctttctctttctgactcctgcctgttttagtccactatatattgctgtatttgcttaaatgctggaaagtaactgttaaaatgtgaaattgtaatttttaaaaaggctacaattaaattttagccaatgccactcaccaaatctttgcacctagtagatagatcaatgtaaaaacaaatacctaactgtacagtgagtgtgggggaaatgtagtaacctagttagtagtcttcaatataaccaattgtacaaggggaagtggtgtttacctacttgttcatcaccattattgaaagccgtactgatcagttagttgacaacgggcatttttttttctttgcttcatggaatgatttcttttcttaaccttcgacttatcctgaggtcaagccttttgtctttatgtgtaaccgacgttcagtctattctaggaatgaaccagcaagttgttcatttaaaactgaccaaagacaattaattcctggtctagtttcctgggccttgtggctcagctgccactaaagagctttttggataaaattgagaacaagctgtgcttcctaccccactctccccgtccccttttattcccttttcctcttaaagagctgctctgagctgtgggattctatgaaaaattcttgcctttccttgtttcagtgctaacgatttctcacctcgaagcgccttttgaaccccggacagagtgcacaatcggagggaattgcgagcttgggaattagactttggagtcttttctctgaagtcaccaggccaggggtcaggagagagatggattcccaagggatgaaaggtttctattcaatgaagaaatcggagtgggaagagacacagggaaattgagccatattttggctatcggctggaaccagcagttcagagatctgccttataaacatttaaaaccggtttgtggtacacaaagaggaaccagtgtgggaaggggcctttatgtggggctttcttctctgttggagtcccttggagtgccttgttgggtatatttctctgtcattcaggaggcacgaatgtggaggacttctcgtgacctggtcgtgatgtggcattcagtgcatgtccacagctaatggaaaaacacgaggactcgggtaatggttcttcctctcagtctttctattcctaacttttcacacatccagatggttccacactagtgcaaatgcctcactctcctgagaaacccagaaagaagagtggctggctcacaaccatggggttagcccctgctgggctgggagtcggggtggcggccaggaggaaaggcagaaaggggtgagccgaggtgttgcctagctgattttctgctgtgcagagctaatgctgacatttcatgtcaacttccccggttctctggggtctcctctcctctgagcagccacatagaacattccccacatatccaaagctgcccaggggagccgagagaagggactttgctgtcaggtccaagccctcctgacctccctgagattgatctgccagtgtcctgctgtccctctgggactggccacatggccatcgctgccccttgttgacacctcctttctgtgtgagttgtccccggccaataacaaagctgttccttgaaccagaacaaccagagtgcacttttccttccttagacggaagtagatcctggctagggtttctgcccaggcccttgttcccggcagtgtgactgtttacatggtttggcaataggtttgattctgattgcttcagagtggctggtctattttgtttcctttggtttccttcctccccaaattgtgacaggaaaaacagaccaaaaccaccctaggaaattgctggttgcctgtccccacgtgatgataaatgttgccctcttctggatatcgtttctctaccttacgaccaaacgcccgtcctatagagtgtctgattggatcctctgtcgcgtattctgatggtgcctgctggtttgacgtggagctatcctgtgaaataaaacagcttaacttttctc

SEQ ID NO: 28282 - DNA, 8656 bp, Homo sapiens
  source 1..8656: mol_type = unassigned DNA
gtgtgtgtgtatgcctgtgtgcacagcacaactgtgtgcgtgtcccggtgagtgtgcctgtgcatgcgtgagtgtgtgtacgtgtgcatgtgtgtgtgagtgcgcttggttattactattattattatttttggaagaaaaatctttgaaaatctggggcaggttactgtgctcctagggtgattcttcttttgcaagaggagctgaccagggcaagctactagagccatttctcggcaagtaaagagatttttccttccagaaggagaaggatttttctccctgctctgcagccaagtgaaagagattagtccctaaacctgtgaaatcgaccagagctgtgtgattaccagggcttgagagaggactcgaaaagaaaaggagaaataaatcaaacagcctgtcagttcctttggccacgtcagaagatgtcatctcaaactaagttcaagaaagacaaagagatcattgctgaatatgaagcccaaataaaagagatccgcacgcagctggtggagcagttcaaatgtctggagcagcaatcagagtcgcgactgcagctgcttcaagacctccaggagtttttccgccggaaagctgagattgagctcgagtactcccgcagcctggagaagctggctgagcgcttctcctccaaaatccgcagctcccgggagcaccagttcaagaaggaccagtacctcctctcgcctgtgaactgttggtatctggttctgcatcagacccggcgggagagccgagaccatgccaccctcaatgacatcttcatgaacaatgtcatcgtccgcctctcccagatcagtgaggatgtcatcagactcttcaaaaagagcaaggagattggcctgcagatgcacgaggagctcctgaaggtgaccaatgagctctacacagtcatgaaaacctaccacatgtaccatgcagagagcatcagtgcggaaagcaagctgaaggaggctgagaagcaggaggagaagcagttcaataagtcaggagacctcagcatgaacctgctccggcacgaggaccggccccagcgccgcagctctgtgaagaagattgagaagatgaaggagaagaggcaggccaagtactctgagaacaagctgaaatgcacaaaggcccggaatgactacttgctcaatctggcagccaccaacgcagctataagcaaatactacatccatgatgtctctgatctgatcgattgctgtgatttgggcttccatgccagcctggcccgcaccttccggacctatctctcagctgaatacaacctggagacctctcgccacgaagggctggatgtcattgagaatgcagtggacaacctggattcccgaagtgacaagcacacagtcatggacatgtgcaatcaagtcttctgccctccactcaagttcgagttccagccccacatgggggatgaggtctgccaggtcagcgctcagcagcccgtccagacagaactgctcatgcgttatcaccagctgcagtccagactggccaccctcaagatagagaatgaggaggttaggaaaaccctggatgccaccatgcagacattacaggacatgctgactgtggaggactttgatgtctccgatgccttccaacacagtcgatcgacagagtccgtcaagtcggctgcctctgagacctacatgagcaagatcaacattgccaagaggagagccaaccagcaggaaacagaaatgttttattttacaaaatttaaagagtatgtgaatggcagtaacctcatcaccaagctgcaggccaagcacgatttactcaagcagaccctgggcgaaggggaaagagcagaatgcggcaccaccaggcccccctgtcttccccctaaaccacagaaaatgaggagacctaggcctctctcagtgtatagccataaactctttaacggcagtatggaagcattcattaaggattcaggacaagctataccgcttgtagtcgagagctgcatccgttacatcaatttatatggactccagcagcaggggatcttcagagtgccaggatctcaggtggaagtcaatgacatcaaaaattcctttgagagaggtgaagacccccttgtggacgatcaaaatgaacgagatatcaattcagtcgctggtgttttaaaactgtatttccgaggactggaaaacccactctttcctaaggaaaggtttcaagatttgatatctactattaaactggagaacccagccgagagggtgcaccagatccaacaaatcctcgtcacccttccccgcgtggtcattgtggtcatgagatacctcttcgctttcctcaaccacctctcccagtatagcgacgagaacatgatggatccctacaacctggccatctgcttcgggcctaccctcatgcacatccctgatgggcaggaccctgtgtcctgccaggcacacatcaatgaagtcatcaaaaccatcatcatccatcatgaagccatcttccccagcccccgggagctagagggacctgtgtatgaaaaatgcatggctggaggggaagaatattgtgacagcccacacagcgagccaggggccatcgatgaagttgaccatgacaatggcactgagcctcataccagcgatgaagaagtggagcagatcgaggctattgccaagtttgactacatggggcggtccccgcgtgagctatccttcaagaagggggcctcgctgctcctgtaccaccgcgcctcggaggactggtgggagggccggcacaacggcgtggatggactcatcccccatcagtacatagttgtacaggacatggatgatgccttctccgacagcctgagccagaaggctgacagcgaggccagcagtgggccattgctggatgacaaggcctcttccaaaaacgacctccagtcccccacggagcacatctcggattacggctttgggggggtgatgggccgagtgcggttacgatctgatggagcagccatccccagacgccgaagcgggggcgacacacacagcccgccccggggcctgggccccagcatagacacaccaccccgggctgctgcctgccccagcagcccccacaaaatccccctcacccgggggaggatcgagagccctgagaagcggaggatggcgacgttcgggagcgctggcagcatcaactaccctgacaagaaggcgctctccgaagggcactcgatgaggtcgacctgcggttccaccaggcacagcagcctaggggaccacaagtccctggaggccgaggccctggcagaagacatcgagaagaccatgagcacggctctgcacgagttgcgggaactcgagaggcagaacacggtcaagcaggcgccagatgtggtgctggacaccctggagcccctgaagaacccgccaggccccgtcagctcggagcccgccagtccccttcacaccatcgtcatccgcgaccccgatgccgccatgcgccgcagcagcagctcctccaccgagatgatgaccaccttcaagccagccctgtccgcccgcctggctggcgcccagctccgcccgccccccatgcggcccgtgcggccggtggtccagcaccggtccagcagcagcagcagctcgggcgtgggcagcccggccgtgacgcccaccgagaagatgttccccaacagctcagcggacaagtcgggcaccatgtgacctgcaggatgggccgcgccgccgtggcccgctgtggctcaccacggcccagggtggccttggtggcttccacgtgcttcccagtgaccctggccttggagggcagaggtccgtctgggagggtgtgtctgtgcagagctgaggcccgggcgctggctgcagctcacgtccagccatgggaatcccacggacctctcgcgtgtcaacagacgaccagaggagtgctggagctccagcagccccaaccacagcattccctaacatggaggcaaaataccacatggcttctcccgcatatcgtcactggaaacttcctctctcgacattctctctacatacgtatatgtgtgtgtatatcgatgtgtgcatatatacacatgtatacgtatgtacgtgtctgtaggtgtgtgtatatatatatatatttatgcatctatatacatatactagatctggacacacgcatactaagtgtatatagtatctcctttttctttttatgaaacttagatttacctcagatccatgccaccaaacatctcccaccgagttatttggtgggatttgcagggacttttctgggagaacttaaaggcccatagtaactgcgaatgaagcaatataccactaacctgcagaaaaacacaaacaaaaacagactcccactgtctccagaagtcgtggccttccagaacagtctgcccctcaaggaagggtggggcaggcagtacccccaagcaggctgctcccagaggtggggaacccttcataggaaatccccacccccgtccaccccagagaccctgcccttccacccggaggccaaaggccaactgtactcccaaaggcatgggagaaggttggcgagaagacccctgactaccacatccttgtgtttgtgtgtagagacgggggatagtgagaacctaagccccatcgtagcacagtattacatgtggttgggaaaaataaaaatacagtggtgtggaatactccaaaacctagaaatgctgtaggaataaatctgtggtaactatagaggtttaacttatatcattttcaaactatttaattttttcttttcctggttctactaattatactgtgtcagatttggaactaaacaggcaaggaggctttgagtcacatcgttttcattttaaatcaggctgtgatgcactgtggctggtgccgtcttgcatgaaacgcatgagccgtgagcgcccagttcagactggggccagggaggggcagtccttggcactttctgtcctagaggacactgtcagttgagttaatacaagtgacatagcttcccttccctcccccttcacccactccctccagaacatttagtgtagatgaaaatgtggtgatagaaatgggtgcatgatcttcacgtgtgacagccaggcctttgcctcttggccaagtaaagcccttccgggtcgctctccttcgattccattttacctcctcttctgatcacttccagagatgagctgtttctggataatggcacacgggcaaatctgtgtgccctgtgggccgctgttacttaccctctcctgcgagacccaggggcttttccctactgttcccacgcttcctctctctcgaggccactgaagtttggagtcaaaaggcccagagtctgagtcccagccctgagcacttaggagccttctgacttagggtttgtcactccacctcattgagcctgactgttctgctccataaaatagggtaataaaggtcaaacatcagtgagcaagctgtgtacactggaaaacactgaatcaatacaatgcgtttgtgattatcattagtaaggtaagtcttagatcagagccctccagcccttctttttgaaacctcccaatggcatttcagaagtgagcagtggaattttcctgccatcctaataagagccctggattccatcattaacatttcagcccattggatgaagtggtgccctctcctctggtcccccgcgaaaaggtaaatacacccaaagggagggacctagttaagtcactggcacctagataagttaggagggtaaagccactacctcgtctgaaggactggacttgacaccccacagtggaagggagcatcaggagaggaacaaaaaaagggatctcagggagaggccagtgtcaaacttgacctcccttgtttggcctagaatgaacccttctctttagctcctggatatgaaaggccatctgcttggagcacagaaagatattgccattttacagcttaagagagtaaggccttgggctgtgctgtgacctgcccaagatttgacactggctaggagcagaggctgcgtcaggctcttaaagtcatgtgtttgcatgctggatgctatactgtccagccaggacacaagacttctgatttctaccctcaagatactcccagatcctaaatccagtagcctcccaggcaaaatatagcaatctgccacaactgccagatgaaaagcaacaatcagagtagaaaaatctgttgcctgatatacataacaccaatcagaccgtgtggatttttctctgaattgactgattttgtttttttcttactgaaaatggacctgcctttcactgaattttctgagggcagagtcttagctgttttctttaagcaccttttttttttttttccattgggaaatggctgatgagttcacatttagggatgtacacacacagatggcagacgtctccccactcatccagccccagatctgagccttgacgcaggccaagtggaaaaatactttcccgcccccctcccctgttcccacttcctcatctggcactatgcatgtctcactcaccctccacagcactcagtcccatcgacgttcactgaacattggctttctctttctgactcctgcctgttttagtccactatatattgctgtatttgcttaaatgctggaaagtaactgttaaaatgtgaaattgtaatttttaaaaaggctacaattaaattttagccaatgccactcaccaaatctttgcacctagtagatagatcaatgtaaaaacaaatacctaactgtacagtgagtgtgggggaaatgtagtaacctagttagtagtcttcaatataaccaattgtacaaggggaagtggtgtttacctacttgttcatcaccattattgaaagccgtactgatcagttagttgacaacgggcatttttttttctttgcttcatggaatgatttcttttcttaaccttcgacttatcctgaggtcaagccttttgtctttatgtgtaaccgacgttcagtctattctaggaatgaaccagcaagttgttcatttaaaactgaccaaagacaattaattcctggtctagtttcctgggccttgtggctcagctgccactaaagagctttttggataaaattgagaacaagctgtgcttcctaccccactctccccgtccccttttattcccttttcctcttaaagagctgctctgagctgtgggattctatgaaaaattcttgcctttccttgtttcagtgctaacgatttctcacctcgaagcgccttttgaaccccggacagagtgcacaatcggagggaattgcgagcttgggaattagactttggagtcttttctctgaagtcaccaggccaggggtcaggagagagatggattcccaagggatgaaaggtttctattcaatgaagaaatcggagtgggaagagacacagggaaattgagccatattttggctatcggctggaaccagcagttcagagatctgccttataaacatttaaaaccggtttgtggtacacaaagaggaaccagtgtgggaaggggcctttatgtggggctttcttctctgttggagtcccttggagtgccttgttgggtatatttctctgtcattcaggaggcacgaatgtggaggacttctcgtgacctggtcgtgatgtggcattcagtgcatgtccacagctaatggaaaaacacgaggactcgggtaatggttcttcctctcagtctttctattcctaacttttcacacatccagatggttccacactagtgcaaatgcctcactctcctgagaaacccagaaagaagagtggctggctcacaaccatggggttagcccctgctgggctgggagtcggggtggcggccaggaggaaaggcagaaaggggtgagccgaggtgttgcctagctgattttctgctgtgcagagctaatgctgacatttcatgtcaacttccccggttctctggggtctcctctcctctgagcagccacatagaacattccccacatatccaaagctgcccaggggagccgagagaagggactttgctgtcaggtccaagccctcctgacctccctgagattgatctgccagtgtcctgctgtccctctgggactggccacatggccatcgctgccccttgttgacacctcctttctgtgtgagttgtccccggccaataacaaagctgttccttgaaccagaacaaccagagtgcacttttccttccttagacggaagtagatcctggctagggtttctgcccaggcccttgttcccggcagtgtgactgtttacatggtttggcaataggtttgattctgattgcttcagagtggctggtctattttgtttcctttggtttccttcctccccaaattgtgacaggaaaaacagaccaaaaccaccctaggaaattgctggttgcctgtccccacgtgatgataaatgttgccctcttctggatatcgtttctctaccttacgaccaaacgcccgtcctatagagtgtctgattggatcctctgtcgcgtattctgatggtgcctgctggtttgacgtggagctatcctgtgaaataaaacagcttaacttttctcaaa

SEQ ID NO: 28283 - DNA, 3929 bp, Homo sapiens
  source 1..3929: mol_type = unassigned DNA
gggccccagtgcccccgtccccaccaccagtctcatgctcctacccttgtgtgcccgcagagatccgcacgcagctggtggagcagttcaaatgtctggagcagcaatcagagtcgcgactgcagctgcttcaagacctccaggagtttttccgccggaaagctgagattgagctcgagtactcccgcagcctggagaagctggctgagcgcttctcctccaaaatccgcagctcccgggagcaccagttcaagaaggaccagtacctcctctcgcctgtgaactgttggtatctggttctgcatcagacccggcgggagagccgagaccatgccaccctcaatgacatcttcatgaacaatgtcatcgtccgcctctcccagatcagtgaggatgtcatcagactcttcaaaaagagcaaggagattggcctgcagatgcacgaggagctcctgaaggtgaccaatgagctctacacagtcatgaaaacctaccacatgtaccatgcagagagcatcagtgcggaaagcaagctgaaggaggctgagaagcaggaggagaagcagttcaataagtcaggagacctcagcatgaacctgctccggcacgaggaccggccccagcgccgcagctctgtgaagaagattgagaagatgaaggagaagaggcaggccaagtactctgagaacaagctgaaatgcacaaaggcccggaatgactacttgctcaatctggcagccaccaacgcagctataagcaaatactacatccatgatgtctctgatctgatcgattgctgtgatttgggcttccatgccagcctggcccgcaccttccggacctatctctcagctgaatacaacctggagacctctcgccacgaagggctggatgtcattgagaatgcagtggacaacctggattcccgaagtgacaagcacacagtcatggacatgtgcaatcaagtcttctgccctccactcaagttcgagttccagccccacatgggggatgaggtctgccaggtcagcgctcagcagcccgtccagacagaactgctcatgcgttatcaccagctgcagtccagactggccaccctcaagatagagaatgaggaggttaggaaaaccctggatgccaccatgcagacattacaggacatgctgactgtggaggactttgatgtctccgatgccttccaacacagtcgatcgacagagtccgtcaagtcggctgcctctgagacctacatgagcaagatcaacattgccaagaggagagccaaccagcaggaaacagaaatgttttattttacaaaggggcctgatgatgttttccccatttgccatccaagactctgatgaggcttaaacgtacgtgtgtgaaaactgtcaagtgctctgtggatacaagtcgagtgactcttaatggccaataggccaggtcctgggagcctaggaccatggaaaaggagagaggacaccacaacctcccaccagcccagtcgttccagaaacccatcaagaaatttaaagagtatgtgaatggcagtaacctcatcaccaagctgcaggccaagcacgatttactcaagcagaccctgggcgaaggggaaagagcagaatgcggcaccaccaggcccccctgtcttccccctaaaccacagaaaatgaggagacctaggcctctctcagtgtatagccataaactctttaacggcagtatggaagcattcattaagaggaagaagaaatgctcgaaccaggaaccaggattcaggacaagctataccgcttgtagtcgagagctgcatccgttacatcaatttatatggactccagcagcaggggatcttcagagtgccaggatctcaggtggaagtcaatgacatcaaaaattcctttgagagaggtgaagacccccttgtggacgatcaaaatgaacgagatatcaattcagtcgctggtgttttaaaactgtatttccgaggactggaaaacccactctttcctaaggaaaggtttcaagatttgatatctactattaaaaagttgccccatacccagtttcatttggggtgtttctcacagtactctgagagatatttgcagccaggaaagtgtcccaggagatggcaagagaagagaactggagaacccagccgagagggtgcaccagatccaacaaatcctcgtcacccttccccgcgtggtcattgtggtcatgagatacctcttcgctttcctcaaccacctctcccagtatagcgacgagaacatgatggatccctacaacctggccatctgcttcgggcctaccctcatgcacatccctgatgggcaggaccctgtgtcctgccaggcacacatcaatgaagtcatcaaaaccatcatcatccatcatgaagccatcttccccagcccccgggagctagagggacctgtgtatgaaaaatgcatggctggaggggaagaatattgtgacagcccacacagcgagccaggggccatcgatgaagttgaccatgacaatggcactgagcctcataccagcgatgaagctcctcgggctgatgggcagaaggcttctctggacaccaggactgaagatgaggagggacagagagaatagggcttgctgggtcagcgaagaagcagccatgggactcacccagtggggcttcctccccataagaaccaccccccagaaagtgctgcctcccacttctcagggtaaaggttcacagtggcccccagaatgcatgagtcagagctttgggtccccctccgagatgatccttcttctttttgttctttgtaaggctgctggtttctgggaatgacaaaggcaggaaaaatcattctgggaaggaagaagccacagtctgggagagccagtttcatgttccctgaaggctctcaaagtatcctgtgtgtattagtggggggtattgaatcaggggcactctttggtggaaaatcaattgcattttctaaatgttacattcttgccatccctggccaaacagtggcagaatagtgagctgcagagacagtcaaggggtcactgtgctcagaaaaaagagacctggagttgaagcacagagggagtccttatggtcatgtaatctgaggcaagccacatcacctctggcctctatttccttatctataaaatgggaatgacagcaccaagcaaattatggcatgggttaaaatgaggtgacatatgtgaaggagcctagcacagtgcctgggacagggaggtggataagaaacatcaatggactctgtatcaaacagacatccttcctaatcctgatagaaaaactgagtcctggagaattttcttgacctaactggcattggcagttactggtcattggcaaccagaacctcctgatttgtttacctgtttcctcttagacatttcatttaggggatcatcaatatctgtcttctttgctcttgacagcacccggtatgaatggaatccagcaggcctcaaaggtcaaatcaggcagagaaccatgagtccaggtctttgccatgcatgaatcagccaatgaatgccaaattgcaggaacaatttagttgtttgtgtatctgttgcctttcttgtctcaaagattctgtaccaactgggcgtggtggctcacacctgtaaccccaacactttgggaagttgaggtgggcagatcacttgagcccaggaattcgagaccagcctgggcaacatggtgaaactccgtctctacaaaaaaaaccaaaatacaaaaattagccaggcatggtggcatatgcctgtggtcccagcaactcaggaggctgaagtgggagaattacttaagcccagggaggttgaggctgcagtgagccatgattgtgccactgtactccagcctgagtgacagaacaaggtcctgtctc

SEQ ID NO: 28284 - DNA, 479 bp, Homo sapiens
  source 1..479: mol_type = unassigned DNA
gaaggcctgtgagtgaggaatgcctctcaccagctgtgcctgagctgcagcactccagccactgctgtctccttagctgctcacatatggatactttcacagttcaggattccactgcaatgagctggtggaggaataatttctggatcatcttagctgtggccatcatcgttgtctctgtgggtctgggcctcatcctgtactgtgtctgtaagtggcagcttagacgaggcaagaaatgggaaattgccaagcccctgaaacacaagcaagtagatgaagaaaagatgtatgactttttactgttgagaactgcctgttcccttccacccttgcccctccactaccgtaccagtatgactgagacatatggagtcttgctctgtcgcccaggctggagtgcattggcacgatctcggctcactgcagcctccgcctcctgggttcaagcaattctcctgcctcagcctcccaagtag

SEQ ID NO: 28285 - DNA, 916 bp, Homo sapiens
  source 1..916: mol_type = unassigned DNA
tgaaggcctgtgagtgaggaatgcctctcaccagctgtgcctgagctgcagcactccagccactgctgtctccttagctgctcacatatggatactttcacagttcaggattccactgcaatgagctggtggaggaataatttctggatcatcttagctgtggccatcatcgttgtctctgtgggtctgggcctcatcctgtactgtgtctgtaagtggcagcttagacgaggcaagaaatgggaaattgccaagcccctgaaacacaagcaagtagatgaagaaaagatgtatgagaatgttcttaatgagtcgccagttcaattaccgcctctgccaccgaggaattggccttctctagaagactcttccccacaggaagccccaagtcagccgcccgctacatactcactggtaaataaagttaaaaataagaagactgtttccatcccaagctacattgagcctgaagatgactatgacgatgttgaaatccctgcaaatactgaaaaagcatcattttgaaacagccatttcttctttttggcaaaactgaagagggttcacacaacttattttaaaacaatcaagaatggttgaacttcagtaggtctctgggccctgaaagccagtggtgattttatgaagctctataagataaagcacttcccaaaccttagatgaagacacccctgcgatcggatgactgcagccagaggagacacatgggtgctcggctctgaggacttagaggggtcagccttgtgctgttgaggaaactttccatgggaaggaccacggggctccatggctcccacctgtgggaaactactcatttcttggcattctttcccccttcattccctttggtttgcatggttctgagtgatattaaatctcagcatttggttgtgca

SEQ ID NO: 28286 - DNA, 2383 bp, Homo sapiens
  source 1..2383: mol_type = unassigned DNA
actgtctctagcagtgggtgaaggcctgtgagtgaggaatgcctctcaccagctgtgcctgagctgcagcactccagccactgctgtctccttagctgctcacatatggatactttcacagttcaggattccactgcaatgagctggtggaggaataatttctggatcatcttagctgtggccatcatcgttgtctctgtgggtctgggcctcatcctgtactgtgtctgtaagtggcagcttagacgaggcaagaaatgggaaattgccaagcccctgaaacacaagcaagtagatgaagaaaagatgtatgagaatgttcttaatgagtcgccagttcaattaccgcctctgccaccgaggaattggccttctctagaagactcttccccacaggaagccccaagtcagccgcccgctacatactcactggtaaataaagttaaaaataagaagactgtttccatcccaagctacattgagcctgaagatgactatgacgatgttgaaatccctgcaaatactgaaaaagcatcattttgaaacagccatttcttctttttggcaaaactgaagagggttcacacaacttattttaaaacaatcaagaatggttgaacttcagtaggtctctgggccctgaaagccagtggtgattttatgaagctctataagataaagcacttcccaaaccttagatgaagacacccctgcgatcggatgactgcagccagaggagacacatgggtgctcggctctgaggacttagaggggtcagccttgtgctgttgaggaaactttccatgggaaggaccacggggctccatggctcccacctgtgggaaactactcatttcttggcattctttcccccttcattccctttggtttgcatggttctgagtgatattaaatctcagcatttggttgtgcagaccctcccaggctcccatccccagcaaggccctcaccaagcatgctggtctttaccctctcaccccacccacctcctgcactgtgaggctgtgggtgagttacagctgagtgctctcgtgcccaggttcccacaccacatctcgcgagtttgcaagggcagggagtaccttttgttctcgtgaaccctccccacctagacaccctgcaaaccccagtgcctttatatgatgtaggccaaattgaccatagagatttgagttttcacctaggttttctccccgtgcttgcaagttgtactgtaacaatggacaaaggacaaaagttaccttctgatttacacctagaagcatcattttgcaataggtgtgttgggggtgctacaggaaaaatacatttcccccaggacaaatcatggggaacaggaaagaaaaggggcatgtaacaatggcatatacaagatgagagttcagggggcttaatatcccctgtccatcattttcatcagtacttactcgagttctaggaaaacagcctcaagccccttccttccagatcactgtccctgggcatctgggaggaggcagaaggtccactgtgatgtgctgcagccaatgagatgggccagggacatgggcagatgtcttgttaaacaagtgtcctaatggggtcaacaaggcccgagtcagctttataggctcttagacctcatcaattccttctagctgatcgccagagccctaggacttgactcattctaactatactcacaagatgctggtttctaagtgacctctgggaaatctggcaaatgaacagccttgcagagagagcactgtgaacctggaaaggcctgagagtgactcagatttccctcaagagatgggaaaatgtgttcctcccattttcaagctttctccctcaatcaacgctggagcactggggacctgggcttcctccctggttctctctttccagactctatgaaggcttccaccttgctattaatacctccttgggaggccaaggtgggcggatcacctgaggtcgggagttcgagaccagcctgaccaacatggagaaaccccatttctactaaaaatacaaaattagtcaggcatggtcgcgcatgcctgtaatcccagctacttgggaggctgaggcagaagaatcgcttgaaactgggaggcggaggttgcggtgagccgagaacatgccattgcactccagcctggacaacaagagtgaaactccatctaaaaataaataaataaataaataaataaaccctccttatgttaggccagtagttatctaactatggccttatgggactctggtatcccaccagccaaagagaggactcttcccaaattatagaacaaaaataagccaaaggattggagtgtttcaaacacatgctttcgtcttataaatgttctgtaaaccc

SEQ ID NO: 28287 - DNA, 1966 bp, Homo sapiens
  source 1..1966: mol_type = unassigned DNA
gggtattggcagctgaggagtggaggctgggcagctccgactccctgacgccagcgcgaccagatcaatccaggctccaggagaaagcaggcgggcgggcggagaaaggagaggccgagcggctcaacccgggccgaggctcggggagcggagagtggcgcagcgcccggccgtccggacccgggccgcgagaccccgctcgcccggccactcgtgctcccacacggacgggcgcgccgccaacccggtgctgactgggttacttttttaaacactaggaatggtaatttctactcttctggacttcaaactaagaagttaaagagacttctctgtaaataaacaaatctcttctgctgtccttttgcatttggagacagctttatttcaccatatccaaggagtataactagtgctgtcattatgaatgtgacaagtttattttcctttacaagtccagctgtgaagagacttcttgggtggaaacagggcgatgaagaagaaaaatgggcagagaaagctgttgatgctttggtgaaaaaactgaagaaaaagaaaggtgccatggaggaactggaaaaggccttgagctgcccagggcaaccgagtaactgtgtcaccattccccgctctctggatggcaggctgcaagtctcccaccggaagggactgcctcatgtcatttactgccgtgtgtggcgctggcccgatcttcagagccaccatgaactaaaaccactggaatgctgtgagtttccttttggttccaagcagaaggaggtctgcatcaatccctaccactataagagagtagaaagccctgtacttcctcctgtgctggttccaagacacagcgaatataatcctcagcacagcctcttagctcagttccgtaacttaggacaaaatgagcctcacatgccactcaacgccacttttccagattctttccagcaacccaacagccacccgtttcctcactctcccaatagcagttacccaaactctcctgggagcagcagcagcacctaccctcactctcccaccagctcagacccaggaagccctttccagatgccagctgatacgcccccacctgcttacctgcctcctgaagaccccatgacccaggatggctctcagccgatggacacaaacatgatggcgcctcccctgccctcagaaatcaacagaggagatgttcaggcggttgcttatgaggaaccaaaacactggtgctctattgtctactatgagctcaacaatcgtgtgggtgaagcgttccatgcctcctccacaagtgtgttggtggatggtttcactgatccttccaacaataagaaccgtttctgccttgggctgctctccaatgttaaccggaattccactattgaaaacaccaggcggcatattggaaaaggagttcatctttattatgttggaggggaggtgtatgccgaatgccttagtgacagtagcatctttgtgcaaagtcggaactgcaactaccatcatggatttcatcctactactgtttgcaagatccctagtgggtgtagtctgaaaatttttaacaaccaagaatttgctcagttattggcacagtctgtgaaccatggatttgagacagtctatgagcttacaaaaatgtgtactatacgtatgagctttgtgaagggctggggagcagaataccaccgccaggatgttactagcaccccctgctggattgagatacatctgcacggccccctccagtggctggataaagttcttactcaaatgggttcacctcataatcctatttcatctgtatcttaaatggccccaggcatctgcctctggaaaactattgagccttgcatgtacttgaaggatggatgagtcagacacgattgagaactgacaaaggagccttgataatacttgacctctgtgaccaactgttggattcagaaatttaaac

SEQ ID NO: 28288 - DNA, 1658 bp, Homo sapiens
  source 1..1658: mol_type = unassigned DNA
cactgcatgtgtattcgtgagttcgcggttgaacaactgttcctttactctgctccctgtctttgtgctgactgggttacttttttaaacactaggaatggtaatttctactcttctggacttcaaactaagaagttaaagagacttctctgtaaataaacaaatctcttctgctgtccttttgcatttggagacagctttatttcaccatatccaaggagtataactagtgctgtcattatgaatgtgacaagtttattttcctttacaagtccagctgtgaagagacttcttgggtggaaacagggcgatgaagaagaaaaatgggcagagaaagctgttgatgctttggtgaaaaaactgaagaaaaagaaaggtgccatggaggaactggaaaaggccttgagctgcccagggcaaccgagtaactgtgtcaccattccccgctctctggatggcaggctgcaagtctcccaccggaagggactgcctcatgtcatttactgccgtgtgtggcgctggcccgatcttcagagccaccatgaactaaaaccactggaatgctgtgagtttccttttggttccaagcagaaggaggtctgcatcaatccctaccactataagagagtagaaagccctgtacttcctcctgtgctggttccaagacacagcgaatataatcctcagcacagcctcttagctcagttccgtaacttaggacaaaatgagcctcacatgccactcaacgccacttttccagattctttccagcaacccaacagccacccgtttcctcactctcccaatagcagttacccaaactctcctgggagcagcagcagcacctaccctcactctcccaccagctcagacccaggaagccctttccagatgccagctgatacgcccccacctgcttacctgcctcctgaagaccccatgacccaggatggctctcagccgatggacacaaacatgatggcgcctcccctgccctcagaaatcaacagaggagatgttcaggcggttgcttatgaggaaccaaaacactggtgctctattgtctactatgagctcaacaatcgtgtgggtgaagcgttccatgcctcctccacaagtgtgttggtggatggtttcactgatccttccaacaataagaaccgtttctgccttgggctgctctccaatgttaaccggaattccactattgaaaacaccaggcggcatattggaaaaggagttcatctttattatgttggaggggaggtgtatgccgaatgccttagtgacagtagcatctttgtgcaaagtcggaactgcaactaccatcatggatttcatcctactactgtttgcaagatccctagtgggtgtagtctgaaaatttttaacaaccaagaatttgctcagttattggcacagtctgtgaaccatggatttgagacagtctatgagcttacaaaaatgtgtactatacgtatgagctttgtgaagggctggggagcagaataccaccgccaggatgttactagcaccccctgctggattgagatacatctgcacggccccctccagtggctggataaagttcttactcaaatgggttcacctcataatcctatttcatctgtatcttaaatggccccaggcatctgcct

SEQ ID NO: 28289 - DNA, 573 bp, Homo sapiens
  source 1..573: mol_type = unassigned DNA
attgtgtcccccgcgccggcggggcgacccctgcgggagctggaggacgaccgctggcgctgctctccaaggcgcctggtggagcgggtctcgcgggcgggggaccccggcgccccgggcccctccacatcccgcacgggttttcttctcggccccagcaagcctctttggggtcgaggtcaaggaaagttcgcaccgagatcccctctaatttattcaaaggtgctgactgggttacttttttaaacactaggaatggtaatttctactcttctggacttcaaactaagaagttaaagagacttctctgtaaataaacaaatctcttctgctgtccttttgcatttggagacagctttatttcaccatatccaaggagtataactagtgctgtcattatgaatgtgacaagtttattttcctttacaagtccagctgtgaagagacttcttgggtggaaacagggcgatgaagaagaaaaatgggcagagaaagctgttgatgctttggtgaaaaaactgaagaaaaagaaaggtgccatggaggaactggaaaaggccttgagctgcccag

SEQ ID NO: 28290 - DNA, 421 bp, Homo sapiens
  source 1..421: mol_type = unassigned DNA
gagtcgattgcctcactgcatgtgtattcgtgagttcgcggttgaacaactgttcctttactctgctccctgtctttgatcttggccccctcaagtcctgagtgccttggttcctctttgatgcctttaaaaagctgggcttttgtttgtttgttttctggcttgtttgtttggaaggaggttggtctgatacgtgctactccagtttagccagggtgctgactgggttacttttttaaacactaggaatggtaatttctactcttctggacttcaaactaagaagttaaagagacttctctgtaaataaacaaatctcttctgctgtccttttgcatttggagacagctttatttcaccatatccaaggagtataactagtgctgtcattatgaatgtgacaagtttattttcctttaca

SEQ ID NO: 28291 - DNA, 558 bp, Homo sapiens
  source 1..558: mol_type = unassigned DNA
caattctgggtacgtacaacttctggggcctgcaaattattggagagtgagtgaggggcaacgaaagatagacataaaagggcgcgtctcgaaaggtgctgactgggttacttttttaaacactaggaatggtaatttctactcttctggacttcaaactaagaagttaaagagacttctctgtaaataaacaaatctcttctgctgtccttttgcatttggagacagctttatttcaccatatccaaggagtataactagtgctgtcattatgaatgtgacaagtttattttcctttacaagtccagctgtgaagagacttcttgggtggaaacagggcgatgaagaagaaaaatgggcagagaaagctgttgatgctttggtgaaaaaactgaagaaaaagaaaggtgccatggaggaactggaaaaggccttgagctgcccagggcaaccgagtaactgtgtcaccattccccgctctctggatggcaggctgcaagtctcccaccggaagggactgcctcatgtcatttactgccgtgtgtggcgctggcccga

SEQ ID NO: 28292 - DNA, 847 bp, Homo sapiens
  source 1..847: mol_type = unassigned DNA
ggagaaagcaggcgggcgggcggagaaaggagaggccgagcggctcaacccgggccgaggctcggggagcggagagtggcgcagcgcccggccgtccggacccgggccgcgagaccccgctcgcccggccactcgtgctcccacacggacgggcgcgccgccaacccgcatgcaatttttaaatacacggtgcaagataaccagtaaaggcgcgttccttctgaaaattgaggccggtctcagaaccatctcctgagaaagcatccttttcgtgctgactgggttacttttttaaacactaggaatggtaatttctactcttctggacttcaaactaagaagttaaagagacttctctgtaaataaacaaatctcttctgctgtccttttgcatttggagacagctttatttcaccatatccaaggagtataactagtgctgtcattatgaatgtgacaagtttattttcctttacaagtccagctgtgaagagacttcttgggtggaaacagggcgatgaagaagaaaaatgggcagagaaagctgttgatgctttggtgaaaaaactgaagaaaaagaaaggtgccatggaggaactggaaaaggccttgagctgcccagggcaaccgagtaactgtgtcaccattccccgctctctggatggcaggctgcaagtctcccaccggaagggactgcctcatgtcatttactgccgtgtgtggcgctggcccgatcttcagagccaccatgaactaaaaccactggaatgctgtgagtttccttttggttccaagcagaaggaggtctgcatcaatccctaccactataagagagtagaaagccctg

SEQ ID NO: 28293 - DNA, 616 bp, Homo sapiens
  source 1..616: mol_type = unassigned DNA
attatttggagcaacaaggttacctactcgaatcactggatcctgagttgacacaaaacgcatctgttgactcagggtttgtataaccacgtgcagtatttactaggctatccaattctgggtgctgactgggttacttttttaaacactaggaatggtaatttctactcttctggacttcaaactaagaagttaaagagacttctctgtaaataaacaaatctcttctgctgtccttttgcatttggagacagctttatttcaccatatccaaggagtataactagtgctgtcattatgaatgtgacaagtttattttcctttacaagtccagctgtgaagagacttcttgggtggaaacagggcgatgaagaagaaaaatgggcagagaaagctgttgatgctttggtgaaaaaactgaagaaaaagaaaggtgccatggaggaactggaaaaggccttgagctgcccagggcaaccgagtaactgtgtcaccattccccgctctctggatggcaggctgcaagtctcccaccggaagggactgcctcatgtcatttactgccgtgtgtggcgctggcccgatcttcagagccaccatgaactaaaaccactgg

SEQ ID NO: 28294 - DNA, 569 bp, Homo sapiens
  source 1..569: mol_type = unassigned DNA
aatttggagaggatccctggtcgcgcggcagcggcggcggcgcgcgggtgagcgggtgctgactgggttacttttttaaacactaggaatggtaatttctactcttctggacttcaaactaagaagttaaagagacttctctgtaaataaacaaatctcttctgctgtccttttgcatttggagacagctttatttcaccatatccaaggagtataactagtgctgtcattatgaatgtgacaagtttattttcctttacaagtccagctgtgaagagacttcttgggtggaaacagggcgatgaagaagaaaaatgggcagagaaagctgttgatgctttggtgaaaaaactgaagaaaaagaaaggtgccatggaggaactggaaaaggccttgagctgcccagggcaaccgagtaactgtgtcaccattccccgctctctggatggcaggctgcaagtctcccaccggaagggactgcctcatgtcatttactgccgtgtgtggcgctggcccgatcttcagagccaccatgaactaaaaccactggaatgctgtgagtttccttt

SEQ ID NO: 28295 - DNA, 2085 bp, Homo sapiens
  source 1..2085: mol_type = unassigned DNA
atgtgtattcgtgagttcgcggttgaacaactgttcctttactctgctccctgtctttgttagtgtttctcggggttgtttctgtaggaaggtgggggtggtgggcgtgagagacagatgtgggcttgtttttctagttgctgaaactgtatgaaggctttaaagggagaacgttttcttgatgtgctttaggaggggaggaggaacaaatgcctgccagatctcacagctacagtagctgagcttttgtttattttgaagagcatgcaatttttaaatacacggtgcaagataaccagtaaaggcgcgttccttctgaaaattgaggccggtctcagaaccatctcctgagaaagcatccttttcgtgctgactgggttacttttttaaacactaggaatggtaatttctactcttctggacttcaaactaagaagttaaagagacttctctgtaaataaacaaatctcttctgctgtccttttgcatttggagacagctttatttcaccatatccaaggagtataactagtgctgtcattatgaatgtgacaagtttattttcctttacaagtccagctgtgaagagacttcttgggtggaaacagggcgatgaagaagaaaaatgggcagagaaagctgttgatgctttggtgaaaaaactgaagaaaaagaaaggtgccatggaggaactggaaaaggccttgagctgcccagggcaaccgagtaactgtgtcaccattccccgctctctggatggcaggctgcaagtctcccaccggaagggactgcctcatgtcatttactgccgtgtgtggcgctggcccgatcttcagagccaccatgaactaaaaccactggaatgctgtgagtttccttttggttccaagcagaaggaggtctgcatcaatccctaccactataagagagtagaaagccctgtacttcctcctgtgctggttccaagacacagcgaatataatcctcagcacagcctcttagctcagttccgtaacttaggacaaaatgagcctcacatgccactcaacgccacttttccagattctttccagcaacccaacagccacccgtttcctcactctcccaatagcagttacccaaactctcctgggagcagcagcagcacctaccctcactctcccaccagctcagacccaggaagccctttccagatgccagctgatacgcccccacctgcttacctgcctcctgaagaccccatgacccaggatggctctcagccgatggacacaaacatgatggcgcctcccctgccctcagaaatcaacagaggagatgttcaggcggttgcttatgaggaaccaaaacactggtgctctattgtctactatgagctcaacaatcgtgtgggtgaagcgttccatgcctcctccacaagtgtgttggtggatggtttcactgatccttccaacaataagaaccgtttctgccttgggctgctctccaatgttaaccggaattccactattgaaaacaccaggcggcatattggaaaaggagttcatctttattatgttggaggggaggtgtatgccgaatgccttagtgacagtagcatctttgtgcaaagtcggaactgcaactaccatcatggatttcatcctactactgtttgcaagatccctagtgggtgtagtctgaaaatttttaacaaccaagaatttgctcagttattggcacagtctgtgaaccatggatttgagacagtctatgagcttacaaaaatgtgtactatacgtatgagctttgtgaagggctggggagcagaataccaccgccaggatgttactagcaccccctgctggattgagatacatctgcacggccccctccagtggctggataaagttcttactcaaatgggttcacctcataatcctatttcatctgtatcttaaatggccccaggcatctgcctctggaaaactattgagccttgcatgtacttgaaggatggatgagtcagacacgattgagaactgacaaaggagccttgataatacttgacctctgtgaccaactgttggattcagaaatttaaac

SEQ ID NO: 28296 - DNA, 8769 bp, Homo sapiens
  source 1..8769: mol_type = unassigned DNA
atgctcagtggcttctcgacaagttggcagcaacaacacggccctggtcgtcgtcgccgctgcggtaacggagcggtttgggtggcggagcctgcgttcgcgccttcccgctctcctcgggaggcccttcctgctctcccctaggctccgcggccgcccagggggtgggagcgggtgaggggagccaggcgcccagcgagagaggccccccgccgcagggcggcccgggagctcgaggcggtccggcccgcgcgggcagcggcgcggcgctgaggaggggcggcctggccgggacgcctcggggcgggggccgaggagctctccgggccgccggggaaagctacgggcccggtgcgtccgcggaccagcagcgcgggagagcggactcccctcgccaccgcccgagcccaggttatcctgaatacatgtctaacaattttccttgcaacgttagctgttgtttttcactgtttccaaaggatcaaaattgcttcagaaattggagacatatttgatttaaaaggaaaaacttgaacaaatggacaatatgtctattacgaatacaccaacaagtaatgatgcctgtctgagcattgtgcatagtttgatgtgccatagacaaggtggagagagtgaaacatttgcaaaaagagcaattgaaagtttggtaaagaagctgaaggagaaaaaagatgaattggattctttaataacagctataactacaaatggagctcatcctagtaaatgtgttaccatacagagaacattggatgggaggcttcaggtggctggtcggaaaggatttcctcatgtgatctatgcccgtctctggaggtggcctgatcttcacaaaaatgaactaaaacatgttaaatattgtcagtatgcgtttgacttaaaatgtgatagtgtctgtgtgaatccatatcactacgaacgagttgtatcacctggaattgatctctcaggattaacactgcagagtaatgctccatcaagtatgatggtgaaggatgaatatgtgcatgactttgagggacagccatcgttgtccactgaaggacattcaattcaaaccatccagcatccaccaagtaatcgtgcatcgacagagacatacagcaccccagctctgttagccccatctgagtctaatgctaccagcactgccaactttcccaacattcctgtggcttccacaagtcagcctgccagtatactggggggcagccatagtgaaggactgttgcagatagcatcagggcctcagccaggacagcagcagaatggatttactggtcagccagctacttaccatcataacagcactaccacctggactggaagtaggactgcaccatacacacctaatttgcctcaccaccaaaacggccatcttcagcaccacccgcctatgccgccccatcccggacattactggcctgttcacaatgagcttgcattccagcctcccatttccaatcatcctgctcctgagtattggtgttccattgcttactttgaaatggatgttcaggtaggagagacatttaaggttccttcaagctgccctattgttactgttgatggatacgtggacccttctggaggagatcgcttttgtttgggtcaactctccaatgtccacaggacagaagccattgagagagcaaggttgcacataggcaaaggtgtgcagttggaatgtaaaggtgaaggtgatgtttgggtcaggtgccttagtgaccacgcggtctttgtacagagttactacttagacagagaagctgggcgtgcacctggagatgctgttcataagatctacccaagtgcatatataaaggtctttgatttgcgtcagtgtcatcgacagatgcagcagcaggcggctactgcacaagctgcagcagctgcccaggcagcagccgtggcaggaaacatccctggcccaggatcagtaggtggaatagctccagctatcagtctgtcagctgctgctggaattggtgttgatgaccttcgtcgcttatgcatactcaggatgagttttgtgaaaggctggggaccggattacccaagacagagcatcaaagaaacaccttgctggattgaaattcacttacaccgggccctccagctcctagacgaagtacttcataccatgccgattgcagacccacaacctttagactgaggtcttttaccgttggggcccttaaccttatcaggatggtggactacaaaatacaatcctgtttataatctgaagatatatttcacttttgttctgctttatcttttcataaagggttgaaaatgtgtttgctgccttgctcctagcagacagaaactggattaaaacaattttttttttcctcttcagaacttgtcaggcatggctcagagcttgaagattaggagaaacacattcttattaattcttcacctgttatgtatgaaggaatcattccagtgctagaaaatttagccctttaaaacgtcttagagccttttatctgcagaacatcgatatgtatatcattctacagaataatccagtattgctgattttaaaggcagagaagttctcaaagttaattcacctatgttattttgtgtacaagttgttattgttgaacatacttcaaaaataatgtgccatgtgggtgagttaattttaccaagagtaactttactctgtgtttaaaaagtaagttaataatgtattgtaatctttcatccaaaatattttttgcaagttatattagtgaagatggtttcaattcagattgtcttgcaacttcagttttatttttgccaaggcaaaaaactcttaatctgtgtgtatattgagaatcccttaaaattaccagacaaaaaaatttaaaattacgtttgttattcctagtggatgactgttgatgaagtatacttttcccctgttaaacagtagttgtattcttctgtatttctaggcacaaggttggttgctaagaagcctataagaggaatttcttttccttcattcatagggaaaggttttgtattttttaaaacactaaaagcagcgtcactctacctaatgtctcactgttctgcaaaggtggcaatgcttaaactaaataatgaataaactgaatattttggaaactgctaaattctatgttaaatactgtgcagaataatggaaacattacagttcataataggtagtttggatatttttgtacttgatttgatgtgactttttttggtataatgtttaaatcatgtatgttatgatattgtttaaaattcagtttttgtatcttggggcaagactgcaaacttttttatatcttttggttattctaagccctttgccatcaatgatcatatcaattggcagtgactttgtatagagaatttaagtagaaaagttgcagatgtattgactgtaccacagacacaatatgtatgctttttacctagctggtagcataaataaaactgaatctcaacatacaaagttgaattctaggtttgatttttaagattttttttttcttttgcacttttgagtccaatctcagtgatgaggtaccttctactaaatgacaggcaacagccagttctattgggcagctttgtttttttccctcacactctaccgggacttccccatggacattgtgtatcatgtgtagagttggttttttttttttttaatttttattttactatagcagaaatagacctgattatctacaagatgataaatagattgtctacaggataaatagtatgaaataaaatcaaggattatctttcagatgtgtttacttttgcctggagaacttttagctatagaaacacttgtgtgatgatagtcctccttatatcacctggaatgaacacagcttctactgccttgctcagaaggtcttttaaatagaccatcctagaaaccactgagtttgcttatttctgtgatttaaacatagatcttgatccaagctacatgacttttgtctttaaataacttatctaccacctcatttgtactcttgattacttacaaattctttcagtaaacacctaattttcttctgtaaaagtttggtgatttaagttttattggcagttttataaaaagacatcttctctagaaattgctaactttaggtccattttactgtgaatgaggaataggagtgagttttagaataacagatttttaaaaatccagatgatttgattaaaaccttaatcatacattgacataattcattgcttcttttttttgagatatggagtcttgctgtgttgcccaggcaggagtgcagtggtatgatctcagctcactgcaacctctgcctcccgggttcaactgattctcctgcctcagcctccctggtagctaggattacaggtgcccgccaccatgcctggctaacttttgtagttttagtagagacggggttttgcctgttggccaggctggtcttgaactcctgacctcaagtgatccatccaccttggcctcccaaagtgctgggattacgggcgtgagccactgtccctggcctcattgttcccttttctactttaaggaaagttttcatgtttaatcatctggggaaagtatgtgaaaaatatttgttaagaagtatctctttggagccaagccacctgtcttggtttctttctactaagagccataaagtatagaaatacttctagttgttaagtgcttatatttgtacctagatttagtcacacgcttttgagaaaacatctagtatgttatgatcagctattcctgagagcttggttgttaatctatatttctatttcttagtggtagtcatctttgatgaataagactaaagattctcacaggtttaaaattttatgtctactttaagggtaaaattatgaggttatggttctgggtgggttttctctagctaattcatatctcaaagagtctcaaaatgttgaatttcagtgcaagctgaatgagagatgagccatgtacacccaccgtaagacctcattccatgtttgtccagtgcctttcagtgcattatcaaagggaatccttcatggtgttgcctttattttccggggagtagatcgtgggatatagtctatctcatttttaatagtttaccgcccctggtatacaaagataatgacaataaatcactgccatataaccttgctttttccagaaacatggctgttttgtattgctgtaaccactaaataggttgcctataccattcctcctgtgaacagtgcagatttacaggttgcatggtctggcttaaggagagccatacttgagacatgtgagtaaactgaactcatattagctgtgctgcatttcagacttaaaatccatttttgtggggcagggtgtggtgtgtaaaggggggtgtttgtaatacaagttgaaggcaaaataaaatgtcctgtctcccagatgatatacatcttattatttttaaagtttattgctaattgtaggaaggtgagttgcaggtatctttgactatggtcatctggggaaggaaaattttacattttactattaatgctccttaagtgtctatggaggttaaagaataaaatggtaaatgtttctgtgcctggtttgatggtaactggttaatagttactcaccattttatgcagagtcacattagttcacaccctttctgagagccttttgggagaagcagttttattctctgagtggaacagagttctttttgttgataatttctagtttgctcccttcgttattgccaactttactggcattttatttaatgatagcagattgggaaaatggcaaatttaggttacggaggtaaatgagtatatgaaagcaattacctctaaagccagttaacaattattttgtaggtggggtacactcagcttaaagtaatgcatttttttttcccgtaaaggcagaatccatcttgttgcagatagctatctaaataatctcatatcctcttttgcaaagactacagagaataggctatgacaatcttgttcaagcctttccatttttttccctgataactaagtaatttctttgaacataccaagaagtatgtaaaaagtccatggccttattcatccacaaagtggcatcctaggcccagccttatccctagcagttgtcccagtgctgctaggttgcttatcttgtttatctggaatcactgtggagtgaaattttccacatcatccagaattgccttatttaagaagtaaaacgttttaatttttagcctttttttggtggagttatttaatatgtatatcagaggatatactagatggtaacatttctttctgtgcttggctatctttgtggacttcaggggcttctaaaacagacaggactgtgttgcctttactaaatggtctgagacagctatggttttgaatttttagttttttttttttaacccacttcccctcctggtctcttccctctctgataattaccattcatatgtgagtgttagtgtgcctccttttagcattttcttcttctctttctgattcttcatttctgactgcctaggcaaggaaaccagataaccaaacttactagaacgttctttaaaacacaagtacaaactctgggacaggacccaagacactttcctgtgaagtgctgaaaaagacctcattgtattggcatttgatatcagtttgatgtagcttagagtgcttcctgattcttgctgagtttcaggtagttgagatagagagaagtgagtcatattcatattttcccccttagaataatattttgaaaggtttcattgcttccacttgaatgctgctcttacaaaaactggggttacaagggttactaaattagcatcagtagccagaggcaataccgttgtctggaggacaccagcaaacaacacacaacaaagcaaaacaaaccttgggaaactaaggccatttgttttgttttggtgtcccctttgaagccctgccttctggccttactcctgtacagatatttttgacctataggtgcctttatgagaattgagggtctgacatcctgccccaaggagtagctaaagtaattgctagtgttttcagggattttaacatcagactggaatgaatgaatgaaactttttgtcctttttttttctgtttttttttttctaatgtagtaaggactaaggaaaacctttggtgaagacaatcatttctctctgttgatgtggatacttttcacaccgtttatttaaatgctttctcaataggtccagagccagtgttcttgttcaacctgaaagtaatggctctgggttgggccagacagttgcactctctagtttgccctctgccacaaatttgatgtgtgacctttgggcaagtcatttatcttctctgggccttagttgcctcatctgtaaaatgagggagttggagtagattaattattccagctctgaaattctaagtgaccttggctaccttgcagcagttttggatttcttccttatctttgttctgctgtttgagggggctttttacttatttccatgttattcaaaggagactaggcttgatattttattactgttcttttatggacaaaaggttacatagtatgcccttaagacttaattttaaccaaaggcctagcaccaccttaggggctgcaataaacacttaacgcgcgtgcgcacgcgcgcgcgcacacacacacacacacacacacacacacacaggtcagagtttaaggctttcgagtcatgacattctagcttttgaattgcgtgcacacacacacgcacgcacacactctggtcagagtttattaaggctttcgagtcatgacattatagcttttgagttggtgtgtgtgacaccaccctcctaagtggtgtgtgcttgtaattttttttttcagtgaaaatggattgaaaacctgttgttaatgcttagtgatattatgctcaaaacaaggaaattcccttgaaccgtgtcaattaaactggtttatatgactcaagaaaacaataccagtagatgattattaactttattcttggctctttttaggtccattttgattaagtgacttttggctggatcattcagagctctcttctagcctacccttggatgagtacaattaatgaaattcatattttcaaggacctgggagccttccttggggctgggttgagggtggggggttggggagtcctggtagaggccagctttgtggtagctggagaggaagggatgaaaccagctgctgttgcaaaggctgcttgtcattgatagaaggactcacgggcttggattgattaagactaaacatggagttggcaaactttcttcaagtattgagttctgttcaatgcattggacatgtgatttaagggaaaagtgtgaatgcttatagatgatgaaaacctggtgggctgcagagcccagtttagaagaagtgagttgggggttggggacagatttggtggtggtatttcccaactgtttcctcccctaaattcagaggaatgcagctatgccagaagccagagaagagccactcgtagcttctgctttggggacaactggtcagttgaaagtcccaggagttcctttgtggctttctgtatacttttgcctggttaaagtctgtggctaaaaaatagtcgaacctttcttgagaactctgtaacaaagtatgtttttgattaaaagagaaagccaact

SEQ ID NO: 28297 - DNA, 8365 bp, Homo sapiens
  source 1..8365: mol_type = unassigned DNA
ggttatcctgaatacatgtctaacaattttccttgcaacgttagctgttgtttttcactgtttccaaaggatcaaaattgcttcagaaattggagacatatttgatttaaaaggaaaaacttgaacaaatggacaatatgtctattacgaatacaccaacaagtaatgatgcctgtctgagcattgtgcatagtttgatgtgccatagacaaggtggagagagtgaaacatttgcaaaaagagcaattgaaagtttggtaaagaagctgaaggagaaaaaagatgaattggattctttaataacagctataactacaaatggagctcatcctagtaaatgtgttaccatacagagaacattggatgggaggcttcaggtggctggtcggaaaggatttcctcatgtgatctatgcccgtctctggaggtggcctgatcttcacaaaaatgaactaaaacatgttaaatattgtcagtatgcgtttgacttaaaatgtgatagtgtctgtgtgaatccatatcactacgaacgagttgtatcacctggaattgatctctcaggattaacactgcagagtaatgctccatcaagtatgatggtgaaggatgaatatgtgcatgactttgagggacagccatcgttgtccactgaaggacattcaattcaaaccatccagcatccaccaagtaatcgtgcatcgacagagacatacagcaccccagctctgttagccccatctgagtctaatgctaccagcactgccaactttcccaacattcctgtggcttccacaagtcagcctgccagtatactggggggcagccatagtgaaggactgttgcagatagcatcagggcctcagccaggacagcagcagaatggatttactggtcagccagctacttaccatcataacagcactaccacctggactggaagtaggactgcaccatacacacctaatttgcctcaccaccaaaacggccatcttcagcaccacccgcctatgccgccccatcccggacattactggcctgttcacaatgagcttgcattccagcctcccatttccaatcatcctgctcctgagtattggtgttccattgcttactttgaaatggatgttcaggtaggagagacatttaaggttccttcaagctgccctattgttactgttgatggatacgtggacccttctggaggagatcgcttttgtttgggtcaactctccaatgtccacaggacagaagccattgagagagcaaggttgcacataggcaaaggtgtgcagttggaatgtaaaggtgaaggtgatgtttgggtcaggtgccttagtgaccacgcggtctttgtacagagttactacttagacagagaagctgggcgtgcacctggagatgctgttcataagatctacccaagtgcatatataaaggtctttgatttgcgtcagtgtcatcgacagatgcagcagcaggcggctactgcacaagctgcagcagctgcccaggcagcagccgtggcaggaaacatccctggcccaggatcagtaggtggaatagctccagctatcagtctgtcagctgctgctggaattggtgttgatgaccttcgtcgcttatgcatactcaggatgagttttgtgaaaggctggggaccggattacccaagacagagcatcaaagaaacaccttgctggattgaaattcacttacaccgggccctccagctcctagacgaagtacttcataccatgccgattgcagacccacaacctttagactgaggtcttttaccgttggggcccttaaccttatcaggatggtggactacaaaatacaatcctgtttataatctgaagatatatttcacttttgttctgctttatcttttcataaagggttgaaaatgtgtttgctgccttgctcctagcagacagaaactggattaaaacaattttttttttcctcttcagaacttgtcaggcatggctcagagcttgaagattaggagaaacacattcttattaattcttcacctgttatgtatgaaggaatcattccagtgctagaaaatttagccctttaaaacgtcttagagccttttatctgcagaacatcgatatgtatatcattctacagaataatccagtattgctgattttaaaggcagagaagttctcaaagttaattcacctatgttattttgtgtacaagttgttattgttgaacatacttcaaaaataatgtgccatgtgggtgagttaattttaccaagagtaactttactctgtgtttaaaaagtaagttaataatgtattgtaatctttcatccaaaatattttttgcaagttatattagtgaagatggtttcaattcagattgtcttgcaacttcagttttatttttgccaaggcaaaaaactcttaatctgtgtgtatattgagaatcccttaaaattaccagacaaaaaaatttaaaattacgtttgttattcctagtggatgactgttgatgaagtatacttttcccctgttaaacagtagttgtattcttctgtatttctaggcacaaggttggttgctaagaagcctataagaggaatttcttttccttcattcatagggaaaggttttgtattttttaaaacactaaaagcagcgtcactctacctaatgtctcactgttctgcaaaggtggcaatgcttaaactaaataatgaataaactgaatattttggaaactgctaaattctatgttaaatactgtgcagaataatggaaacattacagttcataataggtagtttggatatttttgtacttgatttgatgtgactttttttggtataatgtttaaatcatgtatgttatgatattgtttaaaattcagtttttgtatcttggggcaagactgcaaacttttttatatcttttggttattctaagccctttgccatcaatgatcatatcaattggcagtgactttgtatagagaatttaagtagaaaagttgcagatgtattgactgtaccacagacacaatatgtatgctttttacctagctggtagcataaataaaactgaatctcaacatacaaagttgaattctaggtttgatttttaagattttttttttcttttgcacttttgagtccaatctcagtgatgaggtaccttctactaaatgacaggcaacagccagttctattgggcagctttgtttttttccctcacactctaccgggacttccccatggacattgtgtatcatgtgtagagttggttttttttttttttaatttttattttactatagcagaaatagacctgattatctacaagatgataaatagattgtctacaggataaatagtatgaaataaaatcaaggattatctttcagatgtgtttacttttgcctggagaacttttagctatagaaacacttgtgtgatgatagtcctccttatatcacctggaatgaacacagcttctactgccttgctcagaaggtcttttaaatagaccatcctagaaaccactgagtttgcttatttctgtgatttaaacatagatcttgatccaagctacatgacttttgtctttaaataacttatctaccacctcatttgtactcttgattacttacaaattctttcagtaaacacctaattttcttctgtaaaagtttggtgatttaagttttattggcagttttataaaaagacatcttctctagaaattgctaactttaggtccattttactgtgaatgaggaataggagtgagttttagaataacagatttttaaaaatccagatgatttgattaaaaccttaatcatacattgacataattcattgcttcttttttttgagatatggagtcttgctgtgttgcccaggcaggagtgcagtggtatgatctcagctcactgcaacctctgcctcccgggttcaactgattctcctgcctcagcctccctggtagctaggattacaggtgcccgccaccatgcctggctaacttttgtagttttagtagagacggggttttgcctgttggccaggctggtcttgaactcctgacctcaagtgatccatccaccttggcctcccaaagtgctgggattacgggcgtgagccactgtccctggcctcattgttcccttttctactttaaggaaagttttcatgtttaatcatctggggaaagtatgtgaaaaatatttgttaagaagtatctctttggagccaagccacctgtcttggtttctttctactaagagccataaagtatagaaatacttctagttgttaagtgcttatatttgtacctagatttagtcacacgcttttgagaaaacatctagtatgttatgatcagctattcctgagagcttggttgttaatctatatttctatttcttagtggtagtcatctttgatgaataagactaaagattctcacaggtttaaaattttatgtctactttaagggtaaaattatgaggttatggttctgggtgggttttctctagctaattcatatctcaaagagtctcaaaatgttgaatttcagtgcaagctgaatgagagatgagccatgtacacccaccgtaagacctcattccatgtttgtccagtgcctttcagtgcattatcaaagggaatccttcatggtgttgcctttattttccggggagtagatcgtgggatatagtctatctcatttttaatagtttaccgcccctggtatacaaagataatgacaataaatcactgccatataaccttgctttttccagaaacatggctgttttgtattgctgtaaccactaaataggttgcctataccattcctcctgtgaacagtgcagatttacaggttgcatggtctggcttaaggagagccatacttgagacatgtgagtaaactgaactcatattagctgtgctgcatttcagacttaaaatccatttttgtggggcagggtgtggtgtgtaaaggggggtgtttgtaatacaagttgaaggcaaaataaaatgtcctgtctcccagatgatatacatcttattatttttaaagtttattgctaattgtaggaaggtgagttgcaggtatctttgactatggtcatctggggaaggaaaattttacattttactattaatgctccttaagtgtctatggaggttaaagaataaaatggtaaatgtttctgtgcctggtttgatggtaactggttaatagttactcaccattttatgcagagtcacattagttcacaccctttctgagagccttttgggagaagcagttttattctctgagtggaacagagttctttttgttgataatttctagtttgctcccttcgttattgccaactttactggcattttatttaatgatagcagattgggaaaatggcaaatttaggttacggaggtaaatgagtatatgaaagcaattacctctaaagccagttaacaattattttgtaggtggggtacactcagcttaaagtaatgcatttttttttcccgtaaaggcagaatccatcttgttgcagatagctatctaaataatctcatatcctcttttgcaaagactacagagaataggctatgacaatcttgttcaagcctttccatttttttccctgataactaagtaatttctttgaacataccaagaagtatgtaaaaagtccatggccttattcatccacaaagtggcatcctaggcccagccttatccctagcagttgtcccagtgctgctaggttgcttatcttgtttatctggaatcactgtggagtgaaattttccacatcatccagaattgccttatttaagaagtaaaacgttttaatttttagcctttttttggtggagttatttaatatgtatatcagaggatatactagatggtaacatttctttctgtgcttggctatctttgtggacttcaggggcttctaaaacagacaggactgtgttgcctttactaaatggtctgagacagctatggttttgaatttttagttttttttttttaacccacttcccctcctggtctcttccctctctgataattaccattcatatgtgagtgttagtgtgcctccttttagcattttcttcttctctttctgattcttcatttctgactgcctaggcaaggaaaccagataaccaaacttactagaacgttctttaaaacacaagtacaaactctgggacaggacccaagacactttcctgtgaagtgctgaaaaagacctcattgtattggcatttgatatcagtttgatgtagcttagagtgcttcctgattcttgctgagtttcaggtagttgagatagagagaagtgagtcatattcatattttcccccttagaataatattttgaaaggtttcattgcttccacttgaatgctgctcttacaaaaactggggttacaagggttactaaattagcatcagtagccagaggcaataccgttgtctggaggacaccagcaaacaacacacaacaaagcaaaacaaaccttgggaaactaaggccatttgttttgttttggtgtcccctttgaagccctgccttctggccttactcctgtacagatatttttgacctataggtgcctttatgagaattgagggtctgacatcctgccccaaggagtagctaaagtaattgctagtgttttcagggattttaacatcagactggaatgaatgaatgaaactttttgtcctttttttttctgtttttttttttctaatgtagtaaggactaaggaaaacctttggtgaagacaatcatttctctctgttgatgtggatacttttcacaccgtttatttaaatgctttctcaataggtccagagccagtgttcttgttcaacctgaaagtaatggctctgggttgggccagacagttgcactctctagtttgccctctgccacaaatttgatgtgtgacctttgggcaagtcatttatcttctctgggccttagttgcctcatctgtaaaatgagggagttggagtagattaattattccagctctgaaattctaagtgaccttggctaccttgcagcagttttggatttcttccttatctttgttctgctgtttgagggggctttttacttatttccatgttattcaaaggagactaggcttgatattttattactgttcttttatggacaaaaggttacatagtatgcccttaagacttaattttaaccaaaggcctagcaccaccttaggggctgcaataaacacttaacgcgcgtgcgcacgcgcgcgcgcacacacacacacacacacacacacacacacaggtcagagtttaaggctttcgagtcatgacattctagcttttgaattgcgtgcacacacacacgcacgcacacactctggtcagagtttattaaggctttcgagtcatgacattatagcttttgagttggtgtgtgtgacaccaccctcctaagtggtgtgtgcttgtaattttttttttcagtgaaaatggattgaaaacctgttgttaatgcttagtgatattatgctcaaaacaaggaaattcccttgaaccgtgtcaattaaactggtttatatgactcaagaaaacaataccagtagatgattattaactttattcttggctctttttaggtccattttgattaagtgacttttggctggatcattcagagctctcttctagcctacccttggatgagtacaattaatgaaattcatattttcaaggacctgggagccttccttggggctgggttgagggtggggggttggggagtcctggtagaggccagctttgtggtagctggagaggaagggatgaaaccagctgctgttgcaaaggctgcttgtcattgatagaaggactcacgggcttggattgattaagactaaacatggagttggcaaactttcttcaagtattgagttctgttcaatgcattggacatgtgatttaagggaaaagtgtgaatgcttatagatgatgaaaacctggtgggctgcagagcccagtttagaagaagtgagttgggggttggggacagatttggtggtggtatttcccaactgtttcctcccctaaattcagaggaatgcagctatgccagaagccagagaagagccactcgtagcttctgctttggggacaactggtcagttgaaagtcccaggagttcctttgtggctttctgtatacttttgcctggttaaagtctgtggctaaaaaatagtcgaacctttcttgagaactctgtaacaaagtatgtttttgattaaaagagaaagccaactaaatca

SEQ ID NO: 28298 - DNA, 1207 bp, Homo sapiens
  source 1..1207: mol_type = unassigned DNA
gtagccccgcggacagctgggccagggtgcgggcctgcgcctccctcggctcctggcgcgggcctcggggagaggggtggaagatgtctatggatgtgacattcctggggacgggtgcagcatacccatctccaacccggggtgcctctgctgtggtccttcggtgtgaaggcgagtgctggctctttgactgtggggagggaacacagacacagcttatgaaaagccaacttaaagcaggttatcctgaatacatgtctaacaattttccttgcaacgttagctgttgtttttcactgtttccaaaggatcaaaattgcttcagaaattggagacatatttgatttaaaaggaaaaacttgaacaaatggacaatatgtctattacgaatacaccaacaagtaatgatgcctgtctgagcattgtgcatagtttgatgtgccatagacaaggtggagagagtgaaacatttgcaaaaagagcaattgaaagtttggtaaagaagctgaaggagaaaaaagatgaattggattctttaataacagctataactacaaatggagctcatcctagtaaatgtgttaccatacagagaacattggatgggaggcttcaggtggctggtcggaaaggatttcctcatgtgatctatgcccgtctctggaggtggcctgatcttcacaaaaatgaactaaaacatgttaaatattgtcagtatgcgtttgacttaaaatgtgatagtgtctgtgtgaatccatatcactacgaacgagttgtatcacctggaattgatctctcaggattaacactgcagagtaatgaaaacaactggtatttctcacagctccttctagatttggacaaaggaatgatacaagagcaggcaatacatggtccataaatcaaaatactataaaaaggtatacagtgaaaagaagtgctcccacccctgcccccattcccccctacctcagctccatcaagtatgatggtgaaggatgaatatgtgcatgactttgagggacagccatcgttgtccactgaaggacattcaattcaaaccatccagcatccaccaagtaatcgtgcatcgacagagacatacagcaccccagctctgttagccccatctgagtctaatgctaccagcactgccaactttcccaacattcctgtggcttccacaagtcagcctgccagtatactg

SEQ ID NO: 28299 - DNA, 3199 bp, Homo sapiens
  source 1..3199: mol_type = unassigned DNA
caacaacacggccctggtcgtcgtcgccgctgcggtaacggagcggtttgggtggcggagcctgcgttcgcgccttcccactcccctcgccaccgcccgagcccaggttatcctgaatacatgtctaacaattttccttgcaacgttagctgttgtttttcactgtttccaaaggatcaaaattgcttcagaaattggagacatatttgatttaaaaggaaaaacttgaacaaatggacaatatgtctattacgaatacaccaacaagtaatgatgcctgtctgagcattgtgcatagtttgatgtgccatagacaaggtggagagagtgaaacatttgcaaaaagagcaattgaaagtttggtaaagaagctgaaggagaaaaaagatgaattggattctttaataacagctataactacaaatggagctcatcctagtaaatgtgttaccatacagagaacattggatgggaggcttcaggtggctggtcggaaaggatttcctcatgtgatctatgcccgtctctggaggtggcctgatcttcacaaaaatgaactaaaacatgttaaatattgtcagtatgcgtttgacttaaaatgtgatagtgtctgtgtgaatccatatcactacgaacgagttgtatcacctggaattgatctctcaggattaacactgcagagtaatgctccatcaagtatgatggtgaaggatgaatatgtgcatgactttgagggacagccatcgttgtccactgaaggacattcaattcaaaccatccagcatccaccaagtaatcgtgcatcgacagagacatacagcaccccagctctgttagccccatctgagtctaatgctaccagcactgccaactttcccaacattcctgtggcttccacaagtcagcctgccagtatactggggggcagccatagtgaaggactgttgcagatagcatcagggcctcagccaggacagcagcagaatggatttactggtcagccagctacttaccatcataacagcactaccacctggactggaagtaggactgcaccatacacacctaatttgcctcaccaccaaaacggccatcttcagcaccacccgcctatgccgccccatcccggacattactggcctgttcacaatgagcttgcattccagcctcccatttccaatcatcctgctcctgagtattggtgttccattgcttactttgaaatggatgttcaggtaggagagacatttaaggttccttcaagctgccctattgttactgttgatggatacgtggacccttctggaggagatcgcttttgtttgggtcaactctccaatgtccacaggacagaagccattgagagagcaaggttgcacataggcaaaggtgtgcagttggaatgtaaaggtgaaggtgatgtttgggtcaggtgccttagtgaccacgcggtctttgtacagagttactacttagacagagaagctgggcgtgcacctggagatgctgttcataagatctacccaagtgcatatataaaggtctttgatttgcgtcagtgtcatcgacagatgcagcagcaggcggctactgcacaagctgcagcagctgcccaggcagcagccgtggcaggaaacatccctggcccaggatcagtaggtggaatagctccagctatcagtctgtcagctgctgctggaattggtgttgatgaccttcgtcgcttatgcatactcaggatgagttttgtgaaaggctggggaccggattacccaagacagagcatcaaagaaacaccttgctggattgaaattcacttacaccgggccctccagctcctagacgaagtacttcataccatgccgattgcagacccacaacctttagactgaggtcttttaccgttggggcccttaaccttatcaggatggtggactacaaaatacaatcctgtttataatctgaagatatatttcacttttgttctgctttatcttttcataaagggttgaaaatgtgtttgctgccttgctcctagcagacagaaactggattaaaacaattttttttttcctcttcagaacttgtcaggcatggctcagagcttgaagattaggagaaacacattcttattaattcttcacctgttatgtatgaaggaatcattccagtgctagaaaatttagccctttaaaacgtcttagagccttttatctgcagaacatcgatatgtatatcattctacagaataatccagtattgctgattttaaaggcagagaagttctcaaagttaattcacctatgttattttgtgtacaagttgttattgttgaacatacttcaaaaataatgtgccatgtgggtgagttaattttaccaagagtaactttactctgtgtttaaaaagtaagttaataatgtattgtaatctttcatccaaaatattttttgcaagttatattagtgaagatggtttcaattcagattgtcttgcaacttcagttttatttttgccaaggcaaaaaactcttaatctgtgtgtatattgagaatcccttaaaattaccagacaaaaaaatttaaaattacgtttgttattcctagtggatgactgttgatgaagtatacttttcccctgttaaacagtagttgtattcttctgtatttctaggcacaaggttggttgctaagaagcctataagaggaatttcttttccttcattcatagggaaaggttttgtattttttaaaacactaaaagcagcgtcactctacctaatgtctcactgttctgcaaaggtggcaatgcttaaactaaataatgaataaactgaatattttggaaactgctaaattctatgttaaatactgtgcagaataatggaaacattacagttcataataggtagtttggatatttttgtacttgatttgatgtgactttttttggtataatgtttaaatcatgtatgttatgatattgtttaaaattcagtttttgtatcttggggcaagactgcaaacttttttatatcttttggttattctaagccctttgccatcaatgatcatatcaattggcagtgactttgtatagagaatttaagtagaaaagttgcagatgtattgactgtaccacagacacaatatgtatgctttttacctagctggtagcataaataaaactgaatctcaac

SEQ ID NO: 28300 - DNA, 548 bp, Homo sapiens
  source 1..548: mol_type = unassigned DNA
agtagccaaaacagatttttggttgcagaactcgggcgaggatacttggggtatttggacgtttgccggcttcccaacagaatgttccggttctggtggtgatggcattggagaatggggcttaggcaagcctgtaggacttgacccaatgaaagaagcatatggcacttgtgaagataaatgttactcctccctttttaattggaacttctgcttaggacctgtgtatgacgtttcacctgtgatctgttctttcggtagccactgactttgagttacaggaaggtctccgaagatttgtgtcaaatgacgtcaatggccagcttgttttcttttactagtccagcagtaaagcgattgttgggctggaaacaaggtgatgaggaggagaaatgggcagaaaaggcagttgatgctttggtgaagaaactaaaaaagaaaaagggtgccatggaggaactggagaaagccttgagcagtccaggacagccgagtaaatgtgtcactattcccagatctttagatggacgcctgcaggtttctcacag

SEQ ID NO: 28301 - DNA, 669 bp, Homo sapiens
  source 1..669: mol_type = unassigned DNA
ccgggtcctgggcgagcgggcgccgtgcgcgtgtcccgcggccgagctgctaataaagttgcagcgaggagaagcgcagcgacggcgtcgggagagcgcgcctagccggctcgcgagacttgacccaatgaaagaagcatatggcacttgtgaagataaatgttactcctccctttttaattggaacttctgcttaggacctgtgtatgacgtttcacctgtgatctgttctttcggtagccactgactttgagttacaggaaggtctccgaagatttgtgtcaaatgacgtcaatggccagcttgttttcttttactagtccagcagtaaagcgattgttgggctggaaacaaggtgatgaggaggagaaatgggcagaaaaggcagttgatgctttggtgaagaaactaaaaaagaaaaagggtgccatggaggaactggagaaagccttgagcagtccaggacagccgagtaaatgtgtcactattcccagatctttagatggacgcctgcaggtttctcacagaaaaggcttaccccatgttatatattgtcgtgtttggcgctggccggatttgcagagtcatcatgagctaaagccgttggatatttgtgaatttccttttggatctaagcaaaaagaagtttgtatcaacccataccactat

SEQ ID NO: 28302 - DNA, 854 bp, Homo sapiens
  source 1..854: mol_type = unassigned DNA
tgataggactgcggtgctcggccgggcagcctgggctgctgcactgcgaagctgtccaatggcttgatgaatccgtgccgccgtcgctttgtgtttcaaagataaggatccgcgcttatcggtgggaattacactctgggcagttgtgaccggctactgcaatcagctggtagttagacctggtttctgccacttgccatgtcagttttcaccactgcaaggatttcttctacttcatgtaaacttctctgtgctgcaaagagaatgccaaagcagcgtctttttgccttcaccatattcagccgctggccgggtcctatacttcaatatcagggctcaaattaatattccagtctcttcccctccccttttcccctctcctcctttcagctgctgttactacgtggagtttggagcctaagctttgaaaactcccatgtggcgcgcccgtcttaagtctgagcatgctcagtagccaaaacagatttttggttgcagaactcgggcgaggatacttggggtatttggacgtttgccggcttcccaacagaatgttccggttctggtggtgatggcattggagaatggggcttaggcaagcctgtagaaaggaagctgttgaagttattgaagtacctgttgctatattctaagaaattaaaatgtccagaaatctgcctctgacttgacccaatgaaagaagcatatggcacttgtgaagataaatgttactcctccctttttaattggaacttctgcttaggacctgtgtatgacgtttcacctgtgatctgttctttcggtagccactgactttgagttacaggaaggtctccgaagatttgtgtcaaatg

SEQ ID NO: 28303 - DNA, 847 bp, Homo sapiens
  source 1..847: mol_type = unassigned DNA
ccgggtcctgggcgagcgggcgccgtgcgcgtgtcccgcggccgagctgctaataaagttgcagcgaggagaagcgcagcgacggcgtcgggagagcgcgcctagccggctcgcgaaaaggaagctgttgaagttattgaagtacctgttgctatattctaagaaattaaaatgtccagaaatctgcctctaaatgggatctcactatgttgctcagactggacgtgattgaactcctgggctcaagtgagtctcccgaataactgggattacaggacttgacccaatgaaagaagcatatggcacttgtgaagataaatgttactcctccctttttaattggaacttctgcttaggacctgtgtatgacgtttcacctgtgatctgttctttcggtagccactgactttgagttacaggaaggtctccgaagatttgtgtcaaatgacgtcaatggccagcttgttttcttttactagtccagcagtaaagcgattgttgggctggaaacaaggtgatgaggaggagaaatgggcagaaaaggcagttgatgctttggtgaagaaactaaaaaagaaaaagggtgccatggaggaactggagaaagccttgagcagtccaggacagccgagtaaatgtgtcactattcccagatctttagatggacgcctgcaggtttctcacagaaaaggcttaccccatgttatatattgtcgtgtttggcgctggccggatttgcagagtcatcatgagctaaagccgttggatatttgtgaatttccttttggatctaagcaaaaagaagtttgtatcaacccataccactataagagagtggagagtccag

SEQ ID NO: 28304 - DNA, 368 bp, Homo sapiens
  source 1..368: mol_type = unassigned DNA
tgataggactgcggtgctcggccgggcagcctgggctgctgcactgcgaagctgtccaatggcttgatgaatccgtgccgccgtcgctttgtgtttcaaagataaggatccgcgcttatcgaaaggaagctgttgaagttattgaagtacctgttgctatattctaagaaattaaaatgtccagaaatctgcctctgacttgacccaatgaaagaagcatatggcacttgtgaagataaatgttactcctccctttttaattggaacttctgcttaggacctgtgtatgacgtttcacctgtgatctgttctttcggtagccactgactttgagttacaggaaggtctccgaagatttgtgtcaaatg

SEQ ID NO: 28305 - DNA, 7009 bp, Homo sapiens
  source 1..7009: mol_type = unassigned DNA
ccgggtcctgggcgagcgggcgccgtgcgcgtgtcccgcggccgagctgctaataaagttgcagcgaggagaagcgcagcgacggcgtcgggagagcgcgcctagccggctcgcgaaaaggaagctgttgaagttattgaagtacctgttgctatattctaagaaattaaaatgtccagaaatctgcctctgacttgacccaatgaaagaagcatatggcacttgtgaagataaatgttactcctccctttttaattggaacttctgcttaggacctgtgtatgacgtttcacctgtgatctgttctttcggtagccactgactttgagttacaggaaggtctccgaagatttgtgtcaaatgacgtcaatggccagcttgttttcttttactagtccagcagtaaagcgattgttgggctggaaacaaggtgatgaggaggagaaatgggcagaaaaggcagttgatgctttggtgaagaaactaaaaaagaaaaagggtgccatggaggaactggagaaagccttgagcagtccaggacagccgagtaaatgtgtcactattcccagatctttagatggacgcctgcaggtttctcacagaaaaggcttaccccatgttatatattgtcgtgtttggcgctggccggatttgcagagtcatcatgagctaaagccgttggatatttgtgaatttccttttggatctaagcaaaaagaagtttgtatcaacccataccactataagagagtggagagtccagtcttacctccagtattagtgcctcgtcataatgaattcaatccacaacacagccttctggttcagtttaggaacctgagccacaatgaaccacacatgccacaaaatgccacgtttccagattctttccaccagcccaacaacactccttttcccttatctccaaacagcccttatcccccttctcctgctagcagcacatatcccaactccccagcaagttctggaccaggaagtccatttcagctcccagctgatacgcctcctcctgcctatatgccacctgatgatcagatgggtcaagataattcccagcctatggatacaagcaataatatgattcctcagattatgcccagtatatccagcagggatgttcagcctgttgcctatgaagagcctaaacattggtgttcaatagtctactatgaattaaacaatcgtgttggagaagcttttcatgcatcttctactagtgtgttagtagatggattcacagatccttcaaataacaaaagtagattctgcttgggtttgttgtcaaatgttaatcgtaattcgacaattgaaaacactaggcgacatattggaaaaggtgttcatctgtactatgttggtggagaggtgtatgcggaatgcctcagtgacagcagcatatttgtacagagtaggaactgcaactttcatcatggctttcatcccaccactgtctgtaagattcccagcagctgcagcctcaaaatttttaacaatcaggagtttgctcagcttctggctcaatctgtcaaccatgggtttgaggcagtatatgagctcaccaaaatgtgtaccattcggatgagttttgtcaagggttggggagcagaatatcaccggcaggatgtaaccagcaccccatgttggattgagattcttcatgggcctcttcagtggctggataaagtccttactcagatgggctcccctctgaaccccatatcttctgtttcataatgcagaagtattcttttcaattatattgttagtggacttgttttaattttagagaaactttgagtacagatactgtgagcttacattgaaaacagatattacagcttatttttttctacataattgtgaccaatacatttgtattttgtgatgaatctacatttgtttgtattcatgttcatgtgattaactcttagaagtgttgtaaaagatgcagagtaagtattatgccccagttcagaaatttggcattgatcttaaactggaacatgcttttactttattgccctaacaattttttattaaatttatttgaaaatgcatcacatgatgaaaaattatagtagcttataagagggcatatacagtgaagagtaagttttccctcctactctcgatcttccagaagctgtacttttaccagtttctttgtcccaccaacttaaaaaaaaaaagtacaattcattgttttgcaaaagtgtatggtaggggcttaaaagaaactataaagttttatttgaatgaacactatgcactgctgtaactggtagtgttcagtaaaagcaaaatgatagttttctagatgacataaaatttacatttaatacagataagtgttcttcagtgtaatgtgacttcatgctatatatcttttgtaagacatttccttttttaaaaaaatttttgcaaataactgatctcaagtatatgtcatttactcaaaatctgtcataagcattactttatagctagtgacagtgcatgcacagccttgttcaactatgtttgctgcttttggacaatgttgcaagaactctatttttgacatgcattaatcttttattttgcacttttatgggtgacagtttttagcataacctttgataaaatacactcaagtgacttggacttagatgcttatccttacgtccttggtaccttttttgtattaacaaacactgcaatttatagattacatttgtaggaagttatgcttttttctggtttttgttttactttcaacctaggttataagactgttattctatagctccaacttaaggtgcctttttaattccctacagttttatgggtgttatcagtgctggagaatcatgtagttaatcccattgctcttacaagtgtcagcttacttgtatcagcctccctacgcaaggacctatgcactggagccgtaggaggctcttcagttgggccccaaggataaggctactgatttgatactaaatgaatcagcagtggatgtagggatagctgattttaaaacactcggctgggcacagtggctcacacctgtaatcccagcactttgggaggctgaggcaggcagatcatgatgtcaggagtttgagaccagcctggccaatatggtgaaaccctgtctctacaaaaaatacaaaaattagctgggcatggtggtgcgtgcctgaagtcccagctactcgggaagctgaggcagaagaatcacttgaacctgggaggcggaggttgtggtgagccgagatcgcaccactgcactccagcctgggcgacagagcgagactctgcctcaaaaaacaaaacaaaacaaaacactcacccatcaacgaatatagactcttctctcatttatcgatgatcctctttttccattttttaagtacttatgtggaagctagtctcccaaaacacaatctttagagagaaaagacatgaacgaactccaaaatatccatttaatcaatcatgtttttggctttggataaagaactttgaaccagtttttttctcaggagctgtcaaatggacacttaattatgacatgagaatgaagaaattattttggaaaaaaaaaatgacctaatttacctatcagtgaaagctttattttctggtgccttttgaaagtatatggagtcatatcattcttctgtttaaaatgttagtttggtttgactttccactttgtcctttctgctcttgtgaagaaaaaaaaaagcattttcgaggaaagaattatgcaatttcttttgttttctgtgtcattatttattgctttttcaatgtgcagccagtggatggttttagttctttcagatgaactgccatttgtgtttcagctcacagttctttgctgggtaaaagaaatactttctgacagtcacctgagccttaaatgtaagtattacatgacatgcattctgtttcttccagagttctgtctgccacacgaaagagaatatttgcttacttgatagaactttggcattttcatcattcttttacttaaccaggcttatggcatgatctctggaacaaatttgtaggaaaaaattactccaattgaatgactgatgtatgtaatcaacttcattgggctgcagtaaactagtggaaattagagagttgttttattggtgttttctactgtgagttaattaaaaattgtttttatttggggtcattatgtcacagtcttgagttaacaagatcttacgtgattggccttttctttgttttctcttaggagttgtgtctcatgaatgacagtactaaagctattaacaactaagagtttgacagagaactataagcctgttgtatctcctaaaagttgtcaactccccacccttggactttaaatgaaaattttattcagtccagctattcttacagtccctaaggattttcatatatctatgtataggagataaaatttgctagtaagatttttaaaaactggctagtgaaaggaaagtacctctgaaagaaaccattttagcaaattatggttatatgttttaatttaatctacagaatgttttatagtaaaattctagcaccactagaataatcacatagcatgtacaatatatttatgctggctgaaaagacagaatctgggaataataaaattgcaaccagtttggtaatgcaaacagcagaatagaatgaaatctcagtaatgaattaaagcaacaaaaagatattgattggcaaaaagcaagatataagagattcatttgcttaacatttctacataatatttatggtctggtcagtattggtctggtcagtattgcctggctgacgtgaaatgtaaactagtaggcgtgttattgatctgctaaaactaaccctctttttaagaggagatttaaggaagacgtcaatcaaaatgtcaaatatgtgtgtcagaatataaataatttttcacattgtattgttgctatataaaaaaaataatagaattggttgggtttctgaggtgaaatccagagtaagagtactagacagttcaacaagccacatctaatggcacagatagaggatgtagctattttatacctttcataacatttgagagtaagatatccttcaggatgtgaagtgattattaagtactcatacctgaaatctgttgtcaagattagaactggggttcatgttaaaaaccttccatattacctgagggtacctgtggggaacagttccttcccctgtgtggtagtattttgttggaagagaatgtttatacaaaaaatgaaattcttccaacagcagagaaactctaaaaagtttgatagtacctatcaaagtgctgtacttctgtgatagagaacatctgatgtaccaatttagatctatttctttatactttttctaatcaattgcttaatagtactttggatgattatcacctttgccacttaaaatatataaatatcctttttacttcatgaggaaggaagaattttttgataattactgagttcagccttttgtgatgacttatattttggacttacattttaactttaaagaatgtcagatcccttctttgtcttactagttaaatcctcacctaatctcttgggtatgaatataaatgtgtgtcatcgttatattgttcagctagatgagcaagtatcttagggtagtaggtagcctggtggttttagaagtgtttggtgatttttatggagagagttttcctaagtggtggtttataggtggtatcagatattattagggcagctttttggggagtaatctcaggtctcccagagcagcagcatttttctcattgatataagtaagattcttaggagcttttcttatcacacaagatgcctgaatcgaatgtgagaattgaaggcatttcttctgcataaacaaagaattctacctgctggacagaaacctggaaagttctttggaattcgctgaattacagtttagtatgtcctgattacagagtgacaatatttatcaagcctttgttatattggattatcttctctcttaaaatacaactgtattataattgaaatgacagcccaaaattggatggtttaccaaaaccaatgaaagggatttcacacatcaatttttatttctgttttgaagagcacatgctatataataattgctagtagcaactgcagtaaaacaggtgataagttattttctctgaaaagatccagtcctagagcaggattcttcgatcattcatggcagagtgaaaaaggtttgtatggttcttgtccaaataactcagttcttaaaattcttaaaatgatcgtaaaccattatcctttaaaggtttatttgaagatgctgttaaagtacagaattttgtgtacaggtagatttttccgtccctcattaatagtgccttcttaattaatacagactggtgttagctataacaaaactccagtaaggccaaagaatcccaagttctttgtggaaaaaaaaaaaaaatcttttagggtcagattttcccttctaatatcattgaagatgatgttgcattgatttattcataaagtattttaactataggaactctagaagataatggttaggcaagtgattttttttttaaatatggttggcgtaagttgtattttgaaattcacttattttaaaatcgaagaggattgtaatcatggaaatagaatgtttgtatctacctgcccacattttcttaaaaagatatttcatatacagataatgaagaccaagctagtggctgcactgtaggtctgctgcttatttgtatttgttgtgcttctgtttatgttgtagaagctgaaattctagcaacatgcttcaattctgttattttgatacttatgaaaatgtattaggttttactatattgtgcttttgaaagccataactcttaagaactttgtttttgcatattgtttgctaattctttactttaataaacctcaaaacctgc

SEQ ID NO: 28306 - DNA, 6934 bp, Homo sapiens
  source 1..6934: mol_type = unassigned DNA
ccgggtcctgggcgagcgggcgccgtgcgcgtgtcccgcggccgagctgctaataaagttgcagcgaggagaagcgcagcgacggcgtcgggagagcgcgcctagccggctcgcgagacttgacccaatgaaagaagcatatggcacttgtgaagataaatgttactcctccctttttaattggaacttctgcttaggacctgtgtatgacgtttcacctgtgatctgttctttcggtagccactgactttgagttacaggaaggtctccgaagatttgtgtcaaatgacgtcaatggccagcttgttttcttttactagtccagcagtaaagcgattgttgggctggaaacaaggtgatgaggaggagaaatgggcagaaaaggcagttgatgctttggtgaagaaactaaaaaagaaaaagggtgccatggaggaactggagaaagccttgagcagtccaggacagccgagtaaatgtgtcactattcccagatctttagatggacgcctgcaggtttctcacagaaaaggcttaccccatgttatatattgtcgtgtttggcgctggccggatttgcagagtcatcatgagctaaagccgttggatatttgtgaatttccttttggatctaagcaaaaagaagtttgtatcaacccataccactataagagagtggagagtccagtcttacctccagtattagtgcctcgtcataatgaattcaatccacaacacagccttctggttcagtttaggaacctgagccacaatgaaccacacatgccacaaaatgccacgtttccagattctttccaccagcccaacaacactccttttcccttatctccaaacagcccttatcccccttctcctgctagcagcacatatcccaactccccagcaagttctggaccaggaagtccatttcagctcccagctgatacgcctcctcctgcctatatgccacctgatgatcagatgggtcaagataattcccagcctatggatacaagcaataatatgattcctcagattatgcccagtatatccagcagggatgttcagcctgttgcctatgaagagcctaaacattggtgttcaatagtctactatgaattaaacaatcgtgttggagaagcttttcatgcatcttctactagtgtgttagtagatggattcacagatccttcaaataacaaaagtagattctgcttgggtttgttgtcaaatgttaatcgtaattcgacaattgaaaacactaggcgacatattggaaaaggtgttcatctgtactatgttggtggagaggtgtatgcggaatgcctcagtgacagcagcatatttgtacagagtaggaactgcaactttcatcatggctttcatcccaccactgtctgtaagattcccagcagctgcagcctcaaaatttttaacaatcaggagtttgctcagcttctggctcaatctgtcaaccatgggtttgaggcagtatatgagctcaccaaaatgtgtaccattcggatgagttttgtcaagggttggggagcagaatatcaccggcaggatgtaaccagcaccccatgttggattgagattcttcatgggcctcttcagtggctggataaagtccttactcagatgggctcccctctgaaccccatatcttctgtttcataatgcagaagtattcttttcaattatattgttagtggacttgttttaattttagagaaactttgagtacagatactgtgagcttacattgaaaacagatattacagcttatttttttctacataattgtgaccaatacatttgtattttgtgatgaatctacatttgtttgtattcatgttcatgtgattaactcttagaagtgttgtaaaagatgcagagtaagtattatgccccagttcagaaatttggcattgatcttaaactggaacatgcttttactttattgccctaacaattttttattaaatttatttgaaaatgcatcacatgatgaaaaattatagtagcttataagagggcatatacagtgaagagtaagttttccctcctactctcgatcttccagaagctgtacttttaccagtttctttgtcccaccaacttaaaaaaaaaaagtacaattcattgttttgcaaaagtgtatggtaggggcttaaaagaaactataaagttttatttgaatgaacactatgcactgctgtaactggtagtgttcagtaaaagcaaaatgatagttttctagatgacataaaatttacatttaatacagataagtgttcttcagtgtaatgtgacttcatgctatatatcttttgtaagacatttccttttttaaaaaaatttttgcaaataactgatctcaagtatatgtcatttactcaaaatctgtcataagcattactttatagctagtgacagtgcatgcacagccttgttcaactatgtttgctgcttttggacaatgttgcaagaactctatttttgacatgcattaatcttttattttgcacttttatgggtgacagtttttagcataacctttgataaaatacactcaagtgacttggacttagatgcttatccttacgtccttggtaccttttttgtattaacaaacactgcaatttatagattacatttgtaggaagttatgcttttttctggtttttgttttactttcaacctaggttataagactgttattctatagctccaacttaaggtgcctttttaattccctacagttttatgggtgttatcagtgctggagaatcatgtagttaatcccattgctcttacaagtgtcagcttacttgtatcagcctccctacgcaaggacctatgcactggagccgtaggaggctcttcagttgggccccaaggataaggctactgatttgatactaaatgaatcagcagtggatgtagggatagctgattttaaaacactcggctgggcacagtggctcacacctgtaatcccagcactttgggaggctgaggcaggcagatcatgatgtcaggagtttgagaccagcctggccaatatggtgaaaccctgtctctacaaaaaatacaaaaattagctgggcatggtggtgcgtgcctgaagtcccagctactcgggaagctgaggcagaagaatcacttgaacctgggaggcggaggttgtggtgagccgagatcgcaccactgcactccagcctgggcgacagagcgagactctgcctcaaaaaacaaaacaaaacaaaacactcacccatcaacgaatatagactcttctctcatttatcgatgatcctctttttccattttttaagtacttatgtggaagctagtctcccaaaacacaatctttagagagaaaagacatgaacgaactccaaaatatccatttaatcaatcatgtttttggctttggataaagaactttgaaccagtttttttctcaggagctgtcaaatggacacttaattatgacatgagaatgaagaaattattttggaaaaaaaaaatgacctaatttacctatcagtgaaagctttattttctggtgccttttgaaagtatatggagtcatatcattcttctgtttaaaatgttagtttggtttgactttccactttgtcctttctgctcttgtgaagaaaaaaaaaagcattttcgaggaaagaattatgcaatttcttttgttttctgtgtcattatttattgctttttcaatgtgcagccagtggatggttttagttctttcagatgaactgccatttgtgtttcagctcacagttctttgctgggtaaaagaaatactttctgacagtcacctgagccttaaatgtaagtattacatgacatgcattctgtttcttccagagttctgtctgccacacgaaagagaatatttgcttacttgatagaactttggcattttcatcattcttttacttaaccaggcttatggcatgatctctggaacaaatttgtaggaaaaaattactccaattgaatgactgatgtatgtaatcaacttcattgggctgcagtaaactagtggaaattagagagttgttttattggtgttttctactgtgagttaattaaaaattgtttttatttggggtcattatgtcacagtcttgagttaacaagatcttacgtgattggccttttctttgttttctcttaggagttgtgtctcatgaatgacagtactaaagctattaacaactaagagtttgacagagaactataagcctgttgtatctcctaaaagttgtcaactccccacccttggactttaaatgaaaattttattcagtccagctattcttacagtccctaaggattttcatatatctatgtataggagataaaatttgctagtaagatttttaaaaactggctagtgaaaggaaagtacctctgaaagaaaccattttagcaaattatggttatatgttttaatttaatctacagaatgttttatagtaaaattctagcaccactagaataatcacatagcatgtacaatatatttatgctggctgaaaagacagaatctgggaataataaaattgcaaccagtttggtaatgcaaacagcagaatagaatgaaatctcagtaatgaattaaagcaacaaaaagatattgattggcaaaaagcaagatataagagattcatttgcttaacatttctacataatatttatggtctggtcagtattggtctggtcagtattgcctggctgacgtgaaatgtaaactagtaggcgtgttattgatctgctaaaactaaccctctttttaagaggagatttaaggaagacgtcaatcaaaatgtcaaatatgtgtgtcagaatataaataatttttcacattgtattgttgctatataaaaaaaataatagaattggttgggtttctgaggtgaaatccagagtaagagtactagacagttcaacaagccacatctaatggcacagatagaggatgtagctattttatacctttcataacatttgagagtaagatatccttcaggatgtgaagtgattattaagtactcatacctgaaatctgttgtcaagattagaactggggttcatgttaaaaaccttccatattacctgagggtacctgtggggaacagttccttcccctgtgtggtagtattttgttggaagagaatgtttatacaaaaaatgaaattcttccaacagcagagaaactctaaaaagtttgatagtacctatcaaagtgctgtacttctgtgatagagaacatctgatgtaccaatttagatctatttctttatactttttctaatcaattgcttaatagtactttggatgattatcacctttgccacttaaaatatataaatatcctttttacttcatgaggaaggaagaattttttgataattactgagttcagccttttgtgatgacttatattttggacttacattttaactttaaagaatgtcagatcccttctttgtcttactagttaaatcctcacctaatctcttgggtatgaatataaatgtgtgtcatcgttatattgttcagctagatgagcaagtatcttagggtagtaggtagcctggtggttttagaagtgtttggtgatttttatggagagagttttcctaagtggtggtttataggtggtatcagatattattagggcagctttttggggagtaatctcaggtctcccagagcagcagcatttttctcattgatataagtaagattcttaggagcttttcttatcacacaagatgcctgaatcgaatgtgagaattgaaggcatttcttctgcataaacaaagaattctacctgctggacagaaacctggaaagttctttggaattcgctgaattacagtttagtatgtcctgattacagagtgacaatatttatcaagcctttgttatattggattatcttctctcttaaaatacaactgtattataattgaaatgacagcccaaaattggatggtttaccaaaaccaatgaaagggatttcacacatcaatttttatttctgttttgaagagcacatgctatataataattgctagtagcaactgcagtaaaacaggtgataagttattttctctgaaaagatccagtcctagagcaggattcttcgatcattcatggcagagtgaaaaaggtttgtatggttcttgtccaaataactcagttcttaaaattcttaaaatgatcgtaaaccattatcctttaaaggtttatttgaagatgctgttaaagtacagaattttgtgtacaggtagatttttccgtccctcattaatagtgccttcttaattaatacagactggtgttagctataacaaaactccagtaaggccaaagaatcccaagttctttgtggaaaaaaaaaaaaaatcttttagggtcagattttcccttctaatatcattgaagatgatgttgcattgatttattcataaagtattttaactataggaactctagaagataatggttaggcaagtgattttttttttaaatatggttggcgtaagttgtattttgaaattcacttattttaaaatcgaagaggattgtaatcatggaaatagaatgtttgtatctacctgcccacattttcttaaaaagatatttcatatacagataatgaagaccaagctagtggctgcactgtaggtctgctgcttatttgtatttgttgtgcttctgtttatgttgtagaagctgaaattctagcaacatgcttcaattctgttattttgatacttatgaaaatgtattaggttttactatattgtgcttttgaaagccataactcttaagaactttgtttttgcatattgtttgctaattctttactttaataaacctcaaaacctgc

SEQ ID NO: 28307 - DNA, 2883 bp, Homo sapiens
  source 1..2883: mol_type = unassigned DNA
ggagcgatcgagggagctgagccgagagaaagagccgccgggcgctgcctcgccagacctcgctgggaccccggggccaccgggaggcacttttgtggaggggggagggggggcgacctcggcagcctcggcgcacgaagcgtccgagggcagcgtggggcgggctgcgacctctgcatcggtggactgcatttttaattaaggattcccagcagctctttgggatttttacagcttccactcatgtgttgacacccgcgtccaggagaaactcgctccaagtgcatctagcgcctgggacctgagacggcgttggcctttcgtgcatgcaaatccagggatttaggttttgtttgggatttccttttctttctttccttttttttttctttttgcagggagtaagaagggagctgggggtatcaacaagcctgcctttcggatcctgcgggaaaagcccatgtagttaagcgctttggtttaaaaaaaaggcaaggtaaaggcagggctttccagacacatttaggggttcgcgcgagcgctttgtgctcatggaccagccgcacaacttttgaaggctcgccggcccatgtggggtctttctggcggcgcgccgcctgcagcccccctaaagcgcgggggctggagttgttgagcagccccgccgctgtggtccatgtagccgctggccgcgcgcggactgcggctcggcgtgcgcgtgttcccggccgtcccgcctcggcgagctccctcatgttgtcgccctgcggcgccccttcgacgacaggctgtgcgcggtctgcacggcgctccgcggcggagcttcatgtggggctgcgacccgcgcagccggcgcctcgctgagggaacggacccccggtaaccggagaccgcctcccccccacccctggcgccaaaggatatcgtatgttcaggtccaaacgctcggggctggtgcggcgactttggcgaagtcgtgtggtccccgaccgggaggaaggcggcagcggcggcggcggtggcggcgacgaggatgggagcttgggcagccgagctgagccggccccgcgggcaagagagggcggaggctgcggccgctccgaagtccgcccggtagccccgcggcggccccgggacgcagtgggacagcgaggcgcccagggcgcggggaggcgccggcgcgcagggggccccccgaggcccatgtcggagccaggggccggcgctgggagctccctgctggacgtggcggagccgggaggcccgggctggctgcccgagagtgactgcgagacggtgacctgctgtctcttttcggagcgggacgccgccggcgcgccccgggacgccagcgaccccctggccggggcggccctggagccggcgggcggcgggcggagtcgcgaagcgcgctcgcggctgctgctgctggagcaggaactcaaaaccgtcacgtactcgctgctgaagcggctcaaggagcgctcgctggacacgctgctggaggcggtggagtcccgcggcggcgtgccgggcggctgcgtgctggtgccgcgcgccgacctccgcctgggcggccagcccgcgccgccgcagctgctgctcggccgcctctttcgctggcccgacctgcagcacgccgtggagctgaagcccctgtgcggctgccacagcttcgccgccgccgccgacggccctaccgtgtgctgcaacccctaccacttcagccggctctgcgggcccgaatctccgccacctccctactctcggctgtctcctcgcgacgagtacaagccactggatctgtccgattccacattgtcttacactgaaacggaggctaccaactccctcatcactgctccgggtgaattctcagacgccagcatgtctccggacgccaccaagccgagccactggtgcagcgtggcgtactgggagcaccggacgcgcgtgggccgcctctatgcggtgtacgaccaggccgtcagcatcttctacgacctacctcagggcagcggcttctgcctgggccagctcaacctggagcagcgcagcgagtcggtgcggcgaacgcgcagcaagatcggcttcggcatcctgctcagcaaggagcccgacggcgtgtgggcctacaaccgcggcgagcaccccatcttcgtcaactccccgacgctggacgcgcccggcggccgcgccctggtcgtgcgcaaggtgccccccggctactccatcaaggtgttcgacttcgagcgctcgggcctgcagcacgcgcccgagcccgacgccgccgacggcccctacgaccccaacagcgtccgcatcagcttcgccaagggctgggggccctgctactcccggcagttcatcacctcctgcccctgctggctggagatcctcctcaacaaccccagatagtggcggccccggcgggaggggcgggtgggaggccgcggccaccgccacctgccggcctcgagaggggccgatgcccagagacacagcccccacggacaaaaccccccagatatcatctacctagatttaatataaagttttatatattatatggaaatatatattatacttgtaattatggagtcatttttacaatgtaattatttatgtatggtgcaatgtgtgtatatggacaaaacaagaaagacgcactttggcttataattctttcaatacagatatattttctttctcttcctccttcctcttccttactttttatatatatatataaagaaaatgatacagcagagctaggtggaaaagcctgggtttggtgtatggtttttgagatattaatgcccagacaaaaagctaataccagtcactcgataataaagtattcgcattatagttttttttaaa

SEQ ID NO: 28308 - DNA, 1283 bp, Homo sapiens
  source 1..1283: mol_type = unassigned DNA
aaaagaacgaagtccagcaccaaaacgtgctacaacatggatgaacttcgatgactttgtgccacatgaaagaagaagccagccacaaaaggccatatattgtatgaaatgaaatgtccagaatgggcaaacccatagagacacaaaaatctccgccacctccctactctcggctgtctcctcgcgacgagtacaagccactggatctgtccgattccacattgtcttacactgaaacggaggctaccaactccctcatcactgctccgggtgaattctcagacgccagcatgtctccggacgccaccaagccgagccactggtgcagcgtggcgtactgggagcaccggacgcgcgtgggccgcctctatgcggtgtacgaccaggccgtcagcatcttctacgacctacctcagggcagcggcttctgcctgggccagctcaacctggagcagcgcagcgagtcggtgcggcgaacgcgcagcaagatcggcttcggcatcctgctcagcaaggagcccgacggcgtgtgggcctacaaccgcggcgagcaccccatcttcgtcaactccccgacgctggacgcgcccggcggccgcgccctggtcgtgcgcaaggtgccccccggctactccatcaaggtgttcgacttcgagcgctcgggcctgcagcacgcgcccgagcccgacgccgccgacggcccctacgaccccaacagcgtccgcatcagcttcgccaagggctgggggccctgctactcccggcagttcatcacctcctgcccctgctggctggagatcctcctcaacaaccccagatagtggcggccccggcgggaggggcgggtgggaggccgcggccaccgccacctgccggcctcgagaggggccgatgcccagagacacagcccccacggacaaaaccccccagatatcatctacctagatttaatataaagttttatatattatatggaaatatatattatacttgtaattatggagtcatttttacaatgtaattatttatgtatggtgcaatgtgtgtatatggacaaaacaagaaagacgcactttggcttataattctttcaatacagatatattttctttctcttcctccttcctcttccttactttttatatatatatataaagaaaatgatacagcagagctaggtggaaaagcctgggtttggtgtatggtttttgagatattaatgcccagacaaaaagctaataccagtcactcgataataaagtattcgcattatagtttttttt

SEQ ID NO: 28309 - DNA, 1940 bp, Homo sapiens
  source 1..1940: mol_type = unassigned DNA
cgatcgagggagctgagccgagagaaagagccgccgggcgctgcctcgccagacctcgctgggaccccggggccaccgggaggcacttttgtggaggggggagggggggcgacctcggcagcctcggcgcacgaagcgtccgagggcagcgtggggcgggctgcgacctctgcatcggtggactgcatttttaattaaggattcccagcagctctttgggatttttacagcttccactcatgtgttgacacccgcgtccaggagaaactcgctccaagtgcatctagcgcctgggacctgagacggcgttggcctttcgtgcatgcaaatccagggatttaggttttgtttgggatttccttttctttctttccttttttttttctttttgcagggagtaagaagggagctgggggtatcaacaagcctgcctttcggatcctgcgggaaaagcccatgtagttaagcgctttggtttaaaaaaaaggcaaggtaaaggcagggctttccagacacatttaggggttcgcgcgagcgctttgtgctcatggaccagccgcacaacttttgaaggctcgccggcccatgtggggtctttctggcggcgcgccgcctgcagcccccctaaagcgcgggggctggagttgttgagcagccccgccgctgtggtccatgtagccgctggccgcgcgcggactgcggctcggcgtgcgcgtgttcccggccgtcccgcctcggcgagctccctcatgttgtcgccctgcggcgccccttcgacgacaggctgtgcgcggtctgcacggcgctccgcggcggagcttcatgtggggctgcgacccgcgcagccggcgcctcgctgagggaacggacccccggtaaccggagaccgcctcccccccacccctggcgccaaaggatatcgtatgttcaggtccaaacgctcggggctggtgcggcgactttggcgaagtcgtgtggtccccgaccgggaggaaggcggcagcggcggcggcggtggcggcgacgaggatgggagcttgggcagccgagctgagccggccccgcgggcaagagagggcggaggctgcggccgctccgaagtccgcccggtagccccgcggcggccccgggacgcagtgggacagcgaggcgcccagggcgcggggaggcgccggcgcgcagggggccccccgaggcccatgtcggagccaggggccggcgctgggagctccctgctggacgtggcggagccgggaggcccgggctggctgcccgagagtgactgcgagacggtgacctgctgtctcttttcggagcgggacgccgccggcgcgccccgggacgccagcgaccccctggccggggcggccctggagccggcgggcggcgggcggagtcgcgaagcgcgctcgcggctgctgctgctggagcaggaactcaaaaccgtcacgtactcgctgctgaagcggctcaaggagcgctcgctggacacgctgctggaggcggtggagtcccgcggcggcgtgccgggcggctgcgtgctggtgccgcgcgccgacctccgcctgggcggccagcccgcgccgccgcagctgctgctcggccgcctctttcgctggcccgacctgcagcacgccgtggagctgaagcccctgtgcggctgccacagcttcgccgccgccgccgacggccctaccgtgtgctgcaacccctaccacttcagccggctctgcgggcccgaatctccgccacctccctactctcggctgtctcctcgcgacgagtacaagccactggatctgtccgattccacattgtcttacactgaaacggaggctaccaactccctcatcactgctccgggtgaattctcagcagcagatgctgggataggaagccgagggaaccgtggtttggagtcctctgtcccctgcagttag

SEQ ID NO: 28310 - DNA, 5447 bp, Homo sapiens
  source 1..5447: mol_type = unassigned DNA
agtctgactgacgccggctggggccgccgccgccgccgccgccgccgccgctgctgcagccgctgtctcggtccccgccgccgccgccgggccctgcaggcgctgggcgcgcgcagccaggcaagttggccaccctgttcaagggcttaggagaaagtcaacacacttcgcaacttgaattggtcccagctgctcccagaagaacgggcgggttggtccctatgccacccctggagagctactcgccgcccactttgccgtgaagggctgtgcggttcccgtgcgcgccggagcctgctgtggcctcttatgcactccaccacccccatcagctccctcttctccttcaccagccccgcagtgaagagactgctaggctggaagcaaggagatgaagaggaaaagtgggcagagaaggcagtggactctctagtgaagaagttaaagaagaagaagggagccatggacgagctggagagggctctcagctgcccggggcagcccagcaaatgcgtcacgattccccgctccctggacgggcggctgcaggtgtcccaccgcaagggcctgccccatgtgatttactgtcgcgtgtggcgctggccggatctgcagtcccaccacgagctgaagccgctggagtgctgtgagttcccatttggctccaagcagaaagaagtgtgcattaacccttaccactaccgccgggtggagactccagtactgcctcctgtgctcgtgccaagacacagtgaatataacccccagctcagcctcctggccaagttccgcagcgcctccctgcacagtgagccactcatgccacacaacgccacctatcctgactctttccagcagcctccgtgctctgcactccctccctcacccagccacgcgttctcccagtccccgtgcacggccagctaccctcactccccaggaagtccttctgagccagagagtccctatcaacactcagactttcgaccagtttgttacgaggagccccagcactggtgctcggtcgcctactatgaactgaacaaccgagttggggagacattccaggcttcctcccgaagtgtgctcatagatgggttcaccgacccttcaaataacaggaacagattctgtcttggacttctttctaatgtaaacagaaactcaacgatagaaaataccaggagacatataggaaagggtgtgcacttgtactacgtcgggggagaggtgtatgccgagtgcgtgagtgacagcagcatctttgtgcagagccggaactgcaactatcaacacggcttccacccagctaccgtctgcaagatccccagcggctgcagcctcaaggtcttcaacaaccagctcttcgctcagctcctggcccagtcagttcaccacggctttgaagtcgtgtatgaactgaccaagatgtgtactatccggatgagttttgttaagggttggggtgctgagtatcatcgccaggatgtcaccagcaccccctgctggattgagattcatcttcatgggccactgcagtggctggacaaagttctgactcagatgggctctccacataaccccatttcttcagtgtcttaacagtcatgtcttaagctgcatttccataggatagaggctattgcagggagtggcttgtatcatttcagatttgcaactgaagtttctaaaaacatgtgtaaatacatagaatgtatactgttcttattttttttaatcaccgtttgttttgtgctttctagttaacctgatgccagtacagtgcaattggaaaagcaggactttggtgcctgtgctataagcagcagattttgtgggaggaaacacttgagaggcgatattgtcaacagtatttgaagggtgttagcagaataaaagacagctttagtcagccgtgtcattataaagcatgttgtgtggcctcacagaaacattgaaactgtttatacagcaaaagtcaggtattagcagcactaaagcaaatatcactcagatgaaacaaagcagtgaaacccctacagtttaaatgatgtcacttttagtgctgttggcaagaaaaaaaaaacaacaaacttgtacaatgaattaatgagataggccatagaaactttatttctaaggttgacatacctatagctgggctcctgtgctcatattcagtggtacattttaaacaaactgtgatcggaaaagaaaaaaaactgtgaagccaaaagtcatgttccctcagtctaccactgtaaaaacagagtctaatatgggaaaataaatatgaaaatagcatgaaatgctgtttcccagattgcaagataagaccagaacttggtccaagagccagccacccagggagactcctgctttccacagaggagaccaggttcctgtcgtgctggttgttcgtgtcaggcagtcctgcaaactttgagtctgcgcagcgtgccagaatagcttgtgtttcagtcctgtgtcaagaagcaggtgaaaccaaaggttggagaaaagcatcacacgtcgacttacactttctcatttcccacgttccagtctcctgggaagggcactctttcgccacgttttcctgcctcttggcaaatattaactctttgcagatcactaaagcaacagtaaagactttgagaaaatctagacacattattggatcaatgagttatttaacctagtgtctagtgattatctaacctggaaataaattcccaaggaaagtgataataatttcataatcatctgcaatttctggggaacagtggtactgaataataagacatcttttaaaaatatacacaatattaaaaacctgttcttattttactttagatgagggaggaaaatcccccaaatttctaggtactttcatatatatacttgccatgcactaaacactgcattgcttggaaaaatatttcacaccctctttaaaaatgtacaatttaagatggcagttatgcttgtaacagacagcacttcagtaatccaagaagtttcttcatttatacattttatctcaactctttctagcattagtgcacatggtagtttttctaattaaattgtattcaaggtagaaatgatcatgtgagaaagatatatgattgagctactactgtcacctcttacagttactagtgttagctaatagaaactttcatatatacacatagaaaagaattattacattttacattgaaaaatgtaatatatggcccatgtagtgtatagaaaaatctgtagtttattggttcatcaactatgtattgtgcacctacctatgggtgtcaggtacaatgttaggtactgtagaatcaaatgtaaataagagacagtcccagccctcagggagccgagaacctaatagtgaatctgtttgtacagacatcttcatgtttcagaacttttaaaacaaaacaaaataatgtaatctatcatcttttgcttgaaagaatgtgattgatttcttatctctgttttgaaattatttccttactcttctgcaaagtcaggtaatggattccttgtataaatgctacttttcttccatgtctcaaagttgttttttttcctcccctttcttccctgttttccaataattctccatgtccccttttcttagaaaaggcattaatatggtgaatcttgtatgggaaccattccatgggagaacttcaacacagtttttgctccagagatcaaacatagctttcgtgatctctctaccagctatctaacttatcctctggtaatctttttttttttttttttttttttgagatggagtctcgctgtgtcaccaggccagagtgcagtggcgtgatcttggctcactgcaacctctgcctcccgggttcgagtgattctcctgcctcagcctcccaagtagttgggactacaggctaccacgcccagctaatttttatatttttagtagagacggggtttcaccatggtagccagaatggtctctatctcttgaccttgtgatccgcccgcctcagcctcccaaagtgctgggattacaggcgtgagccactgcgcccggcttcctctggtaatcttacacctttacagaattaatctaaactggtggctcataaatgacattaaaaacaaaaaaaaaatctggatgcagtggctcattcctatagtcccagcactttgggaggccaaggcgggaggatcatctgagcccaggagtttggggctgtagtgaactatgatcatacaacttcattctagcctgggtgacaaagtgacaccctgtctctaaacaaaaatcaagaaacaaaaaacttgtatttccctgcagctttgggaagccagaacacaatattgcagtgaatctgaattttctgtgacaaataaattattaaattggcacatatgatcatcaccagtcatgtctcatcaaaagcctttattatgatgcttgtacattttgaagaatttagaattaatgagaagttaaccctttagtcattgtaacacaatcatattttaatcagctttttcttttgctaccaagagtttcaaaaaataaatgcagtatttgatttcaggctgctaaatgggctcatttagcattcattccttgatgtagacattaaaaaaaaaactgaatagcattctttccaggataactaataaagcagacatgctaagcctataaatacatcagcactgcagcacacgtttaaggttgccacggacaaggatcacacaatagagaacactgtagtaacatttcggtctgctcacaagacccagaacattgatcagtttttgttgttggtttattatttttctgttaaaaaattgtgaaaagtttgttttagctagatgatattttaatagctgcgagtgctttggaactataaagatgtcactacttaacacatataccttatgttttgttttgttttgttttacactcagtataaatcaggagaagttagccaaccatctagcatttagaatcctcttttttattgtcttctaaggatatggatgttcccataacagcaacaaaacagcaacaaaaacatttcataaatatcacttgatagactgtaagcacctgcttaactttgtgtcccaaatatttagtgtgtatatatatatatatatatacacacacacacacatatatattcaacaaataaagcaaaatataacatgcatttcacattttgtctttccctgttacgattttaatagcagaactgtatgacaagtttaggtgatcctagcatatgttaaattcaaattaatgtaaaacagattaacaacaacaaagaaactgtctatttgagtgaagtcatgctttctattataataacttggcttcggttatccatcaaatgcacacttatactgttatctgattgtttataataaagaatactgtacttata

SEQ ID NO: 28311 - DNA, 5592 bp, Homo sapiens
  source 1..5592: mol_type = unassigned DNA
cgcactaatacgggcgatgaggcttcgcggctccagtctgactgacgccggctggggccgccgccgccgccgccgccgccgccgctgctgcagccgctgtctcggtccccgccgccgccgccgggccctgcaggcgctgggcgcgcgcagccaggcaagttggccaccctgttcaagggcttaggagaaagtcaacacacttcgcaacttgaattggtcccagctgctcccagaagaacgggcgggttggtccctatgccacccctggagagctactcgccgcccactttgccgtgaagggctgtgcggttcccgtgcgcgccggagcctgctgtggcctcttatgcactccaccacccccatcagctccctcttctccttcaccagccccgcagtgaagagactgctaggctggaagcaaggagatgaagaggaaaagtgggcagagaaggcagtggactctctagtgaagaagttaaagaagaagaagggagccatggacgagctggagagggctctcagctgcccggggcagcccagcaaatgcgtcacgattccccgctccctggacgggcggctgcaggtgtcccaccgcaagggcctgccccatgtgatttactgtcgcgtgtggcgctggccggatctgcagtcccaccacgagctgaagccgctggagtgctgtgagttcccatttggctccaagcagaaagaagtgtgcattaacccttaccactaccgccgggtggagactccagtactgcctcctgtgctcgtgccaagacacagtgaatataacccccagctcagcctcctggccaagttccgcagcgcctccctgcacagtgagccactcatgccacacaacgccacctatcctgactctttccagcagcctccgtgctctgcactccctccctcacccagccacgcgttctcccagtccccgtgcacggccagctaccctcactccccaggaagtccttctgagccagagagtccctatcaacactcagttgacacaccacccctgccttatcatgccacagaagcctctgagacccagagtggccaacctgtagatgccacagctgatagacatgtagtgctatcgataccaaatggagactttcgaccagtttgttacgaggagccccagcactggtgctcggtcgcctactatgaactgaacaaccgagttggggagacattccaggcttcctcccgaagtgtgctcatagatgggttcaccgacccttcaaataacaggaacagattctgtcttggacttctttctaatgtaaacagaaactcaacgatagaaaataccaggagacatataggaaagggtgtgcacttgtactacgtcgggggagaggtgtatgccgagtgcgtgagtgacagcagcatctttgtgcagagccggaactgcaactatcaacacggcttccacccagctaccgtctgcaagatccccagcggctgcagcctcaaggtcttcaacaaccagctcttcgctcagctcctggcccagtcagttcaccacggctttgaagtcgtgtatgaactgaccaagatgtgtactatccggatgagttttgttaagggttggggtgctgagtatcatcgccaggatgtcaccagcaccccctgctggattgagattcatcttcatgggccactgcagtggctggacaaagttctgactcagatgggctctccacataaccccatttcttcagtgtcttaacagtcatgtcttaagctgcatttccataggatagaggctattgcagggagtggcttgtatcatttcagatttgcaactgaagtttctaaaaacatgtgtaaatacatagaatgtatactgttcttattttttttaatcaccgtttgttttgtgctttctagttaacctgatgccagtacagtgcaattggaaaagcaggactttggtgcctgtgctataagcagcagattttgtgggaggaaacacttgagaggcgatattgtcaacagtatttgaagggtgttagcagaataaaagacagctttagtcagccgtgtcattataaagcatgttgtgtggcctcacagaaacattgaaactgtttatacagcaaaagtcaggtattagcagcactaaagcaaatatcactcagatgaaacaaagcagtgaaacccctacagtttaaatgatgtcacttttagtgctgttggcaagaaaaaaaaaacaacaaacttgtacaatgaattaatgagataggccatagaaactttatttctaaggttgacatacctatagctgggctcctgtgctcatattcagtggtacattttaaacaaactgtgatcggaaaagaaaaaaaactgtgaagccaaaagtcatgttccctcagtctaccactgtaaaaacagagtctaatatgggaaaataaatatgaaaatagcatgaaatgctgtttcccagattgcaagataagaccagaacttggtccaagagccagccacccagggagactcctgctttccacagaggagaccaggttcctgtcgtgctggttgttcgtgtcaggcagtcctgcaaactttgagtctgcgcagcgtgccagaatagcttgtgtttcagtcctgtgtcaagaagcaggtgaaaccaaaggttggagaaaagcatcacacgtcgacttacactttctcatttcccacgttccagtctcctgggaagggcactctttcgccacgttttcctgcctcttggcaaatattaactctttgcagatcactaaagcaacagtaaagactttgagaaaatctagacacattattggatcaatgagttatttaacctagtgtctagtgattatctaacctggaaataaattcccaaggaaagtgataataatttcataatcatctgcaatttctggggaacagtggtactgaataataagacatcttttaaaaatatacacaatattaaaaacctgttcttattttactttagatgagggaggaaaatcccccaaatttctaggtactttcatatatatacttgccatgcactaaacactgcattgcttggaaaaatatttcacaccctctttaaaaatgtacaatttaagatggcagttatgcttgtaacagacagcacttcagtaatccaagaagtttcttcatttatacattttatctcaactctttctagcattagtgcacatggtagtttttctaattaaattgtattcaaggtagaaatgatcatgtgagaaagatatatgattgagctactactgtcacctcttacagttactagtgttagctaatagaaactttcatatatacacatagaaaagaattattacattttacattgaaaaatgtaatatatggcccatgtagtgtatagaaaaatctgtagtttattggttcatcaactatgtattgtgcacctacctatgggtgtcaggtacaatgttaggtactgtagaatcaaatgtaaataagagacagtcccagccctcagggagccgagaacctaatagtgaatctgtttgtacagacatcttcatgtttcagaacttttaaaacaaaacaaaataatgtaatctatcatcttttgcttgaaagaatgtgattgatttcttatctctgttttgaaattatttccttactcttctgcaaagtcaggtaatggattccttgtataaatgctacttttcttccatgtctcaaagttgttttttttcctcccctttcttccctgttttccaataattctccatgtccccttttcttagaaaaggcattaatatggtgaatcttgtatgggaaccattccatgggagaacttcaacacagtttttgctccagagatcaaacatagctttcgtgatctctctaccagctatctaacttatcctctggtaatctttttttttttttttttttttttgagatggagtctcgctgtgtcaccaggccagagtgcagtggcgtgatcttggctcactgcaacctctgcctcccgggttcgagtgattctcctgcctcagcctcccaagtagttgggactacaggctaccacgcccagctaatttttatatttttagtagagacggggtttcaccatggtagccagaatggtctctatctcttgaccttgtgatccgcccgcctcagcctcccaaagtgctgggattacaggcgtgagccactgcgcccggcttcctctggtaatcttacacctttacagaattaatctaaactggtggctcataaatgacattaaaaacaaaaaaaaaatctggatgcagtggctcattcctatagtcccagcactttgggaggccaaggcgggaggatcatctgagcccaggagtttggggctgtagtgaactatgatcatacaacttcattctagcctgggtgacaaagtgacaccctgtctctaaacaaaaatcaagaaacaaaaaacttgtatttccctgcagctttgggaagccagaacacaatattgcagtgaatctgaattttctgtgacaaataaattattaaattggcacatatgatcatcaccagtcatgtctcatcaaaagcctttattatgatgcttgtacattttgaagaatttagaattaatgagaagttaaccctttagtcattgtaacacaatcatattttaatcagctttttcttttgctaccaagagtttcaaaaaataaatgcagtatttgatttcaggctgctaaatgggctcatttagcattcattccttgatgtagacattaaaaaaaaaactgaatagcattctttccaggataactaataaagcagacatgctaagcctataaatacatcagcactgcagcacacgtttaaggttgccacggacaaggatcacacaatagagaacactgtagtaacatttcggtctgctcacaagacccagaacattgatcagtttttgttgttggtttattatttttctgttaaaaaattgtgaaaagtttgttttagctagatgatattttaatagctgcgagtgctttggaactataaagatgtcactacttaacacatataccttatgttttgttttgttttgttttacactcagtataaatcaggagaagttagccaaccatctagcatttagaatcctcttttttattgtcttctaaggatatggatgttcccataacagcaacaaaacagcaacaaaaacatttcataaatatcacttgatagactgtaagcacctgcttaactttgtgtcccaaatatttagtgtgtatatatatatatatatatacacacacacacacatatatattcaacaaataaagcaaaatataacatgcatttcacattttgtctttccctgttacgattttaatagcagaactgtatgacaagtttaggtgatcctagcatatgttaaattcaaattaatgtaaaacagattaacaacaacaaagaaactgtctatttgagtgaagtcatgctttctattataataacttggcttcggttatccatcaaatgcacacttatactgttatctgattgtttataataaagaatactgtacttata

SEQ ID NO: 28312 - DNA, 5389 bp, Homo sapiens
  source 1..5389: mol_type = unassigned DNA
gcaacttgaattggtcccagctgctcccagaagaacgggcgggttggtccctatgccacccctggagagctactcgccgcccactttgccgtgaagggctgtgcggttcccgtgcgcgccggagcctgctgtggcctcttatgcactccaccacccccatcagctccctcttctccttcaccagccccgcagtgaagagactgctaggctggaagcaaggagatgaagaggaaaagtgggcagagaaggcagtggactctctagtgaagaagttaaagaagaagaagggagccatggacgagctggagagggctctcagctgcccggggcagcccagcaaatgcgtcacgattccccgctccctggacgggcggctgcaggtgtcccaccgcaagggcctgccccatgtgatttactgtcgcgtgtggcgctggccggatctgcagtcccaccacgagctgaagccgctggagtgctgtgagttcccatttggctccaagcagaaagaagtgtgcattaacccttaccactaccgccgggtggagactccagtactgcctcctgtgctcgtgccaagacacagtgaatataacccccagctcagcctcctggccaagttccgcagcgcctccctgcacagtgagccactcatgccacacaacgccacctatcctgactctttccagcagcctccgtgctctgcactccctccctcacccagccacgcgttctcccagtccccgtgcacggccagctaccctcactccccaggaagtccttctgagccagagagtccctatcaacactcagttgacacaccacccctgccttatcatgccacagaagcctctgagacccagagtggccaacctgtagatgccacagctgatagacatgtagtgctatcgataccaaatggagactttcgaccagtttgttacgaggagccccagcactggtgctcggtcgcctactatgaactgaacaaccgagttggggagacattccaggcttcctcccgaagtgtgctcatagatgggttcaccgacccttcaaataacaggaacagattctgtcttggacttctttctaatgtaaacagaaactcaacgatagaaaataccaggagacatataggaaagggtgtgcacttgtactacgtcgggggagaggtgtatgccgagtgcgtgagtgacagcagcatctttgtgcagagccggaactgcaactatcaacacggcttccacccagctaccgtctgcaagatccccagcggctgcagcctcaaggtcttcaacaaccagctcttcgctcagctcctggcccagtcagttcaccacggctttgaagtcgtgtatgaactgaccaagatgtgtactatccggatgagttttgttaagggttggggtgctgagtatcatcgccaggatgtcaccagcaccccctgctggattgagattcatcttcatgggccactgcagtggctggacaaagttctgactcagatgggctctccacataaccccatttcttcagtgtcttaacagtcatgtcttaagctgcatttccataggatagaggctattgcagggagtggcttgtatcatttcagatttgcaactgaagtttctaaaaacatgtgtaaatacatagaatgtatactgttcttattttttttaatcaccgtttgttttgtgctttctagttaacctgatgccagtacagtgcaattggaaaagcaggactttggtgcctgtgctataagcagcagattttgtgggaggaaacacttgagaggcgatattgtcaacagtatttgaagggtgttagcagaataaaagacagctttagtcagccgtgtcattataaagcatgttgtgtggcctcacagaaacattgaaactgtttatacagcaaaagtcaggtattagcagcactaaagcaaatatcactcagatgaaacaaagcagtgaaacccctacagtttaaatgatgtcacttttagtgctgttggcaagaaaaaaaaaacaacaaacttgtacaatgaattaatgagataggccatagaaactttatttctaaggttgacatacctatagctgggctcctgtgctcatattcagtggtacattttaaacaaactgtgatcggaaaagaaaaaaaactgtgaagccaaaagtcatgttccctcagtctaccactgtaaaaacagagtctaatatgggaaaataaatatgaaaatagcatgaaatgctgtttcccagattgcaagataagaccagaacttggtccaagagccagccacccagggagactcctgctttccacagaggagaccaggttcctgtcgtgctggttgttcgtgtcaggcagtcctgcaaactttgagtctgcgcagcgtgccagaatagcttgtgtttcagtcctgtgtcaagaagcaggtgaaaccaaaggttggagaaaagcatcacacgtcgacttacactttctcatttcccacgttccagtctcctgggaagggcactctttcgccacgttttcctgcctcttggcaaatattaactctttgcagatcactaaagcaacagtaaagactttgagaaaatctagacacattattggatcaatgagttatttaacctagtgtctagtgattatctaacctggaaataaattcccaaggaaagtgataataatttcataatcatctgcaatttctggggaacagtggtactgaataataagacatcttttaaaaatatacacaatattaaaaacctgttcttattttactttagatgagggaggaaaatcccccaaatttctaggtactttcatatatatacttgccatgcactaaacactgcattgcttggaaaaatatttcacaccctctttaaaaatgtacaatttaagatggcagttatgcttgtaacagacagcacttcagtaatccaagaagtttcttcatttatacattttatctcaactctttctagcattagtgcacatggtagtttttctaattaaattgtattcaaggtagaaatgatcatgtgagaaagatatatgattgagctactactgtcacctcttacagttactagtgttagctaatagaaactttcatatatacacatagaaaagaattattacattttacattgaaaaatgtaatatatggcccatgtagtgtatagaaaaatctgtagtttattggttcatcaactatgtattgtgcacctacctatgggtgtcaggtacaatgttaggtactgtagaatcaaatgtaaataagagacagtcccagccctcagggagccgagaacctaatagtgaatctgtttgtacagacatcttcatgtttcagaacttttaaaacaaaacaaaataatgtaatctatcatcttttgcttgaaagaatgtgattgatttcttatctctgttttgaaattatttccttactcttctgcaaagtcaggtaatggattccttgtataaatgctacttttcttccatgtctcaaagttgttttttttcctcccctttcttccctgttttccaataattctccatgtccccttttcttagaaaaggcattaatatggtgaatcttgtatgggaaccattccatgggagaacttcaacacagtttttgctccagagatcaaacatagctttcgtgatctctctaccagctatctaacttatcctctggtaatctttttttttttttttttttttttgagatggagtctcgctgtgtcaccaggccagagtgcagtggcgtgatcttggctcactgcaacctctgcctcccgggttcgagtgattctcctgcctcagcctcccaagtagttgggactacaggctaccacgcccagctaatttttatatttttagtagagacggggtttcaccatggtagccagaatggtctctatctcttgaccttgtgatccgcccgcctcagcctcccaaagtgctgggattacaggcgtgagccactgcgcccggcttcctctggtaatcttacacctttacagaattaatctaaactggtggctcataaatgacattaaaaacaaaaaaaaaatctggatgcagtggctcattcctatagtcccagcactttgggaggccaaggcgggaggatcatctgagcccaggagtttggggctgtagtgaactatgatcatacaacttcattctagcctgggtgacaaagtgacaccctgtctctaaacaaaaatcaagaaacaaaaaacttgtatttccctgcagctttgggaagccagaacacaatattgcagtgaatctgaattttctgtgacaaataaattattaaattggcacatatgatcatcaccagtcatgtctcatcaaaagcctttattatgatgcttgtacattttgaagaatttagaattaatgagaagttaaccctttagtcattgtaacacaatcatattttaatcagctttttcttttgctaccaagagtttcaaaaaataaatgcagtatttgatttcaggctgctaaatgggctcatttagcattcattccttgatgtagacattaaaaaaaaaactgaatagcattctttccaggataactaataaagcagacatgctaagcctataaatacatcagcactgcagcacacgtttaaggttgccacggacaaggatcacacaatagagaacactgtagtaacatttcggtctgctcacaagacccagaacattgatcagtttttgttgttggtttattatttttctgttaaaaaattgtgaaaagtttgttttagctagatgatattttaatagctgcgagtgctttggaactataaagatgtcactacttaacacatataccttatgttttgttttgttttgttttacactcagtataaatcaggagaagttagccaaccatctagcatttagaatcctcttttttattgtcttctaaggatatggatgttcccataacagcaacaaaacagcaacaaaaacatttcataaatatcacttgatagactgtaagcacctgcttaactttgtgtcccaaatatttagtgtgtatatatatatatatatatacacacacacacacatatatattcaacaaataaagcaaaatataacatgcatttcacattttgtctttccctgttacgattttaatagcagaactgtatgacaagtttaggtgatcctagcatatgttaaattcaaattaatgtaaaacagattaacaacaacaaagaaactgtctatttgagtgaagtcatgctttctattataataacttggcttcggttatccatcaaatgcacacttatactgttatctgattgtttataataaagaatactgtacttata

SEQ ID NO: 28313 - DNA, 2471 bp, Homo sapiens
  source 1..2471: mol_type = unassigned DNA
gttaaactcgtcatttcctccagctagaggagctcaactgatctgttttctttcgcccagccaaaatcacagaatgaaggcggtgaagagcgaacgggagcgagggagccggcgaagacaccgggacggggacgtggtgctgccggcgggggtggtggtgaagcaggagcgtctcagcccagaagtcgcacctcccgcccaccgccgtccggaccactccggtggtagcccgtctccgccgaccagcgagccggcccgctcgggccaccgcgggaaccgagcccgaggagttagccggtccccacccaaaaagaaaaacaaggcctcagggagaagaagcaagtctcctcgcagtaagagaaaccgaagtcctcaccactcaacagtcaaagtgaagcaggagcgtgaggatcatccccggagaggacgggaggatcggcagcacagggaaccatcagaacaggaacacaggagagctaggaacagtgaccgggacagacaccggggccattcccaccaaaggagaacgtctaacgagaggcctgggagtgggcagggtcagggacgggatcgagacactcagaacctgcaggctcaggaagaagagcgggagttttataatgccaggcgacgggagcatcgccagaggaatgacgttggtggtggcggcagtgagtctcaggagttggttcctcggcctggtggcaacaacaaagaaaaagaggtgcccgctaaagaaaaaccaagctttgaactttctggggcacttcttgaggacaccaacactttccggggtgtagtcattaaatatagtgagcccccagaagcacgtatccccaaaaaacggtggcgtctctacccatttaaaaatgatgaggtgcttccagtcatgtacatacatcgacagagtgcgtacctactgggtcgacaccgccgcattgcagacattccaattgatcacccgtcttgttcaaagcagcatgcggtctttcaatatcggcttgtggaatatacccgtgctgatggcacagttggccgaagagtgaagccctacatcattgaccttggctcaggcaatggaaccttcttaaacaacaaacgtattgagccacagagatactatgaactaaaagaaaaggatgtactcaaatttggattcagtagcagagaatacgtcttgctccatgagtcgtcggacacttctgaaatagacaggaaagatgacgaggatgaggaggaggaggaagaagtgtctgacagctagcaaactaagaacccaaactattgatacacggtttccttcttggaagtctttgattgactcagagagcactatggtggtgggtccagcactatggtgctctctgtaatgcctcttactgccttaagtctttcctctgttgctgaccagattgtgttaccatttgaatacactgactaatgtttgttaaactttttctgtggcaccttggccacatgcctgcaggcatttgttttcagaacagtctcaccaattacaacacaccgtgttttagtagaagtgttgtggttttagttggtgctttcagaactgctgcctaggaaactataaacccttggttaaggggaaatcatggcttgttctctttgtacagttactttatttatataggtgttaagctttgtggaccaggtgtttttcttttggggcgaacccctgagcagagaatcttactaggctttggttatcaccaaaacaacctccagtatataccaaagctttgacttgtttgagctcttgagcttagaagttgattttgcacttatttttttggggggtgggaatgtactgcagtcagtaaacattattgactgtttaacttaaacagatgctttatggcacctgctcaagcccgtgactgtacagaaggatcctggttgctaccagtgggtgctgattcagcatcacaagtgactgaaattggctgtggatctgttctttgtgaaagaattcctgatttctccatggagcatgtacacaacaattttgatcatattaactgtacttcagttttgcatttttattcaaatgttatctctttttttctttgagaaataaactgtcactgatgtgacagcgttctttctttattctaataacatgtatagatctaaagcaggttgtgttgtttacatgtttctacacatttcatcctttaaaaagttgttgagagaggttgtatttaccttcccaaggttggaaagcaggggaatttcccagtgtcctagttttccaccagaggaatatgtgtaagtagcaaagtatttgctgcttacatatagtgtgtatgtatgtatatatgtaaattgtgtgttaaagagctgatactgattttcatatgacaatgttaggcaaaggcctccctgcatttgaagagcaggttttcatttatatgtatttttgggataaaaaaataaaatttgtaaatata

SEQ ID NO: 28314 - DNA, 1412 bp, Homo sapiens
  source 1..1412: mol_type = unassigned DNA
gagttaaactcgtcatttcctccagctagaggagctcaactgatctgttttctttcgcccagccaaaatcacagaatgaaggcggtgaagagcgaacgggagggggtggtggtgaagcaggagcgtctcagcccagaagtcgcacctcccgcccaccgccgtccggaccactccggtggtagcccgtctccgccgaccagcgagccggcccgctcgggccaccgcgggaaccgagcccgaggagttagccggtccccacccaaaaagaaaaacaaggcctcagggagaagaagcaagtctcctcgcagtaagagaaaccgaagtcctcaccactcaacagtcaaagtgaagcaggagcgtgaggatcatccccggagaggacgggaggatcggcagcacagggaaccatcagaacaggaacacaggagagctaggaacagtgaccgggacagacaccggggccattcccaccaaaggagaacgtctaacgagaggcctgggagtgggcagggtcagggacgggatcgagacactcagaacctgcaggctcaggaagaagagcgggagttttataatgccaggcgacgggagcatcgccagaggaatgacgttggtggtggcggcagtgagtctcaggagttggttcctcggcctggtggcaacaacaaagaaaaagaggtgcccgctaaagaaaaaccaagctttgaactttctggggcacttcttgaggacaccaacactttccggggtgtagtcattaaatatagtgagcccccagaagcacgtatccccaaaaaacggtggcgtctctacccatttaaaaatgatgaggtgcttccagtcatgtacatacatcgacagagtgcgtacctactgggtcgacaccgccgcattgcagacattccaattgatcacccgtcttgttcaaagcagcatgcggtctttcaatatcggcttgtggaatatacccgtgctgatggcacagttggccgaagagtgaagccctacatcattgaccttggctcaggcaatggaaccttcttaaacaacaaacgtattgagccacagagatactatgaactaaaagaaaaggatgtactcaaatttggattcagtagcagagaatacgtcttgctccatgagtcgtcggacacttctgaaatagacaggaaagatgacgaggatgaggaggaggaggaagaagtgtctgacagctagcaaactaagaacccaaactattgatacacggtttccttcttggaagtctttgattgactcagagagcactatggtggtgggtccagcactatggtgctctctgtaatgcctcttactgccttaagtctttcctctgttgctgaccagattgtgttaccatttgaatacactgactaatgtttgttaaacttttt

SEQ ID NO: 28315 - DNA, 5737 bp, Homo sapiens
  source 1..5737: mol_type = unassigned DNA
ggcagcggcggaagcggcgagggcggcgggcgtccggctctgaggtggtggaggcggcggaggcggcggcggaggcggcggcggctcgggactgggctcggctggaagcagcgagggtcagagcgccgcagcaagcgccgatctcccggctcgaccatccgcctgccgcccggacgcctgggccgcggagtttgtgtcccggctcggaccccggcgcccagcccggagccgtaaccttgaggcggcggcggcggggccgggccgggccgggctggggggcggtggcgctggatccgcggctgcccgatcgttggcgggagatgtcgaaccccgggacacgcaggaacggctccagcatcaagatccgtctgacagtgttatgtgccaagaaccttgcaaagaaagacttcttcaggctccctgacccttttgcaaagattgtcgtggatgggtctgggcagtgccactcaaccgacactgtgaaaaacacattggacccaaagtggaaccagcactatgatctatatgttgggaaaacggattcgataaccattagcgtgtggaaccataagaaaattcacaagaaacagggagctggcttcctgggctgtgtgcggctgctctccaatgccatcagcagattaaaagataccggataccagcgtttggatctatgcaaactaaacccctcagatactgatgcagttcgtggccagatagtggtcagtttacagacacgagacagaataggaaccggcggctcggtggtggactgcagaggactgttagaaaatgaaggaacggtgtatgaagactccgggcctgggaggccgctcagctgcttcatggaggaaccagccccttacacagatagcaccggtgctgctgctggaggagggaattgcaggttcgtggagtccccaagtcaagatcaaagacttcaggcacagcggcttcgaaaccctgatgtgcgaggttcactacagacgccccagaaccgaccacacggccaccagtccccggaactgcccgaaggctacgaacaaagaacaacagtccagggccaagtttactttttgcatacacagactggagttagcacgtggcacgaccccaggataccaagtccctcggggaccattcctgggggagatgcagcttttctatacgaattccttctacaaggccatacatctgagcccagagaccttaacagtgtgaactgtgatgaacttggaccactgccgccaggctgggaagtcagaagtacagtttctgggaggatatattttgtagatcataataaccgaacaacccagtttacagacccaaggttacaccacatcatgaatcaccagtgccaactcaaggagcccagccagccgctgccactgcccagtgagggctctctggaggacgaggagcttcctgcccagagatacgaaagagatctagtccagaagctgaaagtcctcagacacgaactgtcgcttcagcagccccaagctggtcattgccgcatcgaagtgtccagagaagaaatctttgaggagtcttaccgccagataatgaagatgcgaccgaaagacttgaaaaaacggctgatggtgaaattccgtggggaagaaggtttggattacggtggtgtggccagggagtggctttacttgctgtgccatgaaatgctgaatccttattacgggctcttccagtattctacggacaatatttacatgttgcaaataaatccggattcttcaatcaaccccgaccacttgtcttatttccactttgtggggcggatcatggggctggctgtgttccatggacactacatcaacgggggcttcacagtgcccttctacaagcagctgctggggaagcccatccagctctcagatctggaatctgtggacccagagctgcataagagcttggtgtggatcctagagaacgacatcacgcctgtactggaccacaccttctgcgtggaacacaacgccttcgggcggatcctgcagcatgaactgaaacccaatggcagaaatgtgccagtcacagaggagaataagaaagaatacgtccggttgtatgtaaactggaggtttatgagaggaatcgaagcccagttcttagctctgcagaaggggttcaatgagctcatccctcaacatctgctgaagccttttgaccagaaggaactggagctgatcataggcggcctggataaaatagacttgaacgactggaagtcgaacacgcggctgaagcactgtgtggccgacagcaacatcgtgcggtggttctggcaagcggtggagacgttcgatgaagaaaggagggccaggctcctgcagtttgtgactgggtccacgcgagtcccgctccaaggcttcaaggctttgcaaggttctacaggcgcggcagggccccggctgttcaccatccacctgatagacgcgaacacagacaaccttccgaaggcccatacctgctttaaccggatcgacattccaccatatgagtcctatgagaagctctacgagaagctgctgacagccgtggaggagacctgcgggtttgctgtggagtgaaaagcaaccaaaggcaacagagtctagctcatggccaccagaccaaaagcatccagcttctgtgcacctcctgcaaagctggcagaggccctggaattccagatcacctgaggggaaagggttgtctctctcctttctgttgggggagggggatgggggacttttgttggtggctcccacccatatatccctcctttaccatagtactcccacccacttccatcacccatccaataaaatgcagccaggtttagcctttggctttggtcacacaggatattctgctgtgttgcaacccatgtggtgataaggctcacagccctgagctctttacgggagcatcaactcacagttaggggactgggcgtggctgattgagggtttggaactggtggctatgccagctattccatctcaaaacagccttgaggccccttttcaatttgagcagctgctagatatcttatcagagctcagattccagatttcacatcccagcagccggttctgggtagcagatcaatttccaactggaaaataactatataatgtatgcttattggaattctgccacagcaggaagcttgagtcaaaatgtgtttcccctttgaaaggagaaggaattggagcagcttttcctggaggcccaggatatttcttttctgggtatcttggctgaaaattttgttttacatagagaaaaacgatcttttaagggtcccttttgctgcattatctgtccagtttgacttttttttcagtgaaaacaccatgtcatggagtgtaggaaagagcagaccaaaatcagccctagagccaaccagtcagtcccaaagctgtgacctctgtgccactgttgtccatagaagagcatcgactgtgtcacttaaaatattagtaaaccatgatgcagcaactgctaagagctaaactaacaaaattgtgtcatcatagctgctggcttggtgtgaactcgcttaaaagcaatggtgaaaggataacctcgatgatgtaaatccacccaaagatactgttctacaaaaagtagggtgtggacgcaaacctgtgacagcagagggggacgacttcacactcactgcctcatgtggcccctttcccagtggcagctggtgacactaacgattgctactcggttcacttgcccagatgtcttcatatgatgagcaaggccagaagcaaggctagattcgaagtttctgacaccatttccagtttgcacaaaagtcagtattttatcttaaagtggcttgatttccaatagctgaacttgggcagaaaacagcaggccaatgttcctatgtggtttctttgttgttgtttttgtttggggtgggggcaagtacagggtaattcatgagcaagacatttcactgctgtcgaagtctctgggatcccgctgtgggtctgagatggcctgggaaggaccttgtggacaatggttttatctgttctttttgtcactgttaatttctgggctgctgaggttctagaatagaagggctgccaaatgaggtttgctgcaggaggaaagtttaatcccccattccaaaagtccaggccaaatggtgggcttagcctctttgaaaagttctgccttgcccccacaggtgggcacatcctgtgtctcattcaccatgatgcttcctgagggtgttctagaagcccgttccccagtggctgtatccagcctttccttgcatcatcttcctcttgaaggtgaggaagtgaaaactacagacctcccccggacagcccactctctatcacgagcctaacccgcgggaggcggaagagacatccattcgagaactgaagcggcctccgggatgaggtcagaggccccacctgattttcctggtggtggtatccaaaatcttcagtaactaggaaggaaaccagggtctcatggtttaaaagactttgaagcaggaatgttgcatttgacgcctttaaaactacctttttgctgttgggaggagtcgggggcgagccttagcagctgcaccgccatccccatgctggttggtgctgccctgcctctcgtgccgggtgttgcttcagcccagagccagagggctgggtcccgggtcctccacaggtgaccccggtggacacacgcgttcccatcctggcctccgtctctgcttttccacttctacctgcgtgtgggtttgccgccttgtcatcggttgtgtgagtgtcgcagacctttccagagctccggttcactctttccaaacaggcctccctgtcggtggcactgcactcctagaaccttcagtttctacgatggtttgtttggtccttttgaaccaccccaaagaactcaacatggcaaagcaaatggtaaaagcttcccgactgttctactttgggtccgcgcgaagcccactcacgtgtgatctgtgttgcccctctcggtggtcccaggcgatccagccatgccccctgcccctctgcccagatgcttcaggggcccggcttttcaggcttgccctcaccagcggccgtcagccgacactcagggatgtagctaacaccactccgccagtgctttcagtaggaagagctgaggctgcctgggaggcccggggcgaccggaaaagggctctctcaagttctgaaaagagaatctgccaccagatcgaatttcgacccctgagcttgttcggacgtatggtccaaattcagattaaggtggtcacccaacccgagatgtcaggaaaggccttctgcagagaaaatgtccccccacccgccatctgcagccaggtgtgtgccacacggcagccttcccgaaacatagtatggattttaaaaatgtgtttatttttgtttctcaaccactttataacgtattttttaatttattttgtaatgtcttgttttgaagtattgctgctatccttgttatccttcccactgtttttatcactgatttattttgtgaaagttgtacactaatgttctatgtcaaaatcaaaagtatttaatgaaatactagttctatttaatgtggttatggaaccagctggaaacacaaaacaaacagtgattgtacagcaggctgggcccaggaggtcaggttcattttgttacatatgcaataaactcacgacttt

SEQ ID NO: 28316 - DNA, 5581 bp, Homo sapiens
  source 1..5581: mol_type = unassigned DNA
cggctcgggactgggctcggctggaagcagcgagggtcagagcgccgcagcaagcgccgatctcccggctcgaccatccgcctgccgcccggacgcctgggccgcggagtttgtgtcccggctcggaccccggcgcccagcccggagccgtaaccttgaggcggcggcggcggggccgggccgggccgggctggggggcggtggcgctggatccgcggctgcccgatcgttggcgggagatgtcgaaccccgggacacgcaggaacggctccagcatcaagatccgtctgacagtgttatgtgccaagaaccttgcaaagaaagacttcttcaggctccctgacccttttgcaaagattgtcgtggatgggtctgggcagtgccactcaaccgacactgtgaaaaacacattggacccaaagtggaaccagcactatgatctatatgttgggaaaacggattcgataaccattagcgtgtggaaccataagaaaattcacaagaaacagggagctggcttcctgggctgtgtgcggctgctctccaatgccatcagcagattaaaagataccggataccagcgtttggatctatgcaaactaaacccctcagatactgatgcagttcgtggccagatagtggtcagtttacagacacgagacagaataggaaccggcggctcggtggtggactgcagaggactgttagaaaatgaaggaacggtgtatgaagactccgggcctgggaggccgctcagctgcttcatggaggaaccagccccttacacagatagcaccggtgctgctgctggaggagggaattgcaggttcgtggagtccccaagtcaagatcaaagacttcaggcacagcggcttcgaaaccctgatgtgcgaggttcactacagacgccccagaaccgaccacacggccaccagtccccggaactgcccgaaggctacgaacaaagaacaacagtccagggccaagtttactttttgcatacacagactggagttagcacgtggcacgaccccaggataccaagagaccttaacagtgtgaactgtgatgaacttggaccactgccgccaggctgggaagtcagaagtacagtttctgggaggatatattttgtagatcataataaccgaacaacccagtttacagacccaaggttacaccacatcatgaatcaccagtgccaactcaaggagcccagccagccgctgccactgcccagtgagggctctctggaggacgaggagcttcctgcccagagatacgaaagagatctagtccagaagctgaaagtcctcagacacgaactgtcgcttcagcagccccaagctggtcattgccgcatcgaagtgtccagagaagaaatctttgaggagtcttaccgccagataatgaagatgcgaccgaaagacttgaaaaaacggctgatggtgaaattccgtggggaagaaggtttggattacggtggtgtggccagggagtggctttacttgctgtgccatgaaatgctgaatccttattacgggctcttccagtattctacggacaatatttacatgttgcaaataaatccggattcttcaatcaaccccgaccacttgtcttatttccactttgtggggcggatcatggggctggctgtgttccatggacactacatcaacgggggcttcacagtgcccttctacaagcagctgctggggaagcccatccagctctcagatctggaatctgtggacccagagctgcataagagcttggtgtggatcctagagaacgacatcacgcctgtactggaccacaccttctgcgtggaacacaacgccttcgggcggatcctgcagcatgaactgaaacccaatggcagaaatgtgccagtcacagaggagaataagaaagaatacgtccggttgtatgtaaactggaggtttatgagaggaatcgaagcccagttcttagctctgcagaaggggttcaatgagctcatccctcaacatctgctgaagccttttgaccagaaggaactggagctgatcataggcggcctggataaaatagacttgaacgactggaagtcgaacacgcggctgaagcactgtgtggccgacagcaacatcgtgcggtggttctggcaagcggtggagacgttcgatgaagaaaggagggccaggctcctgcagtttgtgactgggtccacgcgagtcccgctccaaggcttcaaggctttgcaaggttctacaggcgcggcagggccccggctgttcaccatccacctgatagacgcgaacacagacaaccttccgaaggcccatacctgctttaaccggatcgacattccaccatatgagtcctatgagaagctctacgagaagctgctgacagccgtggaggagacctgcgggtttgctgtggagtgaaaagcaaccaaaggcaacagagtctagctcatggccaccagaccaaaagcatccagcttctgtgcacctcctgcaaagctggcagaggccctggaattccagatcacctgaggggaaagggttgtctctctcctttctgttgggggagggggatgggggacttttgttggtggctcccacccatatatccctcctttaccatagtactcccacccacttccatcacccatccaataaaatgcagccaggtttagcctttggctttggtcacacaggatattctgctgtgttgcaacccatgtggtgataaggctcacagccctgagctctttacgggagcatcaactcacagttaggggactgggcgtggctgattgagggtttggaactggtggctatgccagctattccatctcaaaacagccttgaggccccttttcaatttgagcagctgctagatatcttatcagagctcagattccagatttcacatcccagcagccggttctgggtagcagatcaatttccaactggaaaataactatataatgtatgcttattggaattctgccacagcaggaagcttgagtcaaaatgtgtttcccctttgaaaggagaaggaattggagcagcttttcctggaggcccaggatatttcttttctgggtatcttggctgaaaattttgttttacatagagaaaaacgatcttttaagggtcccttttgctgcattatctgtccagtttgacttttttttcagtgaaaacaccatgtcatggagtgtaggaaagagcagaccaaaatcagccctagagccaaccagtcagtcccaaagctgtgacctctgtgccactgttgtccatagaagagcatcgactgtgtcacttaaaatattagtaaaccatgatgcagcaactgctaagagctaaactaacaaaattgtgtcatcatagctgctggcttggtgtgaactcgcttaaaagcaatggtgaaaggataacctcgatgatgtaaatccacccaaagatactgttctacaaaaagtagggtgtggacgcaaacctgtgacagcagagggggacgacttcacactcactgcctcatgtggcccctttcccagtggcagctggtgacactaacgattgctactcggttcacttgcccagatgtcttcatatgatgagcaaggccagaagcaaggctagattcgaagtttctgacaccatttccagtttgcacaaaagtcagtattttatcttaaagtggcttgatttccaatagctgaacttgggcagaaaacagcaggccaatgttcctatgtggtttctttgttgttgtttttgtttggggtgggggcaagtacagggtaattcatgagcaagacatttcactgctgtcgaagtctctgggatcccgctgtgggtctgagatggcctgggaaggaccttgtggacaatggttttatctgttctttttgtcactgttaatttctgggctgctgaggttctagaatagaagggctgccaaatgaggtttgctgcaggaggaaagtttaatcccccattccaaaagtccaggccaaatggtgggcttagcctctttgaaaagttctgccttgcccccacaggtgggcacatcctgtgtctcattcaccatgatgcttcctgagggtgttctagaagcccgttccccagtggctgtatccagcctttccttgcatcatcttcctcttgaaggtgaggaagtgaaaactacagacctcccccggacagcccactctctatcacgagcctaacccgcgggaggcggaagagacatccattcgagaactgaagcggcctccgggatgaggtcagaggccccacctgattttcctggtggtggtatccaaaatcttcagtaactaggaaggaaaccagggtctcatggtttaaaagactttgaagcaggaatgttgcatttgacgcctttaaaactacctttttgctgttgggaggagtcgggggcgagccttagcagctgcaccgccatccccatgctggttggtgctgccctgcctctcgtgccgggtgttgcttcagcccagagccagagggctgggtcccgggtcctccacaggtgaccccggtggacacacgcgttcccatcctggcctccgtctctgcttttccacttctacctgcgtgtgggtttgccgccttgtcatcggttgtgtgagtgtcgcagacctttccagagctccggttcactctttccaaacaggcctccctgtcggtggcactgcactcctagaaccttcagtttctacgatggtttgtttggtccttttgaaccaccccaaagaactcaacatggcaaagcaaatggtaaaagcttcccgactgttctactttgggtccgcgcgaagcccactcacgtgtgatctgtgttgcccctctcggtggtcccaggcgatccagccatgccccctgcccctctgcccagatgcttcaggggcccggcttttcaggcttgccctcaccagcggccgtcagccgacactcagggatgtagctaacaccactccgccagtgctttcagtaggaagagctgaggctgcctgggaggcccggggcgaccggaaaagggctctctcaagttctgaaaagagaatctgccaccagatcgaatttcgacccctgagcttgttcggacgtatggtccaaattcagattaaggtggtcacccaacccgagatgtcaggaaaggccttctgcagagaaaatgtccccccacccgccatctgcagccaggtgtgtgccacacggcagccttcccgaaacatagtatggattttaaaaatgtgtttatttttgtttctcaaccactttataacgtattttttaatttattttgtaatgtcttgttttgaagtattgctgctatccttgttatccttcccactgtttttatcactgatttattttgtgaaagttgtacactaatgttctatgtcaaaatcaaaagtatttaatgaaatactagttctatttaatgtggttatggaaccagctggaaacacaaaacaaacagtgattgtacagcaggctgggcccaggaggtcaggttcattttgttacatatgcaataaactcacgactttaca

SEQ ID NO: 28317 - DNA, 2403 bp, Homo sapiens
  source 1..2403: mol_type = unassigned DNA
agtccccctccccctcccctcgccggctagggtggtgcgtgccggcaggccggtcaaggaggcgggacacgtcggcgctaccaccgccaccgccgccgccgcccctcctcccgttccagctgccgctgccgcttcctgggctgagtccgcccgcggtcccggcggcgccaggtgcgttcactctgcccggctccagccagcgtccgccgccgccgtagctgccccaggctccccgccccgctgccgagatggcgacgcgctcctgtcgggagaaggctcagaagctgaacgagcagcaccagctcatcctatccaagcttctgagggaggaggacaacaagtactgcgccgactgcgaggccaaaggtcctcgatgggcttcctggaatattggtgtgtttatttgcatcagatgtgctggaattcatagaaatcttggggttcatatatccagggtcaaatcagtcaacctagaccaatggacagcagaacagatacagtgcatgcaagatatgggaaatactaaagcaagactactctatgaagccaatcttccagagaactttcgaagaccacagacagatcaagcagtggaatttttcatcagagataaatatgaaaagaagaaatactacgataaaaatgccatagctattacaaataaagaaaaggaaaaaaaaaaggaagagaaaaagagagaaaaggagccagaaaagccggcaaaaccacttacagctgaaaagctgcagaagaaagatcagcaactggagcctaaaaaaagtaccagccctaaaaaagctgcggagcccactgtggatcttttaggacttgatggccctgctgtggcaccagtgaccaacgggaacacaacggtgccacccctgaacgatgatctggacatctttggaccgatgatttctaatcccttacctgcaactgtcatgcccccagctcaggggacaccctctgcaccagcagctgcaaccctgtctacagtaacatctggggatctagatttattcactgagcaaactacaaaatcagaagaagtggcaaagaaacaactttccaaagactccatcttatctctgtatggcacaggaaccattcaacagcaaagtactcctggtgtatttatgggacccacaaatataccatttacctcacaagcaccagctgcatttcagggctttccatcgatgggcgtgcctgtgcctgcagctcctggccttataggaaatgtgatgggacagagtccaagcatgatggtgggcatgcccatgcccaatgggtttatgggaaatgcacaaactggtgtgatgccacttcctcagaacgttgttggcccccaaggaggaatggtgggacaaatgggtgcaccccagagtaagtttggcctgccgcaagctcagcagccccagtggagcctctcacagatgaatcagcagatggctggcatgagtatcagtagtgcaacccctactgcaggttttggccagccctccagcacaacagcaggatggtctggaagctcatcaggtcagactctcagcacacaactgtggaaatgaaaactgcaatacaagtttcatccagaactaccacctgacattccttgctgaaacgcatctagttcccctgtttattcatatgcatattttttttctttttacccatttgttcatattaagaatgatctgattgaccgtgttggtctgtactgattcaatttgatgtggtgaaaagcaggttgataaatcattttatgtcaagggcagctttgctcatatttcccatgatttcatgtactgcattatttgagaagctgctcaacttgcaaaatcagttttcctctcaataaaattatagctctaatgtttgcatataagggaagtagttatcatgttagtaatacctctaatagtataaaccccaccccaaaattagccagtaatcctgtaggaaggtactgtatgatcaaatgtttaatcatataaatagaatgtaaatgtctcactgagcactgttttctagtgtatcaaaatgctcttatttcatcattcacttcactgtgctgttgttatgatgtgcttaacagggaacgtgattagtgaaaggaagataaacgtggatgttactccaaaacttcgtttaatgaatgcttaaagaattcaaattttatctgcctctcttgtaatttggatctcttcttaatgtacatagtgctaacatgaagacctttttctgcactatatgcaaacagggtaactaactaaaacaaagccactttcaatcttcaatccttgaaggtatatctaggtttatgacagtaattgtgtttacattttatggtgcctagtattgacaaaatgttatttccctacattaaacatgactccatag

SEQ ID NO: 28318 - DNA, 1001 bp, Homo sapiens
  source 1..1001: mol_type = unassigned DNA
agtccccctccccctcccctcgccggctagggtggtgcgtgccggcaggccggtcaaggaggcgggacacgtcggcgctaccaccgccaccgccgccgccgcccctcctcccgttccagctgccgctgccgcttcctgggctgagtccgcccgcggtcccggcggcgccaggtgcgttcactctgcccggctccagccagcgtccgccgccgccgtagctgccccaggctccccgccccgctgccgagatggcgacgcgctcctgtcgggagaaggctcagaagctgaacgagcagcaccagctcatcctatccaagcttctgagggaggaggacaacaagtactgcgccgactgcgaggccaaaggtcctcgatgggcttcctggaatattggtgtgtttatttgcatcagatgtgctggaattcatagaaatcttggggttcatatatccagggtcaaatcagtcaacctagaccaatggacagcagaacagatacagtgcatgcaagatatgggaaatactaaagcaagactactctatgaagccaatcttccagagaactttcgaagaccacagacagatcaagcagtggaatttttcatcagagataaatatgaaaagaagaaatactacgataaaaatgccatagctattacaaatatttcctcctctgatgctcctcttcagcctttggtatcctctccttctctgcaagctgctgttgacaaaaataaattggagaaagaaaaggaaaaaaaaaaggaagagaaaaagagagaaaaggagccagaaaagccggcaaaaccacttacagctgaaaagctgcagaagaaagatcagcaactggagcctaaaaaaagtaccagccctaaaaaagctgcggagcccactgtggatcttttaggacttgtttggagaaagattgagaaggaaaagagtgaaaggcagttagttgaagtggaagagttgaccttcatgtactgctttccaaaaaattga

SEQ ID NO: 28319 - DNA, 2491 bp, Homo sapiens
  source 1..2491: mol_type = unassigned DNA
agtccccctccccctcccctcgccggctagggtggtgcgtgccggcaggccggtcaaggaggcgggacacgtcggcgctaccaccgccaccgccgccgccgcccctcctcccgttccagctgccgctgccgcttcctgggctgagtccgcccgcggtcccggcggcgccaggtgcgttcactctgcccggctccagccagcgtccgccgccgccgtagctgccccaggctccccgccccgctgccgagatggcgacgcgctcctgtcgggagaaggctcagaagctgaacgagcagcaccagctcatcctatccaagcttctgagggaggaggacaacaagtactgcgccgactgcgaggccaaaggtcctcgatgggcttcctggaatattggtgtgtttatttgcatcagatgtgctggaattcatagaaatcttggggttcatatatccagggtcaaatcagtcaacctagaccaatggacagcagaacagatacagtgcatgcaagatatgggaaatactaaagcaagactactctatgaagccaatcttccagagaactttcgaagaccacagacagatcaagcagtggaatttttcatcagagataaatatgaaaagaagaaatactacgataaaaatgccatagctattacaaataaagaaaaggaaaaaaaaaaggaagagaaaaagagagaaaaggagccagaaaagccggcaaaaccacttacagctgaaaagctgcagaagaaagatcagcaactggagcctaaaaaaagtaccagccctaaaaaagctgcggagcccactgtggatcttttaggacttgatggccctgctgtggcaccagtgaccaacgggaacacaacggtgccacccctgaacgatgatctggacatctttggaccgatgatttctaatcccttacctgcaactgtcatgcccccagctcaggggacaccctctgcaccagcagctgcaaccctgtctacagtaacatctggggatctagatttattcactgagcaaactacaaaatcagaagaagtggcaaagaaacaactttccaaagactccatcttatctctgtatggcacaggaaccattcaacagcaaagtactcctggtgtatttatgggacccacaaatataccatttacctcacaagcaccagctgcatttcagggctttccatcgatgggcgtgcctgtgcctgcagctcctggccttataggaaatgtgatgggacagagtccaagcatgatggtgggcatgcccatgcccaatgggtttatgggaaatgcacaaactggtgtgatgccacttcctcagaacgttgttggcccccaaggaggaatggtgggacaaatgggtgcaccccagagtaagtttggcctgccgcaagctcagcagccccagtggagcctctcacagataatgcagaagggtgatgctgttctccagcactccatcagtgcaatctactggccaatgacaaggtggttaaaatgtcctttagtagatgaatcagcagatggctggcatgagtatcagtagtgcaacccctactgcaggttttggccagccctccagcacaacagcaggatggtctggaagctcatcaggtcagactctcagcacacaactgtggaaatgaaaactgcaatacaagtttcatccagaactaccacctgacattccttgctgaaacgcatctagttcccctgtttattcatatgcatattttttttctttttacccatttgttcatattaagaatgatctgattgaccgtgttggtctgtactgattcaatttgatgtggtgaaaagcaggttgataaatcattttatgtcaagggcagctttgctcatatttcccatgatttcatgtactgcattatttgagaagctgctcaacttgcaaaatcagttttcctctcaataaaattatagctctaatgtttgcatataagggaagtagttatcatgttagtaatacctctaatagtataaaccccaccccaaaattagccagtaatcctgtaggaaggtactgtatgatcaaatgtttaatcatataaatagaatgtaaatgtctcactgagcactgttttctagtgtatcaaaatgctcttatttcatcattcacttcactgtgctgttgttatgatgtgcttaacagggaacgtgattagtgaaaggaagataaacgtggatgttactccaaaacttcgtttaatgaatgcttaaagaattcaaattttatctgcctctcttgtaatttggatctcttcttaatgtacatagtgctaacatgaagacctttttctgcactatatgcaaacagggtaactaactaaaacaaagccactttcaatcttcaatccttgaaggtatatctaggtttatgacagtaattgtgtttacattttatggtgcctagtattgacaaaatgttatttccctacattaaacatgactccatag

SEQ ID NO: 28320 - DNA, 3333 bp, Homo sapiens
  source 1..3333: mol_type = unassigned DNA
agtccccctccccctcccctcgccggctagggtggtgcgtgccggcaggccggtcaaggaggcgggacacgtcggcgctaccaccgccaccgccgccgccgcccctcctcccgttccagctgccgctgccgcttcctgggctgagtccgcccgcggtcccggcggcgccaggtgcgttcactctgcccggctccagccagcgtccgccgccgccgtagctgccccaggctccccgccccgctgccgagatggcgacgcgctcctgtcgggagaaggctcagaagctgaacgagcagcaccagctcatcctatccaagcttctgagggaggaggacaacaagtactgcgccgactgcgaggccaaaggtcctcgatgggcttcctggaatattggtgtgtttatttgcatcagatgtgctggaattcatagaaatcttggggttcatatatccagggtcaaatcagtcaacctagaccaatggacagcagaacagatacagtgcatgcaagatatgggaaatactaaagcaagactactctatgaagccaatcttccagagaactttcgaagaccacagacagatcaagcagtggaatttttcatcagagataaatatgaaaagaagaaatactacgataaaaatgccatagctattacaaatatttcctcctctgatgctcctcttcagcctttggtatcctctccttctctgcaagctgctgttgacaaaaataaattggagaaagaaaaggaaaaaaaaaaggaagagaaaaagagagaaaaggagccagaaaagccggcaaaaccacttacagctgaaaagctgcagaagaaagatcagcaactggagcctaaaaaaagtaccagccctaaaaaagctgcggagcccactgtggatcttttaggacttgatggccctgctgtggcaccagtgaccaacgggaacacaacggtgccacccctgaacgatgatctggacatctttggaccgatgatttctaatcccttacctgcaactgtcatgcccccagctcaggggacaccctctgcaccagcagctgcaaccctgtctacagtaacatctggggatctagatttattcactgagcaaactacaaaatcagaagaagtggcaaagaaacaactttccaaagactccatcttatctctgtatggcacaggaaccattcaacagcaaagtactcctggtgtatttatgggacccacaaatataccatttacctcacaagcaccagctgcatttcagggctttccatcgatgggcgtgcctgtgcctgcagctcctggccttataggaaatgtgatgggacagagtccaagcatgatggtgggcatgcccatgcccaatgggtttatgggaaatgcacaaactggtgtgatgccacttcctcagaacgttgttggcccccaaggaggaatggtgggacaaatgggtgcaccccagagtaagtttggcctgccgcaagctcagcagccccagtggagcctctcacagatgaatcagcagatggctggcatgagtatcagtagtgcaacccctactgcaggttttggccagccctccagcacaacagcaggatggtctggaagctcatcaggtcagactctcagcacacaactgtggaaatgaaaactgcaatacaagtttcatccagaactaccacctgacattccttgctgaaacgcatctagttcccctgtttattcatatgcatattttttttctttttacccatttgttcatattaagaatgatctgattgaccgtgttggtctgtactgattcaatttgatgtggtgaaaagcaggttgataaatcattttatgtcaagggcagctttgctcatatttcccatgatttcatgtactgcattatttgagaagctgctcaacttgcaaaatcagttttcctctcaataaaattatagctctaatgtttgcatataagggaagtagttatcatgttagtaatacctctaatagtataaaccccaccccaaaattagccagtaatcctgtaggaaggtactgtatgatcaaatgtttaatcatataaatagaatgtaaatgtctcactgagcactgttttctagtgtatcaaaatgctcttatttcatcattcacttcactgtgctgttgttatgatgtgcttaacagggaacgtgattagtgaaaggaagataaacgtggatgttactccaaaacttcgtttaatgaatgcttaaagaattcaaattttatctgcctctcttgtaatttggatctcttcttaatgtacatagtgctaacatgaagacctttttctgcactatatgcaaacagggtaactaactaaaacaaagccactttcaatcttcaatccttgaaggtatatctaggtttatgacagtaattgtgtttacattttatggtgcctagtattgacaaaatgttatttccctacattaaacatgactccatagaccttttcatttgtgggtttttatttcctatgatgtatactgccactaaccttccaaaaattacttagtattgcaaagtcaggaatcatcaggaacgtttagctgacaaaatacttgtctgttttaaaaacctgttcaagtctaccaacctgttcaagtctaccaattataagggcaaattggagaaaaagaaaaaatatatactcaagagtggtatcttgcagtatcggcactgtacaaaaaaatcttccaatttagttgttgtagagaaaacatgcagaacaaatgaagacaaaacatacattttgtaccaaccatccaattagcttatgttaactgacaagctccatttaaacagatgtccatcagatgacaagaaaggctgctgtactgaagtaaaacaaacaatacctgaatgctctgtagcctaaactccaaacatcctcttccatatggatccactggctggacaaactgcaccagttgctgcttcaatttatacctcaattttcactgtgtccaggtggtactttggctcgttggctagattaaccttctctgtccgagtgtgccacacgagaacctgaaggggaaggaaatagcttgggtagcgcactcttcatggtgacactcgaggtcgggcagcacaagtgtaatgaataccttagtgcagttatttgctttcggttccagttcttcgactgttgttatctgtttgagaaagtcagattcttgcatccctggctgggatccacgacgcttaaatacagcttttggattggacaaaatgacttgaagacttacagcaaatcctttgtgaaaaataaaaaaaaaaaagagactttaaaa

SEQ ID NO: 28321 - DNA, 1310 bp, Homo sapiens
  source 1..1310: mol_type = unassigned DNA
gagtccgcccgcggtcccggcggcgccaggtgcgttcactctgcccggctccagccagcgtccgccgccgccgtagctgccccaggctccccgccccgctgccgagatggcgacgcgctcctgtcgggagaaggctcagaagctgaacgagcagcaccagctcatcctatccaagcttctgagggaggaggacaacaagtactgcgccgactgcgaggccaaaggtcctcgatgggcttcctggaatattggtgtgtttatttgcatcagatgtgctggaattcatagaaatcttggggttcatatatccagggtcaaatcagtcaacctagaccaatggacagcagaacagatacagtgcatgcaagatatgggaaatactaaagcaagactactctatgaagccaatcttccagagaactttcgaagaccacagacagatcatgaagatataatactggaaacaacagctgtaataactttactgcttaataagtgtttgccctatgccaagccctgaccatggcattttatgtaagatgagtccagacaacttcaagaatttaaagaagactaacgttggctttatcatcttgacttttccatttctcaactttgcaaggataaaattggccactgttcttctaatacatgtggaatcctatatgatgtgcccagggacagcatatatagtggaaaagaacatagatgttggaatcacaagtgcttaatctttccaagttgctgtttcttcatctatgatatggaactaataatatgcacattcgtggggtgtgggaggaattaaaggacccaaagtatgtacagcatatatagtataggatgtctggctcagtgtgggtacttgcatagatgttaatttcttataccaaaaaccccaaatgaacctgaattgaatttaaagtgtggtgatgcattgatagtggtggtggtgatgtaggaattaagaattgtcatttacttttctttctagaattagtttggatgagttttgttcagtgagaaaatttcctgaaagaggtagacttctttaagagaaagaaaagtagtttacagaatgtagttgcagaaataatgtgaaagagagcacagattgaggagtaggaaaattaaatttagagtcccagctttgtggagtggcgtgaataaagggaagtgtacatatcactgaattcatgcttttccttaagttatctgttttcagagcagtggaatttttcatcagagataaatatgaaaagaagaaatactacgataaaaatgccatagctattacaaatgtaagtaaa

SEQ ID NO: 28322 - DNA, 419 bp, Homo sapiens
  source 1..419: mol_type = unassigned DNA
gaaatactacgataaaaatgccatagctattacaaatatttcctcctctgatgctcctcttcagcctttggtatcctctccttctctgcaagctgctgttgacaaaaataaattggagaaagaaaaggaaaaaaaaaaggaagagaaaaagagagaaaaggagccagaaaagccggcaaaaccacttacagctgaaaagctgcagaagaaagatcagcaactggagcctaaaaaaagtaccagccctaaaaaagctgcggagcccactgtggatcttttaggacttgtttggagaaagattgagaaggaaaagagtgaaaggcagttagttgaagtggaagagttgaccttcatgtactgctttccaaaaaattgatcctagttgttattgaataaattgttgtctgttttaagaatta

SEQ ID NO: 28323 - DNA, 578 bp, Homo sapiens
  source 1..578: mol_type = unassigned DNA
ttaaaggacccaaagtatgtacagcatatatagtataggatgtctggctcagtgtgggtacttgcatagatgttaatttcttataccaaaaaccccaaatgaacctgaattgaatttaaagtgtggtgatgcattgatagtggtggtggtgatgtaggaattaagaattgtcatttacttttctttctagaattagtttggatgagttttgttcagtgagaaaatttcctgaaagaggtagacttctttaagagaaagaaaagtagtttacagaatgtagttgcagaaataatgtgaaagagagcacagattgaggagtaggaaaattaaatttagagtcccagctttgtggagtggcgtgaataaagggaagtgtacatatcactgaattcatgcttttccttaagttatctgttttcagagcagtggaatttttcatcagagataaatatgaaaagaagaaatactacgataaaaatgccatagctattacaaatatttcctcctctgatgctcctcttcagcctttggtatcctctccttctctgcaagctgctgttgacaaaaataaattggag

SEQ ID NO: 28324 - DNA, 2473 bp, Homo sapiens
  source 1..2473: mol_type = unassigned DNA
gaggaggaggaggagggaagtgagatggcggaaaggaaaactgcttaaatgatttttaaagggccgcgatgggcctcttggaacattggtgtgttcatctgcattcgatgtgctggaatccacaggaatctgggggtgcacatatccagggtaaagtcagttaacctcgaccagtggactcaagaacagattcagtgcatgcaagagatgggaaatggaaaggcaaaccgactttatgaagcctatcttcctgagacctttcggcgacctcagatagacccagctgttgaaggatttattcgagacaaatatgagaagaagaaatacatggaccgaagtctggacatcaatgcctttaggaaagaaaaagatgacaagtggaaaagagggagcgaaccagttccagaaaaaaaattggaacctgttgtttttgagaaggtgaaaatgccacagaaaaaagaagacccacagctacctcggaaaagctccccgaaatccacagcgcctgtcatggatttgttgggccttgatgctcctgtggcctgctccattgcaaatagtaagaccagcaataccctagagaaggatttagatctgttggcctctgttccatccccttcttcttccggttccagaaaggttgtaggttccatgccaactgcagggagtgccggctctgttcctgaaaatctgaacctgtttccggagccagggagcaaatcagaagaaataggcaagaaacagctctctaaagactccattctttcactgtatggatcccagacgcctcaaatgcctactcaagcaatgttcatggctcccgctcagatggcatatcccacagcctaccccagcttccccggggttacacctcctaacagcataatggggagcatgatgcctccaccagtaggcatggttgctcagccaggagcttctgggatggttgcccccatggccatgcctgcaggctatatgggtggcatgcaggcatcaatgatgggtgtgccgaatggaatgatgaccacccagcaggctggctacatggcaggcatggcagctatgccccagactgtgtatggggtccagccagctcagcagctgcaatggaaccttactcagatgacccagcagatggctgggatgaacttctatggagccaatggcatgatgaactatggacagtcaatgagtggcggaaatggacaggcagcaaatcagactctcagtcctcagatgtggaaataaaaacaaaacacctgtatggctgccattctcttcagccctcgctctcccctttccacagcctccacccctgacccccatcctcttttcctacctctctgtttggtttagaaattgctcaataagtcatttggggtttggcatcctgcccagccacttcccaaacatgaagacctctctgttgctttatgttgtacatgccccatagccatcccaacgtcctccccagtcctctcctggcaccagcaccttagaagttgttggcagaaggcacttaaactgtgggagaagtgtgcacacctttgagtcccttccctcaaggttaaagctcctgtcagactctcagaagggtctgtgggtgttgtatattaggcaaacaggggaaagcttagaggtccttctatatgtgttaataagctgtttctaagtgtttaaatttgaaaagcatcatgttctcatgatttatgggaatgaagcaagtactgaaatcaaattaaatactccctgggtcctgggtcagtttgaccctagccctggggtgaggcaagccccctcctatgaggatgagcaaaaatactactctcttcgccctgagttgctttctggatctggggcttcaggacttgctgcttcagtcagcctttattagcaccaaagactttatgaagatcccacacacagacacacatcccttcccgcctcccccctgccttcagtaggatctggctccgtggctggaggaccaacccctatagtgggaatgcagagcttaacgtgtactgcttgtgtgtgtgcgtgagtgtgtgtgtgtgtatgagtgtgtgttccgcctcccaccctctccccatctgctctgggtatttttgtttttgtttagttttaggtttacaacagagaggaattaatttatcagcagcctaaaactgttgtgtttttcttatggtttaaaaaacgccatgtcattgataactccctttctcccttcccttctcccggtctgctgatcactctttcatgcctgtgtatccagggtgctctgtttccccaccgttcccaggtgtacgaggcagagggccgggacagctttcctctcagtcattgttcaccccacttgaaaattcagacaagaaaactttgcttaaaagatttcatgtgtgggaaccacagttcctggctgcctttctcctgtgtatgtgtaaattccttaataaatattgcagggaaggac

SEQ ID NO: 28325 - DNA, 2939 bp, Homo sapiens
  source 1..2939: mol_type = unassigned DNA
ggggaggaagagctgccggaagtaggcggtggaggtggtagcggagctgacggcagctgccagggaaaccgaggcgcgggacgcaaggccagcagacaggccggccagagggtcatctgcgtccggcacccaggaggctcgtggtccgcctttgcctgggctgagggtctctggccccgcagcctctcttggaggcgggcctgtccctaagcccgccaaggggcgccgcgccgaggggctgcggagtgggggacggacgcccccgacccgggaaggggcgtccggcggggccggaggagagggctctccccgctcaggaggtgcccctgggcgggggaccgggagtcctcaaccccggactgaggcaggggtctctgggggcgaggagggcgcgtcgccctctgcccccgccggcaccctggccatgacaggcaagtcggtgaaggacgtggatcggtaccaggctgtcctggccaacctgctgctggaggaggataacaagttttgtgcagattgccagtctaaagggccgcgatgggcctcttggaacattggtgtgttcatctgcattcgatgtgctggaatccacaggaatctgggggtgcacatatccagggtaaagtcagttaacctcgaccagtggactcaagaacagattcagtgcatgcaagagatgggaaatggaaaggcaaaccgactttatgaagcctatcttcctgagacctttcggcgacctcagatagacccagctgttgaaggatttattcgagacaaatatgagaagaagaaatacatggaccgaagtctggacatcaatgcctttaggaaagaaaaagatgacaagtggaaaagagggagcgaaccagttccagaaaaaaaattggaacctgttgtttttgagaaggtgaaaatgccacagaaaaaagaagacccacagctacctcggaaaagctccccgaaatccacagcgcctgtcatggatttgttgggccttgatgctcctgtggcctgctccattgcaaatagtaagaccagcaataccctagagaaggatttagatctgttggcctctgttccatccccttcttcttccggttccagaaaggttgtaggttccatgccaactgcagggagtgccggctctgttcctgaaaatctgaacctgtttccggagccagggagcaaatcagaagaaataggcaagaaacagctctctaaagactccattctttcactgtatggatcccagacgcctcaaatgcctactcaagcaatgttcatggctcccgctcagatggcatatcccacagcctaccccagcttccccggggttacacctcctaacagcataatggggagcatgatgcctccaccagtaggcatggttgctcagccaggagcttctgggatggttgcccccatggccatgcctgcaggctatatgggtggcatgcaggcatcaatgatgggtgtgccgaatggaatgatgaccacccagcaggctggctacatggcaggcatggcagctatgccccagactgtgtatggggtccagccagctcagcagctgcaatggaaccttactcagatgacccagcagatggctgggatgaacttctatggagccaatggcatgatgaactatggacagtcaatgagtggcggaaatggacaggcagcaaatcagactctcagtcctcagatgtggaaataaaaacaaaacacctgtatggctgccattctcttcagccctcgctctcccctttccacagcctccacccctgacccccatcctcttttcctacctctctgtttggtttagaaattgctcaataagtcatttggggtttggcatcctgcccagccacttcccaaacatgaagacctctctgttgctttatgttgtacatgccccatagccatcccaacgtcctccccagtcctctcctggcaccagcaccttagaagttgttggcagaaggcacttaaactgtgggagaagtgtgcacacctttgagtcccttccctcaaggttaaagctcctgtcagactctcagaagggtctgtgggtgttgtatattaggcaaacaggggaaagcttagaggtccttctatatgtgttaataagctgtttctaagtgtttaaatttgaaaagcatcatgttctcatgatttatgggaatgaagcaagtactgaaatcaaattaaatactccctgggtcctgggtcagtttgaccctagccctggggtgaggcaagccccctcctatgaggatgagcaaaaatactactctcttcgccctgagttgctttctggatctggggcttcaggacttgctgcttcagtcagcctttattagcaccaaagactttatgaagatcccacacacagacacacatcccttcccgcctcccccctgccttcagtaggatctggctccgtggctggaggaccaacccctatagtgggaatgcagagcttaacgtgtactgcttgtgtgtgtgcgtgagtgtgtgtgtgtgtatgagtgtgtgttccgcctcccaccctctccccatctgctctgggtatttttgtttttgtttagttttaggtttacaacagagaggaattaatttatcagcagcctaaaactgttgtgtttttcttatggtttaaaaaacgccatgtcattgataactccctttctcccttcccttctcccggtctgctgatcactctttcatgcctgtgtatccagggtgctctgtttccccaccgttcccaggtgtacgaggcagagggccgggacagctttcctctcagtcattgttcaccccacttgaaaattcagacaagaaaactttgcttaaaagatttcatgtgtgggaaccacagttcctggctgcctttctcctgtgtatgtgtaaattccttaataaatattgcagggaaggac

SEQ ID NO: 28326 - DNA, 742 bp, Homo sapiens
  source 1..742: mol_type = unassigned DNA
gattccagttcattcctagctcagaaagcaacgttttgagccacaactgtcacaactccagatgacaggcaagtcggtgaaggacgtggatcggtaccaggctgtcctggccaacctgctgctggaggaggataacaagttttgtgcagattgccagtctaaagggccgcgatgggcctcttggaacattggtgtgttcatctgcattcgatgtgctggaatccacaggaatctgggggtgcacatatccagggtaaagtcagttaacctcgaccagtggactcaagaacagattcagtgcatgcaagagatgggaaatggaaaggcaaaccgactttatgaagcctatcttcctgagacctttcggcgacctcagatagacccagctgttgaaggatttattcgagacaaatatgagaagaagaaatacatggaccgaagtctggacatcaatgcctttaggaaagaaaaagatgacaagtggaaaagagggagcgaaccagttccagaaaaaaaattggaacctgttgtttttgagaaggtgaaaatgccacagaaaaaagaagacccacagctacctcggaaaagctccccgaaatccacagcgcctgtcatggatttgttgggccttgatgctcctgtggcctgctccattgcaaatagtaagaccagcaataccctagagaaggatttagatctgttggcctctgttccatccccttcttcttccggttccagaaag

SEQ ID NO: 28327 - DNA, 1402 bp, Homo sapiens
  source 1..1402: mol_type = unassigned DNA
gtattcttccttttcagtgaatcagagaatggagggatataatgagtggaactgagggccgcgatgggcctcttggaacattggtgtgttcatctgcattcgatgtgctggaatccacaggaatctgggggtgcacatatccagggtaaagtcagttaacctcgaccagtggactcaagaacagattcagtgcatgcaagagatgggaaatggaaaggcaaaccgactttatgaagcctatcttcctgagacctttcggcgacctcagatagacccagctgttgaaggatttattcgagacaaatatgagaagaagaaatacatggaccgaagtctggacatcaatgcctttaggaaagaaaaagatgacaagtggaaaagagggagcgaaccagttccagaaaaaaaattggaacctgttgtttttgagaaggtgaaaatgccacagaaaaaagaagacccacagctacctcggaaaagctccccgaaatccacagcgcctgtcatggatttgttgggccttgatgctcctgtggcctgctccattgcaaatagtaagaccagcaataccctagagaaggatttagatctgttggcctctgttccatccccttcttcttccggttccagaaaggttgtaggttccatgccaactgcagggagtgccggctctgttcctgaaaatctgaacctgtttccggagccagggagcaaatcagaagaaataggcaagaaacagctctctaaagactccattctttcactgtatggatcccagacgcctcaaatgcctactcaagcaatgttcatggctcccgctcagatggcatatcccacagcctaccccagcttccccggggttacacctcctaacagcataatggggagcatgatgcctccaccagtaggcatggttgctcagccaggagcttctgggatggttgcccccatggccatgcctgcaggctatatgggtggcatgcaggcatcaatgatgggtgtgccgaatggaatgatgaccacccagcaggctggctacatggcaggcatggcagctatgccccagactgtgtatggggtccagccagctcagcagctgcaatggaaccttactcagatgacccagcagatggctgggatgaacttctatggagccaatggcatgatgaactatggacagtcaatgagtggcggaaatggacaggcagcaaatcagactctcagtcctcagatgtggaaataaaaacaaaacacctgtatggctgccattctcttcagccctcgctctcccctttccacagcctccacccctgacccccatcctcttttcctacctctctgtttggtttagaaattgctcaataagtcatttggggtttggcatcctgcccagccacttccc

SEQ ID NO: 28328 - DNA, 703 bp, Homo sapiens
  source 1..703: mol_type = unassigned DNA
gcgcagtgacgcgccggccatgccggcggctgttgtcgggcctccagcgggcggggccgttggcggagcagaggggaggcgcagccgggcggagggcccacgagggctcagccttcccggtcagcggtggtgacggtatcccagagtgccagagaaccgttgcttttccgagttgctcttcttccaggctccgttggtggtcggcatggcccgtggaaatcaacgagaacttgcccgccagaaaaacatgaagaaaacccaggaaattagcaagggaaagaggaaagaggatagcttgactgcctctcagagaaagcagagggactctgagatcatgcaagaaaagcagaaggcagctaatgagaagaagtctatgcagacaagagaaaagtgatgactggctatttggaaaacctgggtgctactgccaactgggtgtatcataagctctaagatcaagattttgtagagtggacagtcattacatatgttataacttatcctttaaaaactattttaaactttatcctttcagctttacttagtgcgatgttttagaagcagtcttcaaagaataaaacactaaccatgcatgtgacatattggtgaacattatttttattattgaacattcatatataatttattaggtaatatgatcagataataggatctcttatataataaagaatctttgtcatca

SEQ ID NO: 28329 - DNA, 1889 bp, Homo sapiens
  source 1..1889: mol_type = unassigned DNA
ccggcggctgttgtcgggcctccagcgggcggggccgttggcggagcagaggggaggcgcagccgggcggagggcccacgagggctcagccttcccggtcagcggtggtgacggtatcccagagtgccagagaaccgttgcttttccgagttgctcttcttccaggctccgttggtggtcggcatggcccgtggaaatcaacgagaacttgcccgccagaaaaacatgaagaaaacccaggaaattagcaagggaaagaggaaagaggatagcttgactgcctctcagagaaagcagagttctggaggccagaaatctgagagcaagatgtcagctgggccacacctccctctgaaggctccaagggagaatccttgctttcctcttccagctgctggtggctccaggtattacttggcttatggcagcataactcctatctctgcctttgtctttgtggtcttcttttctgtcttcttcccttctttttatgaggacttttgctgttggatttaggttccattctaacctaggatgatctcatttggaaatccttaatttcatctacaaaaactgttttcccaaataggtcacattcacgcatatcagatggacagatgtatcattttggggtccaccattcaacccactacaaggagttttttaaacaaaaataggaaacttagatgtaacttagcactttttttttttttttttgagatggagtctcactctgtcaccagactggagtgcagtggtgccatctcagctccatgcaacctctgcctcctgggttcaagcagttctcttgcctcagcctcctgggtagctgggattacaggcacgcgctgccacacccaggtaatttatttattttttttttgagacagagtctcgcactgttgcccaggctggactgcagtggcgtgatctctgctcactgcaacctccgcctcccgggttcaagcgattctccagcctcagcttcctgagtagatgggattacaggcgcctgccaccacgcccagctaattttttgtattcttagtagagatggggtttcaccatgttggccaggctggtctccatctcctgacctcgtgattcacccgcctcggcctcccaaagtgctgggattacaggcgtgagtcacagcccccggccataatttagcactttaaaaaataatagccatgttgggccaggcgtggtggctcatgcctgtaatctgagcactttgggagaccaaggcgggtagatcccttgtgcccaggagttcaagaccagcctgggcaacatggcgaaaccccatttctactaaaaatacaaaaattagctggggcgaggggataggccgagttccgggtgtaagggggccattagggagagcagagcgaggcagctgatcttccggattgggggccttgcccggaagctggacctcacggagatgaaacggaagatgcacgaggatatgatctccatacagaactttctcatctacgtggccctgctgcgagtcactccatttatcttaaagaaattggacagcatatgaagattggacatcacatgtgaatgcatgatatgaagagcctggttacagtttctactgttctctgcaagtaaataggcccagaaaggtataagagactctttgaatggacataaaaattctgcttgttaagaacaagttgagctctggtaactgatcttaatagctaaaatataaaaatatttgggaagtctgaaatgaggtctcctggccctggtgtgcccttaatgcctgtgacagttggcctctgtgaatattggtataattgtaaataatgtcaaactccattttctagcaagtattaataattaagggaagtatgtctgaaatggca

SEQ ID NO: 28330 - DNA, 663 bp, Homo sapiens
  source 1..663: mol_type = unassigned DNA
gtcgcgcagtgcggggatccccgcttcagtcggcagagagagagctcgcgggtggttccggtccggcttttcaggccggacgggtgcctgcccctcaggtgcgagtttgtgcggtaaagaacacaccccggagatgtggacacggccgccccaggagggtccttgtttggaggtggaaatcaacgagaacttgcccgccagaaaaacatgaagaaaacccaggaaattagcaagggaaagaggaaagaggatagcttgactgcctctcagagaaagcagagggactctgagatcatgcaagaaaagcagaaggcagctaatgagaagaagtctatgcagacaagagaaaagtgatgactggctatttggaaaacctgggtgctactgccaactgggtgtatcataagctctaagatcaagattttgtagagtggacagtcattacatatgttataacttatcctttaaaaactattttaaactttatcctttcagctttacttagtgcgatgttttagaagcagtcttcaaagaataaaacactaaccatgcatgtgacatattggtgaacattatttttattattgaacattcatatataatttattaggtaatatgatcagataataggatctcttatataataaagaatctttgtcatca

SEQ ID NO: 28331 - DNA, 328 bp, Homo sapiens
  source 1..328: mol_type = unassigned DNA
agtgacgcgccggccatgccggcggctgttgtcgggcctccagcgggcggggccgttggcggagcagaggggaggcgcagccgggcggagggcccacgagggctcagccttcccggtcagcggtggtgacggtatcccagagtgccagagaaccgttgcttttccgagttgctcttcttccaggctccgttggtggtcggcatggcccagcatgactgtttgactttgtaggtggaaatcaacgagaacttgcccgccagaaaaacatgaagaaaacccaggaaattagcaagggaaagaggaaagaggatagcttgactgcctctca

SEQ ID NO: 28332 - DNA, 846 bp, Homo sapiens
  source 1..846: mol_type = unassigned DNA
atccccgcttcagtcggcagagagagagctcgcgggtggttccggtccggcttttcaggccggacgggtgcctgcccctcaggtgcgagtttgtgcggtaaagaacacaccccggagatgtggacacggccgccccaggagggtccttgtttggaggtggaaatcaacgagaacttgcccgccagaaaaacatgaagaaaacccaggaaattagcaagggaaagaggaaagaggatagcttgactgcctctcagagaaagcagagttctggaggccagaaatctgagagcaagatgtcagctgggccacacctccctctgaaggctccaagggagaatccttgctttcctcttccagctgctggtggctccaggtattacttggcttatggcagcataactcctatctctgcctttgtctttgtggtcttcttttctgtcttcttcccttctttttatgaggacttttgctgttggatttaggttccattctaacctaggatgatctcatttggaaatccttaatttcatctacaaaaactgttttcccaaataggtcacattcacgcatatcagatggacagatgtatcattttggggtccaccattcaacccactacaaggagttttttaaacaaaaataggaaacttagatgtaacttagcactttttttttttttttttgagatggagtctcactctgtcaccagactggagtgcagtggtgccatctcagctccatgcaacctctgcctcctgggttcaagcagttctcttgcctcagcctcctgggtagctgggattacaggcacgcgctgccacacccaggtaatttatttattttttt

SEQ ID NO: 28333 - DNA, 532 bp, Homo sapiens
  source 1..532: mol_type = unassigned DNA
gcgcagtgcggggatccccgcttcagtcggcagagagagagctcgcgggtggttccggtccggcttttcaggccggacgggtgcctgcccctcaggtgcgagtttgtgcggtaaagaacacaccccggagatgtggacacggccgccccaggagggtccttgtttggagacttaccttcaatctgttcagtctccatccacccctctccgcctctgcatggggataaaggtggaaatcaacgagaacttgcccgccagaaaaacatgaagaaaacccaggaaattagcaagggaaagaggaaagaggatagcttgactgcctctcagagaaagcagagttctggaggccagaaatctgagagcaagatgtcagctgggccacacctccctctgaaggctccaagggagaatccttgctttcctcttccagctgctggtggctccaggtattacttggcttatggcagcataactcctatctctgcctttgtctttgtggtcttcttttctgtcttcttcccttctttttatg

SEQ ID NO: 28334 - DNA, 4863 bp, Homo sapiens
  source 1..4863: mol_type = unassigned DNA
ggaagatggctgcggagccgagcaccgggcagtggctgcggcggcggcggcggcggcgggccgggagcgcggcgggcgggggctccgccttgcgcgtggggcgctgagccgagaggcgcggaggcggcgagggcgcgggggctctgaggaccgctcggcgccgcctcctgccacaccatgggcagcgcagaggacgcagtcaaagagaaactgctgtggaacgtgaagaaggaggtgaagcaaatcatggaggaggctgtcaccaggaagtttgtgcatgaagacagcagccacatcattgctttatgtggtgcagtggaggcttgcctcttgcatcagctgagacgccgtgccgctggcttcctgcgcagtgacaagatggcagccctgttcaccaaggtggggaagacgtgcccagtggcgggggagatttgccacaaggtacaggagctgcagcaacaagcagagggcaggaaaccctcaggggtcagccaggaggccctgcggagacagggctcagccagcgggaaggccccggccctcagccctcaggccttgaaacacgtatgggtacgcacggcgctcatcgagaaagttctggacaaggtcgtgcaatacctggcggaaaactgcagcaagtactacgagaaggaggcactgctggcagaccctgtgttcggcccgatcctggcctctcttctagtgggaccctgtgccttggaatacactaagctcaagacagccgatcactactggactgacccctctgctgatgagctggtccagcggcaccgcatccggggtccacctactcgccaggactcccctgcaaagcgcccagccctggggatccggaaacggcactcaagcggcagcgcgtcggaggacaggctggctgcctgtgcccgcgagtgtgtggagtccctgcaccagaactcacggacgcggctgctctatggcaagaaccacgtgctggtgcagccgaaggaggatatggaggcggtccctggctacctctccctgcaccagtctgcagagagcctgactctgaagtggacccccaaccagctcatgaatgggactctgggggactccgagctggaaaagagcgtttactgggactatgccctcgtggtgcccttcagccaggtcgtgtgcatccactgccaccagcaaaagagcggtggcacgcttgtgctggtgagccaggatggcatccagaggccgccgctgcatttcccacagggaggacacctgctgtcctttctgtcctgtctggagaatgggctgctgcctcggggacagctagagcccccgctgtggacccagcaagggaaggggaaagtgttccccaagctacggaaacgaagcagcattcgctccgtggatatggaggagatgggcacggggcgggccaccgactatgtgttccggatcatctaccccggccacaggcacgagcacatcactattaactaccaccacctagcggccagccgcgcggcctcggtggacgatgatgaggaagaggaggataaactgcacgcgatgctctcaatgatctgctcgcggaacctcacagctcccaatccgatgaaagacgctggtgacatgatcgagatgcagggctttgggcccagcctgccagcctggcacctggagcccctgtgcagtcagggctcctcctgcctctcctgctcctccagcagctccccacatgcaacccccagccactgtagctgcatccccgaccggttgccgctcaggctactgtgtgagagtatgaagaggcagatcgtgtcccgggccttctacggctggctggcacactgccgccacctgtccacggtgcggacccacctgtcggcgctggtgcaccatagcgttatcccacctgaccggcccccgggggcctccgcgggcctcaccaaggacgtgtggagcaagtatcagaaggacaaaaagaactacaaagagctggagctgctgcggcaagtttactacggaggcatagagcacgagatccgcaaggacgtctggccctttctgcttggccactacaagttcggcatgagcaagaaggagatggagcaggtggacgcagtggtggcagcaaggtaccagcaggtgttggcagagtggaaggcctgcgaggtggtggtgaggcagcgggagcgggaggcccacccagccacacgcaccaagttctcctcaggcagcagcatcgacagccacgtgcagcgcctcatccaccgagactccaccatcagcaacgatgtgtttatctcagtggatgatctggaacccccggagccccaggaccctgaagattccagaccaaaacctgagcaggaagcaggacccgggactccgggcaccgccgtggtggagcagcagcattccgtggagttcgactctccagactcaggactgccctcctctcgcaattactccgtggcctcgggcatccagtcaagcctagatgaggggcagagcgtgggcttcgaagaggaggacggcggtggggaggaaggctccagtgggcccggccctgcagctcacactttgagggagccccaggatcccagccaggagaagcctcaggccggagaactggaggccggagaggagcttgcggctgtgtgtgcggctgcctacactatagaattactggacactgtggccttaaacctgcaccgcatagacaaggatgtgcagaggtgtgaccgcaactactggtacttcacgccccccaacctcgagaggctcagagacgtcatgtgcagctacgtgtgggagcacctggacgtgggctatgtgcagggcatgtgcgatctgctggcgcctctcctggtcaccctcgacaatgatcagctggcctacagctgcttcagccacctcatgaagaggatgagccagaacttccccaacgggggtgccatggacacccactttgccaacatgcgctccctcatccagatcctggactcagagctgtttgagctgatgcatcagaatggagactacacccacttctacttctgttatcgctggttcctgctggattttaagagagaactgctgtatgaggatgtgtttgctgtgtgggaggtgatctgggcagccaggcacatctcatcggagcactttgtcctgttcatcgccctcgccctggtggaggcctaccgagagatcatccgtgacaacaacatggacttcactgacatcatcaagtttttcaatgaacgtgctgagcatcacgatgcccaggagatcctgcggattgcccgggacctcgtccacaaggtgcagatgctcatagagaacaagtgagctggggccaggaggcagcagccgtgcagagcctgggctccggcagggagaggtgcaggggagtcaccgcccagacctccccagccaccaaccgaccccacctctgttcctaacaaagcggttgtgagcctggatccgactcccggcagtgctgaccctgcagggcaagtcaggggccaggatgccctcggatcagggccgggatgggaggggtcagcctcagggagcagctgccttgggggacacacctactctgctcccctctcacacatctgggagtagccccactgccacctgcagccgcagcctggactgctgcccacgagtgaacctggggccccacaggattaacaggggctatagcggcctgggccctactcagctggggtggcagagggcgagaggctctgtgctgtgtcccttctgagggtccctttgcagtcccagtatattgtgcgtgcaccagccccagctggagcaaccaaaactgcttctggtttaggcacacgtcacgggtgcgggagacccgggcacgggagacccgggccgccttcaggccgctcccccgagattctggggcagtcggaagatgtgggccctgggtgggagcagcccacttcagcagcactgccactgcctttggccacctgaggtgacccccaggcctccccggccttgtacagtgtacctctgtgtatctgtacagcctcgctcctgccaccccacccttgcgttctgcattaggtacttccctgaaaaccacgtgtaagaagtgatgcttttgccagtggatgatctggaatgcgaccggagcacttgctctgaggaatcccagggtgactctgtcggggaagaatccggtcacagcctcccctcagagacaggcctcagttcgagggcagcccattatctgtcgcagacatctgccatgtccctgagactgcgggaggcaggggatgcatgggtgtccccatctgtccctggtgagaagcaaggctagctctgccttccacatgcttctcaggatgccaagaggcctaggaacccagaaacccccttggaggagctgtgtatgcgggggtgccaggaagggcatagctcctgcccccaggcctaggcatgctgcttgctcggccatccccacttcctcctctaccccaacacatgcaggctaggccttgccctggaacatggaggccctgcccggggctggggcctagtccagcagccaccaaagtctggcagactttctgcatttgagaaacatgacaaagggccccgcagcccttctgcacccagcacagcctgcccagcccagccctgcccccgggcactgcacagcctgtctgggggccagaccaccccattgtccatccttgttgtccgtgagtccttggcctccaccaagcacgtgtggccattgtgtgcctgccttagtgactccgtggttttgtgaggagcagagtgtgtatgatttttgcctcagaaactatactcttctgtgtaacagaccaataaacaacatttgtc

SEQ ID NO: 28335 - DNA, 4728 bp, Homo sapiens
  source 1..4728: mol_type = unassigned DNA
ggaagatggctgcggagccgagcaccgggcagtggctgcggcggcggcggcggcggcgggccgggagcgcggcgggcgggggctccgccttgcgcgtggggcgctgagccgagaggcgcggaggcggcgagggcgcgggggctctgaggaccgctcggcgccgcctcctgccacaccatgggcagcgcagaggacgcagtcaaagagaaactgctgtggaacgtgaagaaggaggtgaagcaaatcatggaggaggctgtcaccaggaagtttgtgcatgaagacagcagccacatcattgctttatgtggtgcagtggaggcttgcctcttgcatcagctgagacgccgtgccgctggcttcctgcgcagtgacaagatggcagccctgttcaccaaggtggggaagacgtgcccagtggcgggggagatttgccacaaggtacaggagctgcagcaacaagcagagggcaggaaaccctcaggggtcagccaggaggccctgcggagacagggctcagccagcgggaaggccccggccctcagccctcaggccttgaaacacgtatgggtacgcacggcgctcatcgagaaagttctggacaaggtcgtgcaatacctggcggaaaactgcagcaagtactacgagaaggaggcactgctggcagaccctgtgttcggcccgatcctggcctctcttctagtgggaccctgtgccttggaatacactaagctcaagacagccgatcactactggactgacccctctgctgatgagctggtccagcggcaccgcatccggggtccacctactcgccaggactcccctgcaaagcgcccagccctggggatccggaaacggcactcaagcggcagcgcgtcggaggacaggctggctgcctgtgcccgcgagtgtgtggagtccctgcaccagaactcacggacgcggctgctctatggcaagaaccacgtgctggtgcagccgaaggaggatatggaggcggtccctggctacctctccctgcaccagtctgcagagagcctgactctgaagtggacccccaaccagctcatgaatgggactctgggggactccgagctggaaaagagcgtttactgggactatgccctcgtggtgcccttcagccaggtcgtgtgcatccactgccaccagcaaaagagcggtggcacgcttgtgctggtgagccaggatggcatccagaggccgccgctgcatttcccacagggaggacacctgctgtcctttctgtcctgtctggagaatgggctgctgcctcggggacagctagagcccccgctgtggacccagcaagggaaggggaaagtgttccccaagctacggaaacgaagcagcattcgctccgtggatatggaggagatgggcacggggcgggccaccgactatgtgttccggatcatctaccccggccacaggcacgagcacaacgctggtgacatgatcgagatgcagggctttgggcccagcctgccagcctggcacctggagcccctgtgcagtcagggctcctcctgcctctcctgctcctccagcagctccccacatgcaacccccagccactgtagctgcatccccgaccggttgccgctcaggctactgtgtgagagtatgaagaggcagatcgtgtcccgggccttctacggctggctggcacactgccgccacctgtccacggtgcggacccacctgtcggcgctggtgcaccatagcgttatcccacctgaccggcccccgggggcctccgcgggcctcaccaaggacgtgtggagcaagtatcagaaggacaaaaagaactacaaagagctggagctgctgcggcaagtttactacggaggcatagagcacgagatccgcaaggacgtctggccctttctgcttggccactacaagttcggcatgagcaagaaggagatggagcaggtggacgcagtggtggcagcaaggtaccagcaggtgttggcagagtggaaggcctgcgaggtggtggtgaggcagcgggagcgggaggcccacccagccacacgcaccaagttctcctcaggcagcagcatcgacagccacgtgcagcgcctcatccaccgagactccaccatcagcaacgatgtgtttatctcagtggatgatctggaacccccggagccccaggaccctgaagattccagaccaaaacctgagcaggaagcaggacccgggactccgggcaccgccgtggtggagcagcagcattccgtggagttcgactctccagactcaggactgccctcctctcgcaattactccgtggcctcgggcatccagtcaagcctagatgaggggcagagcgtgggcttcgaagaggaggacggcggtggggaggaaggctccagtgggcccggccctgcagctcacactttgagggagccccaggatcccagccaggagaagcctcaggccggagaactggaggccggagaggagcttgcggctgtgtgtgcggctgcctacactatagaattactggacactgtggccttaaacctgcaccgcatagacaaggatgtgcagaggtgtgaccgcaactactggtacttcacgccccccaacctcgagaggctcagagacgtcatgtgcagctacgtgtgggagcacctggacgtgggctatgtgcagggcatgtgcgatctgctggcgcctctcctggtcaccctcgacaatgatcagctggcctacagctgcttcagccacctcatgaagaggatgagccagaacttccccaacgggggtgccatggacacccactttgccaacatgcgctccctcatccagatcctggactcagagctgtttgagctgatgcatcagaatggagactacacccacttctacttctgttatcgctggttcctgctggattttaagagagaactgctgtatgaggatgtgtttgctgtgtgggaggtgatctgggcagccaggcacatctcatcggagcactttgtcctgttcatcgccctcgccctggtggaggcctaccgagagatcatccgtgacaacaacatggacttcactgacatcatcaagtttttcaatgaacgtgctgagcatcacgatgcccaggagatcctgcggattgcccgggacctcgtccacaaggtgcagatgctcatagagaacaagtgagctggggccaggaggcagcagccgtgcagagcctgggctccggcagggagaggtgcaggggagtcaccgcccagacctccccagccaccaaccgaccccacctctgttcctaacaaagcggttgtgagcctggatccgactcccggcagtgctgaccctgcagggcaagtcaggggccaggatgccctcggatcagggccgggatgggaggggtcagcctcagggagcagctgccttgggggacacacctactctgctcccctctcacacatctgggagtagccccactgccacctgcagccgcagcctggactgctgcccacgagtgaacctggggccccacaggattaacaggggctatagcggcctgggccctactcagctggggtggcagagggcgagaggctctgtgctgtgtcccttctgagggtccctttgcagtcccagtatattgtgcgtgcaccagccccagctggagcaaccaaaactgcttctggtttaggcacacgtcacgggtgcgggagacccgggcacgggagacccgggccgccttcaggccgctcccccgagattctggggcagtcggaagatgtgggccctgggtgggagcagcccacttcagcagcactgccactgcctttggccacctgaggtgacccccaggcctccccggccttgtacagtgtacctctgtgtatctgtacagcctcgctcctgccaccccacccttgcgttctgcattaggtacttccctgaaaaccacgtgtaagaagtgatgcttttgccagtggatgatctggaatgcgaccggagcacttgctctgaggaatcccagggtgactctgtcggggaagaatccggtcacagcctcccctcagagacaggcctcagttcgagggcagcccattatctgtcgcagacatctgccatgtccctgagactgcgggaggcaggggatgcatgggtgtccccatctgtccctggtgagaagcaaggctagctctgccttccacatgcttctcaggatgccaagaggcctaggaacccagaaacccccttggaggagctgtgtatgcgggggtgccaggaagggcatagctcctgcccccaggcctaggcatgctgcttgctcggccatccccacttcctcctctaccccaacacatgcaggctaggccttgccctggaacatggaggccctgcccggggctggggcctagtccagcagccaccaaagtctggcagactttctgcatttgagaaacatgacaaagggccccgcagcccttctgcacccagcacagcctgcccagcccagccctgcccccgggcactgcacagcctgtctgggggccagaccaccccattgtccatccttgttgtccgtgagtccttggcctccaccaagcacgtgtggccattgtgtgcctgccttagtgactccgtggttttgtgaggagcagagtgtgtatgatttttgcctcagaaactatactcttctgtgtaacagaccaataaacaacatttgtc

SEQ ID NO: 28336 - DNA, 2315 bp, Homo sapiens
  source 1..2315: mol_type = unassigned DNA
gcagaagggaagcaactccgggcgcctttcttttgcgcaggcgtcgcgccctggggccggggccgggcggcaccgcggtgcgcaagcgcaaccgtcggtgggtcggggatcggtcgcctgagaggtatcacctcttctgggctcaagatggacaacaagaagcgcctggcctacgccatcatccagttcctgcatgaccagctccggcacgggggcctctcgtccgatgctcaggagagcttggaagtcgccatccagtgcctggagactgcgtttggggtgacggtagaagacagtgaccttgcgctccctcagactctgccggagatatttgaagcggctgccacgggcaaggagatgccgcaggacctgaggagccccgcgcgaaccccgccttccgaggaggactcagcagaggcagagcgcctcaaaaccgaaggaaacgagcagatgaaagtggaaaactttgaagctgccgtgcatttctacggaaaagccatcgagctcaacccagccaacgccgtctatttctgcaacagagccgcagcctacagcaaactcggcaactacgcaggcgcggtgcaggactgtgagcgggccatctgcattgacccggcctacagcaaggcctacggcaggatgggcctggcgctctccagcctcaacaagcacgtggaggccgtggcttactacaagaaggctctggagctggaccccgacaacgagacatacaagtccaacctcaagatagcggagctgaagctgcgggaggcccccagccccacgggaggcgtgggcagcttcgacatcgccggcctgctgaacaaccctggcttcatgagcatggcttcgaacctaatgaacaatccccagattcagcagctcatgtccggcatgatttcgggtggcaacaaccccttgggaactcccggcaccagcccctcgcagaacgacctggccagcctcatccaggcgggccagcagtttgcccagcagatgcagcagcagaacccagagttgatagagcagctcaggagccagatccggagtcggacgcccagcgccagcaacgacgaccagcaggagtgacgctgcctgctcccggtgtgaccgcgtccttccctggccgacccgaaggaagccttctggttgtctgccacttcctcctgttggactgcctgagagaggggaagagagagacctcggacctgcatgtcaagatggattttccccttttatctctgccctcctccactccctttttgtaactcccttacagcccccagacccttcttgaaacgagagccagcaagctgagcacagaccagcagcgacctcccttccagcccccagaaagctcggtcacttgagtgttttctagaatcctggggtgctcccgggccgctctcagagaagtggcaggtttcacgttcagccgtgtggcggatcgtgtggcttccaaagccttttacagcccccgccccccatcccgtggtctgtctgcaggaactctcccgtctgtgagaagcctctttccgagtcgacctcccggccaccccggccctgtgcctgctcggaagagctcactgccagctgcggcctgggcaccgcgggccatgtgtgtttgcatgaggaactctttagtggcagacacctaagagacggctgcggtcaccccacgcctccgcggctcaggagccgtcctgggtgcataggaccagtttctgtgacttttctccagttgggcatgttgacagacatgtttcccctcctcccaccctcattttctggtcctcgcgactgagagccaggggcgacatcatgaccttctgtcccggccgccttagccccgggcacagggaaggcagctgggccgtttctgtctgtgtcccatcctgctgtccttctgtcctggatgtttcatgggcccggggccccccagggaagcttacccctcctgtgctgggtggaggccacgggacacctcaggtgccacccaccttggccctaaaacagccaccaggaaagcagccggagagccggacagcaggcagcctgtctgggttcctgaggcctgggggtggcagacgagcccacggcgccgtggtcccagcagcagggttgtcagtcggagcatcctggggctccctggctcctggccgtctgtgaggtaggcgcagtaccgtgtatcgtaggtagcagtaggaacgggggccgccgcggccctgcagccgctcatggcggtgaggtgtgtgccaagcccacccggggtgcagggcgtgacgtgtggggaataaataggcgttgtgacctct

SEQ ID NO: 28337 - DNA, 938 bp, Homo sapiens
  source 1..938: mol_type = unassigned DNA
aacacttagccttaacggtttaagttcccctccagccccgagccaggagcagttctcaataccgggagaggcacagagctatttcagccacatgaaaagcatcggaattgagatcgcagctcagaggacaccgggcgccccttccaccttccaaggagctttgtattcttgcatctggctgcctgggacttcccttaggcagtaaacaaatacataaagcagggataagactgcatgaatatgtcgaaacagccagtttccaatgttagagccatccaggcaaatatcaatattccaatgggagcctttcggccaggagcaggtcaaccccccagaagaaaagaatgtactcctgaagtggaggagggtgttcctcccacctcggatgaggagaagaagccaattccaggagcgaagaaacttccaggacctgcagtcaatctatcggaaatccagaatattaaaagtgaactaaaatatgtccccaaagctgaacagtagtaggaagaaaaaaggattgatgtgaagaaataaagaggcagaagatggattcaatagctcactaaaattttatatatttgtatgatgattgtgaacctcctgaatgcctgagactctagcagaaatggcctgtttgtacatttatatctcttccttctagttggctgtatttcttactttatcttcatttttggcacctcacagaacaaattagcccataaattcaacacctggagggtgtggttttgaggagggatatgattttatggagaatgatatggcaatgtgcctaacgattttgatgaaaagtttcccaagctacttcctacagtattttggtcaatatttggaatgcgttttagttcttcaccttttaaattatgtcactaaactttgtatgagttcaaataaatatttgactaaatgtaaaatgtgaa

SEQ ID NO: 28338 - DNA, 7165 bp, Homo sapiens
  source 1..7165: mol_type = unassigned DNA
cgggagcagagatctgcggccgtttgcagcttgcggtagggaggcgtggtggtctgaagcctccgagcagccgcggccatggcggatgtaaccgcccgtagtctgcaatacgagtacaaggcgaactcgaatcttgtgctccaagctgaccgttctctcattgaccggacccgccgggatgaacccacaggagaggtgctgtcccttgttgggaagctggagggcacccgtatgggagacaaggctcaacggaccaaaccgcagatgcaggaggaaagaagagccaagcgaagaaagcgtgatgaggaccggcatgacatcaacaagatgaagggttatactctgctgtcggagggcattgatgagatggtgggcatcatctacaagcccaaaactaaagagactcgggagacctatgaggtgctactcagcttcatccaggctgctcttggggaccagccacgtgatatcctttgtggggcagctgatgaagttctagctgttctaaagaatgaaaagctgcgggacaaggaaaggcgaaaggagattgacctgctgctgggtcaaacagatgataccagataccatgtgctagtgaacctgggcaaaaagatcacagactatggtggagataaggaaatccaaaatatggatgacaacattgatgagacatacggtgtgaatgtgcagtttgagtctgatgaggaggaaggtgatgaagacgtatacggggaggttcgagaagaggcatctgatgatgacatggaaggggacgaggctgtcgtgcgctgcaccctctcggctaatctcgtagcctcaggtgaactgatgagttccaagaagaaggatttgcaccctcgggatattgatgcattttggctgcagcggcagctcagtcgtttctatgatgatgccatcgtgtcgcagaagaaggcagatgaagtattggagattttgaagacggccagtgatgatcgggaatgtgaaaatcagctggttctgctgcttggtttcaacacctttgatttcattaaagtgttgcggcagcacaggatgatgattttatactgtaccttgctggccagtgcacaaagtgaagctgaaaaggaaaggattatgggaaagatggaagctgacccagagctatccaagttcctctaccagcttcatgaaaccgagaaggaggatctgatccgagaggaaaggtcccggagagagcgagtgcgtcagtctcgaatggacacagatctggaaaccatggatctcgaccagggtggagaggcactggctccacggcaggttctggacttggaggacctggtttttacccaagggagccactttatggccaataaacgctgtcagcttcctgatggatccttccgtcgccagcgtaagggctatgaagaggtgcatgtgcctgctctgaagcccaagccctttggctcagaagaacaactgcttccagtggaaaagctgccaaagtatgcccaggctgggtttgagggcttcaaaacactgaatcggatccagagtaagctctaccgtgctgcccttgagacggatgagaatctgctgctgtgtgctcctactggtgctgggaagaccaacgtggccctgatgtgcatgctccgagagattgggaaacacataaacatggacggcaccatcaatgtggatgacttcaagattatctacattgcccccatgcgctccttggtgcaggagatggtgggcagctttggaaagcgcctggccacttatggcatcactgttgctgaactgactggggaccaccagctgtgcaaagaagagatcagtgccactcagatcatcgtctgcacccccgagaagtgggacatcatcacccgcaagggtggtgagcgcacctacacccagctggtgcggctcatcattctggatgagattcatcttctccacgatgacagaggtcctgtcttagaagctttagtggccagggccatccgaaacattgagatgacccaagaggatgtccgactcattggtctcagtgccaccctacccaactatgaagatgtagccacctttctacgtgttgaccctgccaagggtctcttttactttgacaacagcttccgtccagtgcctctggaacagacatatgtgggtatcacagagaaaaaagctatcaagcgtttccagatcatgaatgaaatcgtctatgaaaaaatcatggaacatgctggaaaaaatcaggtgctggtgtttgtccactcccggaaggagactggaaagacagccagggccatccgggacatgtgcctagaaaaggacactctgggtctgtttctgagggagggctcagcctccacagaagtcctgcgaacagaagctgagcagtgcaagaacctagagctgaaggatcttctgccttatggctttgctattcatcacgcaggcatgaccagggttgaccgaacactcgtggaggatctttttgctgataaacatattcaggttttagtttccacagcaactctagcttggggtgtgaatctccctgcacatacagtcatcatcaaaggcacccaggtgtacagtccagagaaggggcgttggacagaactgggagcactggacattctgcagatgctgggacgtgccggaagaccccagtatgacaccaagggtgaaggcatactcatcacatctcatggggagctacagtactacctgtccctcctcaatcaacaacttcctattgaaagccagatggtttcaaagcttcctgacatgctcaatgcagaaatcgtgctaggaaatgtccagaatgccaaggatgcggtgaactggctgggctatgcctacctctatatccgaatgctgcgatccccaaccctctatggcatctctcatgatgacctcaagggagatcccctgctggaccagcgccgactagatctggttcatacagctgccctgatgctggacaagaacaatctggtcaagtacgacaagaagacgggcaacttccaggtgacagaactgggccgtatagccagccactactacatcaccaatgatacagtgcagacttacaaccagctgctgaagcccaccctgagtgagattgagcttttcagggtcttctcattgtcctctgagttcaagaacatcacagtgagagaggaggagaagctggagctgcagaagttgctggagagggtgcctatccctgtaaaggagagcattgaggaacccagtgctaagatcaacgttcttctgcaagccttcatctcacagctgaaattggagggctttgcactgatggctgacatggtgtatgtcacacagtcggctggccggttgatgcgagcgatatttgaaattgtcctgaaccgaggttgggcacagcttacagacaagaccctgaacctctgcaagatgatcgacaaacgcatgtggcagtccatgtgtcctctgcgccagttccggaaactccctgaggaagtagtgaagaagattgagaagaagaatttcccctttgagcgtctgtacgacctgaatcataatgagattggggagcttatccgcatgccaaagatggggaagaccatccacaaatatgtccatctgtttcccaagttggagttgtcagtgcacctgcagcctatcacacgctccaccctgaaggtggagctgaccatcacgccagacttccagtgggatgaaaaggtgcatggttcatccgaggctttttggattctggtggaggatgtggacagcgaggtgattctgcaccatgagtattttctcctcaaggccaagtacgcccaggacgagcacctcattacattcttcgtgcctgtctttgaaccgctgccccctcagtacttcatccgagtggtgtctgaccgctggctctcttgtgagacccagctgcctgtctccttccggcacctgatcttgccggagaagtacccccctccaaccgaacttttggacctgcagcccttgcccgtgtctgctctgagaaacagtgcctttgagagtctttaccaagataaatttcctttcttcaatcccatccagacccaggtgtttaacactgtatacaacagtgacgacaacgtgtttgtgggggcccccacgggcagcgggaagactatttgtgcagagtttgccatcctgcgaatgctgctgcagagctcggaggggcgctgtgtgtacatcacccccatggaggccctggcagagcaggtatacatggactggtacgagaagttccaggacaggctcaacaagaaggtggtactcctgacaggcgagaccagcacagacctgaagctgctgggcaaagggaacattatcatcagcacccctgagaagtgggacatactttcccggcgatggaagcagcgcaagaacgtgcagaacatcaacctcttcgtggtggatgaggtccaccttatcgggggcgagaatgggcctgtcttagaagtgatctgctcccgaatgcgctacatctcctcccagattgagcggcccattcgcattgtggcactcagctcttcgctctccaatgccaaggatgtggcccactggctgggctgcagtgccacctccaccttcaacttccatcccaatgtgcgtcccgtccccttggagctgcacatccagggcttcaacatcagccatacacaaacccgcctgctctccatggccaagcctgtgtaccatgctatcaccaagcactcgcccaagaagcctgtcattgtctttgtgccgtctcgcaagcagacccgcctcactgccattgacatcctcaccacctgtgcagcagacatccaacggcagaggttcttgcactgcaccgagaaggatctgattccgtacctggagaagctaagtgacagcacgctcaaggaaacgctgctaaatggggtgggctacctgcatgaggggctcagccccatggagcgacgcctggtggagcagctcttcagctcaggggctatccaggtggtggtggcttctcggagtctctgctggggcatgaacgtggctgcccacctggtaatcatcatggatacccagtactacaatggcaagatccacgcctatgtggattaccccatctatgacgtgcttcagatggtgggccacgccaaccgccctttgcaggacgatgaggggcgctgtgtcatcatgtgtcagggctccaagaaggatttcttcaagaagttcttatatgagccattgccagtagaatctcacctggaccactgtatgcatgaccacttcaatgctgagatcgtcaccaagaccattgagaacaagcaggatgctgtggactacctcacctggacctttctgtaccgccgcatgacacagaaccccaattactacaacctgcagggcatctcccatcgtcacttgtcggaccacttgtcagagctggtggagcagaccctgagtgacctggagcagtccaagtgcatcagcatcgaggacgagatggacgtggcgcctctgaacctaggcatgatcgccgcctactattacatcaactacaccaccattgagctcttcagcatgtccctcaatgccaagaccaaggtgcgagggcttatcgagatcatctccaatgcagcagagtatgagaacattcccatccggcaccatgaagacaatctcctgaggcagttggctcagaaggtcccccacaagctgaataaccctaagttcaatgatccgcacgtcaagaccaacctgctcctgcaggctcacttgtctcgcatgcagctgagtgctgagttgcagtcagatacggaggaaatccttagtaaggcaatccggctcatccaggcctgcgtggatgtcctttccagcaatgggtggctcagccctgctctggcagctatggaactggcccagatggtcacccaagccatgtggtccaaggactcatacctgaagcagctgccacacttcacctctgagcatatcaaacgttgcacagacaagggagtggagagtgttttcgacatcatggagatggaggatgaagaacggaacgcgttgcttcagctgactgacagccagattgcagatgtggctcgcttttgtaaccgctaccctaatatcgaactatcttatgaggtggtagataaggacagcatccgcagtggcgggccagttgtggtgctggtgcagctggagcgagaggaggaagtcacaggccctgtcattgcgcctctcttcccgcagaaacgtgaagagggctggtgggtggtgattggagatgccaagtccaatagcctcatctccatcaagaggctgaccttgcagcagaaggccaaggtgaagttggactttgtggccccagccactggtgcccacaactacactctgtacttcatgagtgacgcttacatgggatgtgaccaggagtacaaattcagcgtggatgtgaaagaagctgagacagacagtgattcagattgagtcctgaggcatttacttttgggtaaaggagagttgagcctgaattaggaatgtgtacattgtaggaatcctggttgtggggaccaggtctgtgggcctcaggtctggccagccagggctggtgctgtccccgcctacctccacttcctttcccttgctcactctggatccagtgacagcaggtgtcatgggtcaagcataaatcatatatagcattttcaggcatgttcctggtagttcttttgagtctgacattctaataaaataatttgtagaaaccatttgtctttgtagtgattccaaattaaaagttttctttctccaacctgagggcacggccaaaaagatctggttattttttagccaggaacgtgcttgttaatgagtatgtctggaggacagacctgctcattaggtgtgctgtcccctgtagcctcgtgagtcagcccagaggagggtacatgcgactgtggcctggcctcagtggtacccacacatcagcactaccacaagaaccaacactgagcctcggaagctagatcacaggttaggggtttctctagatgggggttctgaaatttgcagtgtctgctcctgggaggcagcaccagaaagggcactgaaatgtactagctggatgtgacccagtcttaataaacaggttttctaatccaga

SEQ ID NO: 28339 - DNA, 2673 bp, Homo sapiens
  source 1..2673: mol_type = unassigned DNA
cttttccttccccagtgcgtctttcctgcgtcgttccggcgcggcgggagcagagatctgcggccgtttgcagcttgcggtagggaggcgtggtggtctgaagcctccgagcagccgcggccatggcggatgtaaccgcccgtagtctgcaatacgagtacaaggcgaactcgaatcttgtgctccaagctgaccgttctctcattgaccggacccgccgggatgaacccacaggagaggtgctgtcccttgttgggaagctggagggcacccgtatgggagacaaggctcaacggaccaaaccgcagatgcaggaggaaagaagagccaagcgaagaaagcgtgatgaggaccggcatgacatcaacaagatgaagggttatactctgctgtcggagggcattgatgagatggtgggcatcatctacaagcccaaaactaaagagactcgggagacctatgaggtgctactcagcttcatccaggctgctcttggggaccagccacgtgatatcctttgtggggcagctgatgaagttctagctgttctaaagaatgaaaagctgcgggacaaggaaaggcgaaaggagattgacctgctgctgggtcaaacagatgataccagataccatgtgctagtgaacctgggcaaaaagatcacagactatggtggagataaggaaatccaaaatatggatgacaacattgatgagacatacggtgtgaatgtgcagtttgagtctgatgaggaggaaggtgatgaagacgtatacggggaggttcgagaagaggcatctgatgatgacatggaaggggacgaggctgtcgtgcgctgcaccctctcggctaatctcgtagcctcaggtgaactgatgagttccaagaagaaggatttgcaccctcgggatattgatgcattttggctgcagcggcagctcagtcgtttctatgatgatgccatcgtgtcgcagaagaaggcagatgaagtattggagattttgaagacggccagtgatgatcgggaatgtgaaaatcagctggttctgctgcttggtttcaacacctttgatttcattaaagtgttgcggcagcacaggatgatgattttatactgtaccttgctggccagtgcacaaagtgaagctgaaaaggaaaggattatgggaaagatggaagctgacccagagctatccaagttcctctaccagcttcatgaaaccgagaaggaggatctgatccgagaggaaaggtcccggagagagcgagtgcgtcagtctcgaatggacacagatctggaaaccatggatctcgaccagggtggagaggcactggctccacggcaggttctggacttggaggacctggtttttacccaagggagccactttatggccaataaacgctgtcagcttcctgatggatccttccgtcgccagcgtaagggctatgaagaggtgcatgtgcctgctctgaagcccaagccctttggctcagaagaacaactgcttccagtggaaaagctgccaaagtatgcccaggctgggtttgagggcttcaaaacactgaatcggatccagagtaagctctaccgtgctgcccttgagacggatgagaatctgctgctgtgtgctcctactggtgctgggaagaccaacgtggccctgatgtgcatgctccgagagattgggaaacacataaacatggacggcaccatcaatgtggatgacttcaagattatctacattgcccccatgcgctccttggtgcaggagatggtgggcagctttggaaagcgtgatgccaagtccaatagcctcatctccatcaagaggctgaccttgcagcagaaggccaaggtgaagttggactttgtggccccagccactggtgcccacaactacactctgtacttcatgagtgacgcttacatgggatgtgaccaggagtacaaattcagcgtggatgtgaaagaagctgagacagacagtgattcagattgagtcctgaggcatttacttttgggtaaaggagagttgagcctgaattaggaatgtgtacattgtaggaatcctggttgtggggaccaggtctgtgggcctcaggtctggccagccagggctggtgctgtccccgcctacctccacttcctttcccttgctcactctggatccagtgacagcaggtgtcatgggtcaagcataaatcatatatagcattttcaggcatgttcctggtagttcttttgagtctgacattctaataaaataatttgtagaaaccatttgtctttgtagtgattccaaattaaaagttttctttctccaacctgagggcacggccaaaaagatctggttattttttagccaggaacgtgcttgttaatgagtatgtctggaggacagacctgctcattaggtgtgctgtcccctgtagcctcgtgagtcagcccagaggagggtacatgcgactgtggcctggcctcagtggtacccacacatcagcactaccacaagaaccaacactgagcctcggaagctagatcacaggttaggggtttctctagatgggggttctgaaatttgcagtgtctgctcctgggaggcagcaccagaaagggcactgaaatgtactagctggatgtgacccagtcttaataaacaggttttctaatcc

SEQ ID NO: 28340 - DNA, 2637 bp, Homo sapiens
  source 1..2637: mol_type = unassigned DNA
ttgatacttacactgcttctttctgttggtttccagtgtttaacactgtatacaacagtgacgacaacgtgtttgtgggggcccccacgggcagcgggaagactatttgtgcagagtttgccatcctgcgaatgctgctgcagagctcggaggggcgctgtgtgtacatcacccccatggaggccctggcagagcaggcgagaccagcacagacctgaagctgctgggcaaagggaacattatcatcagcacccctgagaagtgggacatactttcccggcgatggaagcagcgcaagaacgtgcagaacatcaacctcttcgtggtggatgaggtccaccttatcgggggcgagaatgggcctgtcttagaagtgatctgctcccgaatgcgctacatctcctcccagattgagcggcccattcgcattgtggcactcagctcttcgctctccaatgccaaggatgtggcccactggctgggctgcagtgccacctccaccttcaacttccatcccaatgtgcgtcccgtccccttggagctgcacatccagggcttcaacatcagccatacacaaacccgcctgctctccatggccaagcctgtgtaccatgctatcaccaagcactcgcccaagaagcctgtcattgtctttgtgccgtctcgcaagcagacccgcctcactgccattgacatcctcaccacctgtgcagcagacatccaacggcagaggttcttgcactgcaccgagaaggatctgattccgtacctggagaagctaagtgacagcacgctcaaggaaacgctgctaaatggggtgggctacctgcatgaggggctcagccccatggagcgacgcctggtggagcagctcttcagctcaggggctatccaggtggtggtggcttctcggagtctctgctggggcatgaacgtggctgcccacctggtaatcatcatggatacccagtactacaatggcaagatccacgcctatgtggattaccccatctatgacgtgcttcagatggtgggccacgccaaccgccctttgcaggacgatgaggggcgctgtgtcatcatgtgtcagggctccaagaaggatttcttcaagaagttcttatatgagccattgccagtagaatctcacctggaccactgtatgcatgaccacttcaatgctgagatcgtcaccaagaccattgagaacaagcaggatgctgtggactacctcacctggacctttctgtaccgccgcatgacacagaaccccaattactacaacctgcagggcatctcccatcgtcacttgtcggaccacttgtcagagctggtggagcagaccctgagtgacctggagcagtccaagtgcatcagcatcgaggacgagatggacgtggcgcctctgaacctaggcatgatcgccgcctactattacatcaactacaccaccattgagctcttcagcatgtccctcaatgccaagaccaaggtgcgagggcttatcgagatcatctccaatgcagcagagtatgagaacattcccatccggcaccatgaagacaatctcctgaggcagttggctcagaaggtcccccacaagctgaataaccctaagttcaatgatccgcacgtcaagaccaacctgctcctgcaggctcacttgtctcgcatgcagctgagtgctgagttgcagtcagatacggaggaaatccttagtaaggcaatccggctcatccaggcctgcgtggatgtcctttccagcaatgggtggctcagccctgctctggcagctatggaactggcccagatggtcacccaagccatgtggtccaaggactcatacctgaagcagctgccacacttcacctctgagcatatcaaacgttgcacagacaagggagtggagagtgttttcgacatcatggagatggaggatgaagaacggaacgcgttgcttcagctgactgacagccagattgcagatgtggctcgcttttgtaaccgctaccctaatatcgaactatcttatgaggtggtagataaggacagcatccgcagtggcgggccagttgtggtgctggtgcagctggagcgagaggaggaagtcacaggccctgtcattgcgcctctcttcccgcagtttagggccgggcgcagtggctcacgcctgtaatcccagcactttgggaggccaaggcgggcggatcacgaggtcaggagttcgagaccagcctggccaacatagtgaaaccccgtctctactaaaaatacaaaaattagctgtgcgtggtggtgggcacctgtagtcccagctactcaggaggttgagtcaggagaatggtgtgaacccaggaggcggaggctgcagcgagccgagattgccccactgcacaccagcccagaaacgtgaagagggctggtgggtggtgattggagatgccaagtccaatagcctcatctccatcaagaggctgaccttgcagcagaaggccaaggtgaagttggactttgtggccccagccactggtgcccacaactacactctgtacttcatgagtgacgcttacatgggatgtgaccaggagtacaaattcagcgtggatgtgaaagaagctgagacagacagtgattcag

SEQ ID NO: 28341 - DNA, 2541 bp, Homo sapiens
  source 1..2541: mol_type = unassigned DNA
gtttgcagcttgcggtagggaggcgtggtggtctgaagcctccgagcagccgcggccatggcggatgtaaccgcccgtagtctgcaatacgagtacaaggcgaactcgaatcttgtgctccaagctgaccgttctctcattgaccggacccgccgggatgaacccacaggagaggtgctgtcccttgttgggaagctggagggcacccgtatgggagacaaggctcaacggaccaaaccgcagatgcaggaggaaagaagagccatacacaaacccgcctgctctccatggccaagcctgtgtaccatgctatcaccaagcactcgcccaagaagcctgtcattgtctttgtgccgtctcgcaagcagacccgcctcactgccattgacatcctcaccacctgtgcagcagacatccaacggcagaggttcttgcactgcaccgagaaggatctgattccgtacctggagaagctaagtgacagcacgctcaaggaaacgctgctaaatggggtgggctacctgcatgaggggctcagccccatggagcgacgcctggtggagcagctcttcagctcaggggctatccaggtggtggtggcttctcggagtctctgctggggcatgaacgtggctgcccacctggtaatcatcatggatacccagtactacaatggcaagatccacgcctatgtggattaccccatctatgacgtgcttcagatggtgggccacgccaaccgccctttgcaggacgatgaggggcgctgtgtcatcatgtgtcagggctccaagaaggatttcttcaagaagttcttatatgagccattgccagtagaatctcacctggaccactgtatgcatgaccacttcaatgctgagatcgtcaccaagaccattgagaacaagcaggatgctgtggactacctcacctggacctttctgtaccgccgcatgacacagaaccccaattactacaacctgcagggcatctcccatcgtcacttgtcggaccacttgtcagagctggtggagcagaccctgagtgacctggagcagtccaagtgcatcagcatcgaggacgagatggacgtggcgcctctgaacctaggcatgatcgccgcctactattacatcaactacaccaccattgagctcttcagcatgtccctcaatgccaagaccaaggtgcgagggcttatcgagatcatctccaatgcagcagagtatgagaacattcccatccggcaccatgaagacaatctcctgaggcagttggctcagaaggtcccccacaagctgaataaccctaagttcaatgatccgcacgtcaagaccaacctgctcctgcaggctcacttgtctcgcatgcagctgagtgctgagttgcagtcagatacggaggaaatccttagtaaggcaatccggctcatccaggcctgcgtggatgtcctttccagcaatgggtggctcagccctgctctggcagctatggaactggcccagatggtcacccaagccatgtggtccaaggactcatacctgaagcagctgccacacttcacctctgagcatatcaaacgttgcacagacaagggagtggagagtgttttcgacatcatggagatggaggatgaagaacggaacgcgttgcttcagctgactgacagccagattgcagatgtggctcgcttttgtaaccgctaccctaatatcgaactatcttatgaggtggtagataaggacagcatccgcagtggcgggccagttgtggtgctggtgcagctggagcgagaggaggaagtcacaggccctgtcattgcgcctctcttcccgcagaaacgtgaagagggctggtgggtggtgattggagatgccaagtccaatagcctcatctccatcaagaggctgaccttgcagcagaaggccaaggtgaagttggactttgtggccccagccactggtgcccacaactacactctgtacttcatgagtgacgcttacatgggatgtgaccaggagtacaaattcagcgtggatgtgaaagaagctgagacagacagtgattcagattgagtcctgaggcatttacttttgggtaaaggagagttgagcctgaattaggaatgtgtacattgtaggaatcctggttgtggggaccaggtctgtgggcctcaggtctggccagccagggctggtgctgtccccgcctacctccacttcctttcccttgctcactctggatccagtgacagcaggtgtcatgggtcaagcataaatcatatatagcattttcaggcatgttcctggtagttcttttgagtctgacattctaataaaataatttgtagaaaccatttgtctttgtagtgattccaaattaaaagttttctttctccaacctgagggcacggccaaaaagatctggttattttttagccaggaacgtgcttgttaatgagtatgtctggaggacagacctgctcattaggtgtgctgtcccctgtagcctcgtgagtcagcccagaggagggtacatgcg

SEQ ID NO: 28342 - DNA, 5834 bp, Homo sapiens
  source 1..5834: mol_type = unassigned DNA
cagatgaagtattggagattttgaagacggccagtgatgatcgggaatgtgaaaatcagctggttctgctgcttggtttcaacacctttgatttcattaaagtgttgcggcagcacaggatgatgattttatactgtaccttgctggccagtgcacaaagtgaagctgaaaaggaaaggattatgggaaagatggaagctgacccagagctatccaagttcctctaccagcttcatgaaaccgagaaggaggatctgatccgagaggaaaggtcccggagagagcgagtgcgtcagtctcgaatggacacagatctggaaaccatggatctcgaccagggtggagaggcactggctccacggcaggttctggacttggaggacctggtttttacccaagggagccactttatggccaataaacgctgtcagcttcctgatggatccttccgtcgccagcgtaagggctatgaagaggtgcatgtgcctgctctgaagcccaagccctttggctcagaagaacaactgcttccagtggaaaagctgccaaagtatgcccaggctgggtttgagggcttcaaaacactgaatcggatccagagtaagctctaccgtgctgcccttgagacggatgagaatctgctgctgtgtgctcctactggtgctgggaagaccaacgtggccctgatgtgcatgctccgagagattgggaaacacataaacatggacggcaccatcaatgtggatgacttcaagattatctacattgcccccatgcgctccttggtgcaggagatggtgggcagctttggaaagcgcctggccacttatggcatcactgttgctgaactgactggggaccaccagctgtgcaaagaagagatcagtgccactcagatcatcgtctgcacccccgagaagtgggacatcatcacccgcaagggtggtgagcgcacctacacccagctggtgcggctcatcattctggatgagattcatcttctccacgatgacagaggtcctgtcttagaagctttagtggccagggccatccgaaacattgagatgacccaagaggatgtccgactcattggtctcagtgccaccctacccaactatgaagatgtagccacctttctacgtgttgaccctgccaagggtctcttttactttgacaacagcttccgtccagtgcctctggaacagacatatgtgggtatcacagagaaaaaagctatcaagcgtttccagatcatgaatgaaatcgtctatgaaaaaatcatggaacatgctggaaaaaatcaggtgctggtgtttgtccactcccggaaggagactggaaagacagccagggccatccgggacatgtgcctagaaaaggacactctgggtctgtttctgagggagggctcagcctccacagaagtcctgcgaacagaagctgagcagtgcaagaacctagagctgaaggatcttctgccttatggctttgctattcatcacgcaggcatgaccagggttgaccgaacactcgtggaggatctttttgctgataaacatattcaggttttagtttccacagcaactctagcttggggtgtgaatctccctgcacatacagtcatcatcaaaggcacccaggtgtacagtccagagaaggggcgttggacagaactgggagcactggacattctgcagatgctgggacgtgccggaagaccccagtatgacaccaagggtgaaggcatactcatcacatctcatggggagctacagtactacctgtccctcctcaatcaacaacttcctattgaaagccagatggtttcaaagcttcctgacatgctcaatgcagaaatcgtgctaggaaatgtccagaatgccaaggatgcggtgaactggctgggctatgcctacctctatatccgaatgctgcgatccccaaccctctatggcatctctcatgatgacctcaagggagatcccctgctggaccagcgccgactagatctggttcatacagctgccctgatgctggacaagaacaatctggtcaagtacgacaagaagacgggcaacttccaggtgacagaactgggccgtatagccagccactactacatcaccaatgatacagtgcagacttacaaccagctgctgaagcccaccctgagtgagattgagcttttcagggtcttctcattgtcctctgagttcaagaacatcacagtgagagaggaggagaagctggagctgcagaagttgctggagagggtgcctatccctgtaaaggagagcattgaggaacccagtgctaagatcaacgttcttctgcaagccttcatctcacagctgaaattggagggctttgcactgatggctgacatggtgtatgtcacacagtcggctggccggttgatgcgagcgatattgaaattgtcctgaaccgaggttgggcacagcttacagacaagaccctgaacctctgcaagatgatcgacaaacgcatgtggcagtccatgtgtcctctgcgccagttccggaaactccctgaggaagtagtgaagaagattgagaagaagaatttcccctttgagcgtctgtacgacctgaatcataatgagattggggagcttatccgcatgccaaagatggggaagaccatccacaaatatgtccatctgtttcccaagttggagttgtcagtgcacctgcagcctatcacacgctccaccctgaaggtggagctgaccatcacgccagacttccagtgggatgaaaaggtgcatggttcatccgaggctttttggattctggtggaggatgtggacagcgaggtgattctgcaccatgagtattttctcctcaaggccaagtacgcccaggacgagcacctcattacattcttcgtgcctgtctttgaaccgctgccccctcagtacttcatccgagtggtgtctgaccgctggctctcttgtgagacccagctgcctgtctccttccggcacctgatcttgccggagaagtacccccctccaaccgaacttttggacctgcagcccttgcccgtgtctgctctgagaaacagtgcctttgagagtctttaccaagataaatttcctttcttcaatcccatccagacccaggtgtttaacactgtatacaacagtgacgacaacgtgtttgtgggggcccccacgggcagcgggaagactatttgtgcagagtttgccatcctgcgaatgctgctgcagagctcggaggggcgctgtgtgtacatcacccccatggaggccctggcagagcaggtatacatggactggtacgagaagttccaggacaggctcaacaagaaggtggtactcctgacaggcgagaccagcacagacctgaagctgctgggcaaagggaacattatcatcagcacccctgagaagtgggacatactttcccggcgatggaagcagcgcaagaacgtgcagaacatcaacctcttcgtggtggatgaggtccaccttatcgggggcgagaatgggcctgtcttagaagtgatctgctcccgaatgcgctacatctcctcccagattgagcggcccattcgcattgtggcactcagctcttcgctctccaatgccaaggatgtggcccactggctgggctgcagtgccacctccaccttcaacttccatcccaatgtgcgtcccgtccccttggagctgcacatccagggcttcaacatcagccatacacaaacccgcctgctctccatggccaagcctgtgtaccatgctatcaccaagcactcgcccaagaagcctgtcattgtctttgtgccgtctcgcaagcagacccgcctcactgccattgacatcctcaccacctgtgcagcagacatccaacggcagaggttcttgcactgcaccgagaaggatctgattccgtacctggagaagctaagtgacagcacgctcaaggaaacgctgctaaatggggtgggctacctgcatgaggggctcagccccatggagcgacgcctggtggagcagctcttcagctcaggggctatccaggtggtggtggcttctcggagtctctgctggggcatgaacgtggctgcccacctggtaatcatcatggatacccagtactacaatggcaagatccacgcctatgtggattaccccatctatgacgtgcttcagatggtgggccacgccaaccgccctttgcaggacgatgaggggcgctgtgtcatcatgtgtcagggctccaagaaggatttcttcaagaagttcttatatgagccattgccagtagaatctcacctggaccactgtatgcatgaccacttcaatgctgagatcgtcaccaagaccattgagaacaagcaggatgctgtggactacctcacctggacctttctgtaccgccgcatgacacagaaccccaattactacaacctgcagggcatctcccatcgtcacttgtcggaccacttgtcagagctggtggagcagaccctgagtgacctggagcagtccaagtgcatcagcatcgaggacgagatggacgtggcgcctctgaacctaggcatgatcgccgcctactattacatcaactacaccaccattgagctcttcagcatgtccctcaatgccaagaccaaggtgcgagggcttatcgagatcatctccaatgcagcagagtatgagaacattcccatccggcaccatgaagacaatctcctgaggcagttggctcagaaggtcccccacaagctgaataaccctaagttcaatgatccgcacgtcaagaccaacctgctcctgcaggctcacttgtctcgcatgcagctgagtgctgagttgcagtcagatacggaggaaatccttagtaaggcaatccggctcatccaggcctgcgtggatgtcctttccagcaatgggtggctcagccctgctctggcagctatggaactggcccagatggtcacccaagccatgtggtccaaggactcatacctgaagcagctgccacacttcacctctgagcatatcaaacgttgcacagacaagggagtggagagtgttttcgacatcatggagatggaggatgaagaacggaacgcgttgcttcagctgactgacagccagattgcagatgtggctcgcttttgtaaccgctaccctaatatcgaactatcttatgaggtggtagataaggacagcatccgcagtggcgggccagttgtggtgctggtgcagctggagcgagaggaggaagtcacaggccctgtcattgcgcctctcttcccgcagaaacgtgaagagggctggtgggtggtgattggagatgccaagtccaatagcctcatctccatcaagaggctgaccttgcagcagaaggccaaggtgaagttggactttgtggccccagccactggtgcccacaactacactctgtacttcatgagtgacgcttacatgggatgtgaccaggagtacaaattcagcgtggatgtgaaagaagctgagacagacagtgattcagattgagtcctgaggcatttacttttgggtaaaggagagttgagcctgaattaggaatgtgtacattgtaggaatcctggttgtggggaccaggtctgtgggcctcaggtctggccagccagggctggtgctgtccccgcctacctccacttcctttcccttgctcactctggatccagtgacagcaggtgtcatgggtcaagcataaatcatatatagcattttcaggcatgttcctggtagttcttttgagtctgacattctaataaaataatttgtagaaacc

SEQ ID NO: 28343 - DNA, 2447 bp, Homo sapiens
  source 1..2447: mol_type = unassigned DNA
agtgacgacaacgtgtttgtgggggcccccacgggcagcgggaagactatttgtgcagagtttgccatcctgcgaatgctgctgcagagctcggaggggcgctgtgtgtacatcacccccatggaggccctggcagagcaggtatacatggactggtacgagaagttccaggacaggctcaacaagaaggtggtactcctgacaggcgagaatgggcctgtcttagaagtgatctgctcccgaatgcgctacatctcctcccagattgagcggcccattcgcattgtggcactcagctcttcgctctccaatgccaaggatgtggcccactggctgggctgcagtgccacctccaccttcaacttccatcccaatgtgcgtcccgtccccttggagctgcacatccagggcttcaacatcagccatacacaaacccgcctgctctccatggccaagcctgtgtaccatgctatcaccaagcactcgcccaagaagcctgtcattgtctttgtgccgtctcgcaagcagacccgcctcactgccattgacatcctcaccacctgtgcagcagacatccaacggcagaggttcttgcactgcaccgagaaggatctgattccgtacctggagaagctaagtgacagcacgctcaaggaaacgctgctaaatggggtgggctacctgcatgaggggctcagccccatggagcgacgcctggtggagcagctcttcagctcaggggctatccaggtggtggtggcttctcggagtctctgctggggcatgaacgtggctgcccacctggtaatcatcatggatacccagtactacaatggcaagatccacgcctatgtggattaccccatctatgacgtgcttcagatggtgggccacgccaaccgccctttgcaggacgatgaggggcgctgtgtcatcatgtgtcagggctccaagaaggatttcttcaagaagttcttatatgagccattgccagtagaatctcacctggaccactgtatgcatgaccacttcaatgctgagatcgtcaccaagaccattgagaacaagcaggatgctgtggactacctcacctggacctttctgtaccgccgcatgacacagaaccccaattactacaacctgcagggcatctcccatcgtcacttgtcggaccacttgtcagagctggtggagcagaccctgagtgacctggagcagtccaagtgcatcagcatcgaggacgagatggacgtggcgcctctgaacctaggcatgatcgccgcctactattacatcaactacaccaccattgagctcttcagcatgtccctcaatgccaagaccaaggtgcgagggcttatcgagatcatctccaatgcagcagagtatgagaacattcccatccggcaccatgaagacaatctcctgaggcagttggctcagaaggtcccccacaagctgaataaccctaagttcaatgatccgcacgtcaagaccaacctgctcctgcaggctcacttgtctcgcatgcagctgagtgctgagttgcagtcagatacggaggaaatccttagtaaggcaatccggctcatccaggcctgcgtggatgtcctttccagcaatgggtggctcagccctgctctggcagctatggaactggcccagatggtcacccaagccatgtggtccaaggactcatacctgaagcagctgccacacttcacctctgagcatatcaaacgttgcacagacaagggagtggagagtgttttcgacatcatggagatggaggatgaagaacggaacgcgttgcttcagctgactgacagccagattgcagatgtggctcgcttttgtaaccgctaccctaatatcgaactatcttatgaggtggtagataaggacagcatccgcagtggcgggccagttgtggtgctggtgcagctggagcgagaggaggaagtcacaggccctgtcattgcgcctctcttcccgcagaaacgtgaagagggctggtgggtggtgattggagatgccaagtccaatagcctcatctccatcaagaggctgaccttgcagcagaaggccaaggtgaagttggactttgtggccccagccactggtgcccacaactacactctgtacttcatgagtgacgcttacatgggatgtgaccaggagtacaaattcagcgtggatgtgaaagaagctgagacagacagtgattcagattgagtcctgaggcatttacttttgggtaaaggagagttgagcctgaattaggaatgtgtacattgtaggaatcctggttgtggggaccaggtctgtgggcctcaggtctggccagccagggctggtgctgtccccgcctacctccacttcctttcccttgctcactctggatccagtgacagcaggtgtcatgggtcaagcataaatcatatata

SEQ ID NO: 28344 - DNA, 1595 bp, Homo sapiens
  source 1..1595: mol_type = unassigned DNA
gaagagaccggttgccgccatgatagaacagcagaagcgtaagggcccagagttgccgctggttccagtcaagcggcagcggcatgagttgctgttgggagcggggtctggcccaggagccgggcagcagcaggcgacgccgggagccttgctgcaagcgggacctccaagatgttcctcccttcaagccccaatcatgctgctctctggacatgaaggggaagtctactgctgcaagttccaccccaacggatccaccttagcatctgcaggatttgaccgactgatattactgtggaatgtctatggtgactgtgataactatgccacactgaagggacacagtggagcagtgatggaattgcattacaacacagatggcagtatgcttttctcagcatccacagataaaaccgtggctgtgtgggatagtgaaacaggtgagagggttaaaaggctaaagggacatacttcctttgtgaattcctgttatccagccaggagaggccctcagcttgtctgcactggcagtgacgatggcacagttaagctttgggacatccggaagaaagcagccatccagacatttcagaacacgtaccaggtgttagctgtgaccttcaatgacacaagtgatcagattatttctggtggaatagacaatgatatcaaggtctgggacctgcgccagaacaagctaacctacaccatgagaggccatgcagattcagtgactggcctgagtttaagttctgaaggctcttatcttttgtccaatgcaatggacaatacagttcgtgtctgggatgtccggccatttgcccccaaagagagatgtgtaaagatatttcaaggaaatgtgcacaactttgaaaagaaccttctgagatgttcttggtcacctgatggaagcaaaatagcagctggctcagccgacaggtttgtttatgtgtgggataccacaagcaggagaatattgtataagctgcccggccatgctggctccatcaatgaagtggctttccaccctgatgagcccatcattatctcagcatcgagtgacaagagactgtatatgggagagattcagtgaagatatggactggaagactccaaggccgcttgtctttgagacctcagactgcataagtgatgccaaatgttggatgtccaggctagcaccctcccttcagatgaccattgctagcaagaaacaggaggcggtggccatattccaaaaaccacttctgtcccatttcaccaggatgactaaggcaagctccctgtggcctctaaaaaccacctgccagatttcagggactgtttttttttttctttttcttttttcctgttttctaatgcaggcccaatgtgacaaatttgttggttgggattttttttttttttttgtaactggcttgtatgatattttctttctgtatttctctatatcattttgtattaaaagccaaatagatgcctttttacaagagccatgtggattggatttattgctgtcttttttttgaggcttgattgctataaatcagaatagagcatgatgtggccacagaatacaattcatttaaacttcc

SEQ ID NO: 28345 - DNA, 1087 bp, Homo sapiens
  source 1..1087: mol_type = unassigned DNA
agggaaattaggaaagggcgatgtaagtttggcttttataagttcattgtcacagtagttcctggtatttagtttgtcacattgaagctttgctggatgtgactaagctggcagagaaatcttgcaaaatatctttttgaaattagtatcacacccaactgcattctgttgcaaattaccaacattgtgtgtgacatttttccttcctgccccctcagctagccccagttattgggatttagatgtgttttcctgcttgaaaaagaaaagagccttaacaggtagcagtatgtcaagttggactttgcccaccgaggaaacagcatctgccattgattgacatgatactaatttcagctgggtgcccaggaggcctctggccgatagttgttttggttggtttgtttatttggatttgttttgcagttcgtgtctgggatgtccggccatttgcccccaaagagagatgtgtaaagatatttcaaggaaatgtgcacaactttgaaaagaaccttctgagatgttcttggtcacctgatggaagcaaaatagcagctggctcagccgacaggtttgtttatgtgtgggataccacaagcaggagaatattgtataagctgcccggccatgctggctccatcaatgaagtggctttccaccctgatgagcccatcattatctcagcatcgagtgacaagagactgtatatgggagagattcagtgaagatatggactggaagactccaaggccgcttgtctttgagacctcagactgcataagtgatgccaaatgttggatgtccaggctagcaccctcccttcagatgaccattgctagcaagaaacaggaggcggtggccatattccaaaaaccacttctgtcccatttcaccaggatgactaaggcaagctccctgtggcctctaaaaaccacctgccagatttcagggactgtttttttttttctttttcttttttcctgttttctaatgcaggcccaatgtgacaaatttgttggttgggattttttttttttttttgtaactggcttgtatgatattttctttctgtatttctctatatcat

SEQ ID NO: 28346 - DNA, 1483 bp, Homo sapiens
  source 1..1483: mol_type = unassigned DNA
aattgcgtggcgcctgagagcggcagcgcggtcagtggcggcgctgaagagaccggttgccgccatgatagaacagcagaagcgtaagggcccagagttgccgctggttccagtcaagcggcagcggcatgagttgctgttgggagcggggtctggcccaggagccgggcagcagcaggcgacgccgggagccttgctgcaagcgggacctccaagatgttcctcccttcaagccccaatcatgctgctctctggacatgaaggggaagtctactgctgcaagttccaccccaacggatccaccttagcatctgcaggatttgaccgactgatattactgtggaatgtctatggtgactgtgataactatgccacactgaagggacacagtggagcagtgatggaattgcattacaacacagatggcagtatgcttttctcagcatccacagataaaaccgtggctgtgtgggatagtgaaacaggtgagagggttaaaaggctaaagggacatacttcctttgtgaattcctgttatccagccaggagaggccctcagcttgtctgcactggcagtgacgatggcacagttaagctttgggacatccggaagaaagcagccatccagacatttcagaacacgtaccaggtgttagctgtgaccttcaatgacacaagtgatcagattatttctggtggaatagacaatgatatcaaggtctgggacctgcgccagaacaagctaacctacaccatgagaggccatgcagattcagtgactggcctgagtttaagttctgaaggctcttatcttttgtccaatgcaatggacaatacagttcgtgtctgggatgtccggccatttgcccccaaagagagatgtgtaaagatatttcaaggaaatgtgcacaactttgaaaagaaccttctgagatgttcttggtcacctgatggaagcaaaatagcagctggctcagccgacaggtttgtttatgtgtgggataccacaagcaggagaatattgtataagctgcccggccatgctggctccatcaatgaagtggctttccaccctgatgagcccatcatagagacggggtttcaccgcattggtcagggtggtcacgaactcctgacgtccagtaatccacccgcctcagcctcccaaagtgctgggattacaggtgtgagccactgtgcccagctgcaaacagtctttatgtgggtatcaatgtcagtctcaccattgctcataagtggtgagagtaagagcaatgctccattttcttcttgatctcaaagggaagttgttatctcagcatcgagtgacaagagactgtatatgggagagattcagtgaagatatggactggaagactccaaggccgcttgtctttgagacctcagactgcataagtgatgccaaatgttggatgtccaggctagcaccctcccttcagatgaccattgctagcaagaaaca

SEQ ID NO: 28347 - DNA, 1628 bp, Homo sapiens
  source 1..1628: mol_type = unassigned DNA
ggcggggccaggagagaaagctttgtggtttggtctcagggaagtagcaggcgccggttgagagaactacggccctgtcggaaggtaacctccggtgcaaacgaccatcggcggcaggcgagcggtacgcttggcgtccgggccttcctgggcccgtctgaggaaacttgctgctcgaggccaggctgcctaggacctgtcccttttttctatactggctcccacatccgggttttttctccgggacggcccttcggatgcttgggccaatgggaatcgccatttagggtgctccgcccaccgggtcgcgtagagcatcctggaagtcgtagtaaatctctcgagagttctctccgcacgcgggctggagaagcgggtcctacgcacgctttgttgtcgcgctttgcctccgtccttgcccctactcccgccttacctgacttccttttcggaggaagatccttgagcagccgacgttgggacaaaggatttggagaaacccagggctaaagtcacgtttttcctcctttaagacttacctcaacacttcactccatggcagttcccgagacccgccctaaccacactatttatatcaacaacctcaatgagaagatcaagaaggatgagctaaaaaagtccctgtacgccatcttctcccagtttggccagatcctggatatcctggtatcacggagcctgaagatgaggggccaggcctttgtcatcttcaaggaggtcagcagcgccaccaacgccctgcgctccatgcagggtttccctttctatgacaaacctatgcgtatccagtatgccaagaccgactcagatatcattgccaagatgaaaggcaccttcgtggagcgggaccgcaagcgggagaagaggaagcccaagagccaggagaccccggccaccaagaaggctgtgcaaggcgggggagccacccccgtggtgggggctgtccaggggcctgtcccgggcatgccgccgatgactcaggcgccccgcattatgcaccacatgccgggccagccgccctacatgccgccccctggtatgatccccccgccaggccttgcacctggccagatcccaccaggggccatgcccccgcagcagcttatgccaggacagatgccccctgcccagcctctttctgagaatccaccgaatcacatcttgttcctcaccaacctgccagaggagaccaacgagctcatgctgtccatgcttttcaatcagttccctggcttcaaggaggtccgtctggtacccgggcggcatgacatcgccttcgtggagtttgacaatgaggtacaggcaggggcagctcgcgatgccctgcagggctttaagatcacgcagaacaacgccatgaagatctcctttgccaagaagtagcaccttttccccccatgcctgccccttcccctgttctggggccacccctttcccccttggctcagccccctgaaggtaagtccccccttgggggccttcttggagccgtgtgtgagtgagtggtcgccacacagcattgtacccagagtctgtccccagacattgcacctggcgctgttaggccggaattaaagtggctttttgaggtttggtttttcacaatc

SEQ ID NO: 28348 - DNA, 971 bp, Homo sapiens
  source 1..971: mol_type = unassigned DNA
gagaagcgggtcctacgcacgctttgttgtcgcgctttgcctccgtccttgcccctactcccgccttacctgacttccttttcggaggaagatccttgagcagccgacgttgggacaaaggatttggagaaacccagggctaaagtcacgtttttcctcctttaagacttacctcaacacttcactccatggcagttcccgagacccgccctaaccacactatttatatcattgccaagatgaaaggcaccttcgtggagcgggaccgcaagcgggagaagaggaagcccaagagccaggagaccccggccaccaagaaggctgtgcaaggcgggggagccacccccgtggtgggggctgtccaggggcctgtcccgggcatgccgccgatgactcaggcgccccgcattatgcaccacatgccgggccagccgccctacatgccgccccctggtatgatccccccgccaggccttgcacctggccagatcccaccaggggccatgcccccgcagcagcttatgccaggacagatgccccctgcccagcctctttctgagaatccaccgaatcacatcttgttcctcaccaacctgccagaggagaccaacgagctcatgctgtccatgcttttcaatcagttccctggcttcaaggaggtccgtctggtacccgggcggcatgacatcgccttcgtggagtttgacaatgaggtacaggcaggggcagctcgcgatgccctgcagggctttaagatcacgcagaacaacgccatgaagatctcctttgccaagaagtagcaccttttccccccatgcctgccccttcccctgttctggggccacccctttcccccttggctcagccccctgaaggtaagtccccccttgggggccttcttggagccgtgtgtgagtgagtggtcgccacacagcattgtacccagagtctgtccccagacattgcacctg

SEQ ID NO: 28349 - DNA, 1055 bp, Homo sapiens
  source 1..1055: mol_type = unassigned DNA
ggggcacgctgggacgtctcgctggcgggaggccacgggctttccacagcgcgggggaacgggaggctgcaggatggtcaagctgacggcggagctgatcgagcaggcggcgcagtacaccaacgcggtgcgcgaccgggagctggacctccgggggtataaaattcccgtcattgaaaatctaggtgctacgttagaccagtttgatgctattgatttttctgacaatgagatcaggaaactggatggttttcctttgttgagaagactgaaaacattgttagtgaacaacaacagaatatgccgtataggtgagggacttgatcaggctctgccctgtctgacagaactcattctcaccaataatagtctcgtggaactgggtgatctggaccctctggcatctctcaaatcgctgacttacctaagtatcctaagaaatccggtaaccaataagaagcattacagattgtatgtgatttataaagttccgcaagtcagagtactggatttccagaaagtgaaactaaaagagcgtcaggaagcagagaaaatgttcaagggcaaacggggtgcacagcttgcaaaggatattgccaggagaagcaaaacttttaatccaggtgctggtttgccaactgacaaaaagaaaggtgggccatctccaggggatgtagaagcaatcaagaatgccatagcaaatgcttcaactctggctgaagtggagaggctgaaggggttgctgcagtctggtcagatccctggcagagaacgcagatcagggcccactgatgatggtgaagaagagatggaagaagacacagtcacaaacgggtcctgagcagtgaggcagatgtataataataggccctcttggaacaagtcttgcttttcgaacatggtataatagccttgtttgtgttagcaaagtggaatctatcagcattgttgaaatgcttaagactgctgctgataattttgtaatataagttttgaaatctaaatgtcaattttctacaaattataaaaataaactccactcactatgctaccaa

SEQ ID NO: 28350 - DNA, 842 bp, Homo sapiens
  source 1..842: mol_type = unassigned DNA
gcccctcgctcggctgctggaggcgagggcttcggaagtcttcatgctagtctcgtggggttccgcggtgtcgtcgctggctgtgcgcgtcatttccgggcgtcacgtaacggagtggccaacggcctgcagagcaacatgcccaagttttattgtgactactgcgatacatacctcacccatgactctccatctgtgagaaagacacactgcagtggaaggaaacacaaagagaatgtgaaagactattatcagaaatggatggaagagcaggctcagagcctgattgacaaaacaacggctgcatttcaacaaggaaagatacctcctactccattctctgctcctcctcctgcaggggcgatgataccacctccccccagccttccgggtcctcctcgccctggtatgatgccagcaccccatatggggggccctcccatgatgccaatgatgggccctcctcctcctgggatgatgccagtgggacctgctcctggaatgaggccgcccatgggaggccatatgccaatgatgcctgggcccccaatgatgagacctcctgcccgtcccatgatggtgcccactcggcccggaatgactcgaccagacagataaggatagaggggaggccttattgtatcggttttatattacctgttctgcttcaccaggagatcatgctgctgtgatactgagttttctaaacagcataaggaagacttgctcccctgtcctatgaaagagaatagttttggaggggagaagtgggacaaaaaagatgcagttttcctttgtattgggaaatgtgaaaataaaattgtcaactctttcagttaaaa

SEQ ID NO: 28351 - DNA, 1054 bp, Homo sapiens
  source 1..1054: mol_type = unassigned DNA
gagtggggccccgaaatctgagggtgatcgtagtcactagttgtggcccccatgcaggagcggagagcgggttctggtttctgaaacctcgagggatgggagagtatctgggccgggtggacggaggcagggagatggagagcgctagacaccccattttagagtgcagatggatcccgcttaaggcaacaaaaaaaagcctggtttatgtgtcgacgctttgatgcttttgagtcgtgaggcggtctggctttttgttttgtttgtttgttttgtttttatcttccatgaacagcgcttccgtggatgggcatctcagtggttgtcgtctttttctcttcctttcacctcttttcaggttttattgtgactactgcgatacatacctcacccatgactctccatctgtgagaaagacacactgcagtggaaggaaacacaaagagaatgtgaaagactattatcagaaatggatggaagagcaggctcagagcctgattgacaaaacaacggctgcatttcaacaaggaaagatacctcctactccattctctgctcctcctcctgcaggggcgatgataccacctccccccagccttccgggtcctcctcgccctggtatgatgccagcaccccatatggggggccctcccatgatgccaatgatgggccctcctcctcctgggatgatgccagtgggacctgctcctggaatgaggccgcccatgggaggccatatgccaatgatgcctgggcccccaatgatgagacctcctgcccgtcccatgatggtgcccactcggcccggaatgactcgaccagacagataaggatagaggggaggccttattgtatcggttttatattacctgttctgcttcaccaggagatcatgctgctgtgatactgagttttctaaacagcataaggaagacttgctcccctgtcctatgaaagagaatagttttggaggggagaagtgggacaaaaaagatgcagttttcctttgtattgggaaatgtgaaaataaaattgtcaactctttcagttaaaa

SEQ ID NO: 28352 - DNA, 600 bp, Homo sapiens
  source 1..600: mol_type = unassigned DNA
caacggcctgcagagcaacatgcccaaccatctgtgagaaagacacactgcagtggaaggaaacacaaagagaatgtgaaagactattatcagaaatggatggaagagcaggctcagagcctgattgacaaaacaacggctgcatttcaacaaggaaagatacctcctactccattctctgctcctcctcctgcaggggcgatgataccacctccccccagccttccgggtcctcctcgccctggtatgatgccagcaccccatatggggggccctcccatgatgccaatgatgggccctcctcctcctgggatgatgccagtgggacctgctcctggaatgaggccgcccatgggaggccatatgccaatgatgcctgggcccccaatgatgagacctcctgcccgtcccatgatggtgcccactcggcccggaatgactcgaccagacagataaggatagaggggaggccttattgtatcggttttatattacctgttctgcttcaccaggagatcatgctgctgtgatactgagttttctaaacagcataaggaagacttgctcccctgtcctatgaaagagaatagttttggaggg

SEQ ID NO: 28353 - DNA, 355 bp, Homo sapiens
  source 1..355: mol_type = unassigned DNA
ttctttttttaacgtttccacttttatgattatttcagagatcgcggattcaggtgtggctctatgagcaagtgaatatgcggatagaaggctgtatcattggttttgatgagtatatgaaccttgtattagatgatgcagaagagattcattctaaaacaaagtcaagaaaacaactgggtcggatcatgctaaaaggagataatattactctgctacaaagtgtctccaactagaaatgatcaatgaagtgagaaattgttgagaaggatacagtttgtttttagatgtcctttgtccaatgtgaacatttattcatattgttttgattaccctcgtgttactacaagatggc

SEQ ID NO: 28354 - DNA, 942 bp, Homo sapiens
  source 1..942: mol_type = unassigned DNA
gctctcagaggcagcgtgcgggtgtgctctttgtgaaattccaccatggcgtaccgtggccagggtcagaaagtgcagaaggttatggtgcagcccatcaacctcatcttcagatacttacaaaatagatcgcggattcaggtgtggctctatgagcaagtgaatatgcggatagaaggctgtatcattggttttgatgagtatatgaaccttgtattagatgatgcagaagagattcattctaaaacaaagtcaagaaaacaactgggtcggatcatgctaaaaggagataatattactctgctacaaagtgtctccaactagaaatgatcaatgaagtgagaaattgttgagaaggatacagtttgtttttagatgtcctttgtccaatgtgaacatttattcatattgttttgattaccctcgtgttactacaagatggcaataaatactatgggattgtttgtattaaaaaatttacattgcttcttactattcagcagtagaaactttttacacagtaacaccattcgttgctggtatttagttttctgaagggtcgcagttgccttgagcacttggtattcgcagagcttggacctgtagattttgaggcagattaggaattctgcctgatgggtaagcttccagtattgggaggtggagaaggggagggttcagaaaaataaataagagttattgcactaacaaaagtcttcatcacttgtagttctggatgctggaataccagagtttctaacctaaatatgttgggtacattatttaatggggtcagtattgctcaacactctcattgagtcactgtgaggtctttgtgaattttatcgctaagatcagaatgtgagaagtatttggatatagggaaagaatgaagtgcctttcaagtacattaaaaatcagttaagagtttacaggaaagag

SEQ ID NO: 28355 - DNA, 1528 bp, Homo sapiens
  source 1..1528: mol_type = unassigned DNA
tggcgcgcatgctcaggcggggatgtgtgcgaagcctgccgctgctgcagcgagtctggcgcagagtggagcggccgccggagatgcctgacgcatctgtctgaggagcggtcagtgacgcgatggagcgggcaagggatcgcttacacctgagacgaactacagaacagcacgtaccagaggtggaagtccaagtcaaacgcagaaggactgcctcactgagcaaccaagagtgtcagttgtacccgaggcgttctcagcagcagcaagtacctgtggtggatttccaggctgaactgaggcaggcattcttagctgagacaccaagaggtggttaaagccatattggagtagcgaggaatctgattccaagcaaaaaccaggctccatctactctttgaagcttctgcccagcttgcattgtttctaggagaacctgcgtcatacctttatctatagccttcccctaggtcttcagaagcatcaagttttaactgtggacattggatttggtggaacagcaatcatgactgttggcaagagtagcaagatgctgcagcacattgactatagaatgagatgtatcctgcaagatggccgaatcttcattggcacctttaaggcttttgacaagcatatgaatttgatcctctgtgattgtgatgagttcagaaagatcaagccaaagaatgcgaagcaaccagagcgtgaagaaaagcgggttttgggtctggtgttgctgcgtggggagaacttggtatccatgactgtggaggggccaccccccaaagatactggcattgctcgggtaccacttgctggagctgctggaggccctggggttggtagggcagctggtagaggagtaccagctggtgtgccaattccccaggcccctgctggattggcaggccctgtccgaggagttgggggaccatcccagcaggtaatgactccacagggaagaggcactgtagcagctgctgctgttgctgcgactgccagtattgctggagccccaacacagtacccaccaggacggggcactccgcccccacccgtcggcagagcaaccccacctccaggcattatggctcctccacctggtatgagaccacccatgggcccaccaattgggcttccccctgctcgagggacgccaataggcatgccgcctccgggaatgagaccccctccaccaggcattagaggtccacctcccccaggaatgcgtccaccaagaccttagcatactgttgatccatctcagtcactttttcccctgcaatgcgtcttgtgaaattgtgtagagtgtttgtgagctttttgttccctcattctgcattaataatagctaataataaatgcatagagcaattaaactgtgaggtactgttgtatatatttttttgcctgttgattttgatgagatcttaagttactgtggatgagggtgatgcctattaagcagttgattcaaatcatattctctttaattcttaggataaaaaggttttctgctatctaa

SEQ ID NO: 28356 - DNA, 1605 bp, Homo sapiens
  source 1..1605: mol_type = unassigned DNA
agctgagctcagagccttctgtggggtctgcagtggcaaggccagccgccccctgtcttccctctggagctgtttgaggaatgcagttcttttgcataagaaaggcttttctctccagtcattctgcttgctgatcaagaacacttaacagcttcaggctttcctgatactttgacgaaggtaattgggactcccatcaagtctccacacagctagcagccacgtggggcacttctccagcatatgtaagtggaactcagaaggcaacattccctgaacatactcttccaccagaatctcctctacagatttttgctgccccttttaccagtggctgaatctactttctcttatggatcgcttacacctgagacgaactacagaacagcacgtaccagaggtggaagtccaagtcaaacgcagaaggactgcctcactgagcaaccaagagtgtcagttgtacccgaggcgttctcagcagcagcaagtacctgtggtggatttccaggctgaactgaggcaggcattcttagctgagacaccaagaggtggttaaagccatattggagtagcgaggaatctgattccaagcaaaaaccaggctccatctactctttgaagcttctgcccagcttgcattgtttctaggagaacctgcgtcatacctttatctatagccttcccctaggtcttcagaagcatcaagttttaactgtggacattggatttggtggaacagcaatcatgactgttggcaagagtagcaagatgctgcagcacattgactatagaatgagatgtatcctgcaagatggccgaatcttcattggcacctttaaggcttttgacaagcatatgaatttgatcctctgtgattgtgatgagttcagaaagatcaagccaaagaatgcgaagcaaccagagcgtgaagaaaagcgggttttgggtctggtgttgctgcgtggggagaacttggtatccatgactgtggaggggccaccccccaaagatactggcattgctcgggtaccacttgctggagctgctggaggccctggggttggtagggcagctggtagaggagtaccagctggtgtgccaattccccaggcccctgctggattggcaggccctgtccgaggagttgggggaccatcccagcaggtaatgactccacagggaagaggcactgtagcagctgctgctgttgctgcgactgccagtattgctggagccccaacacagtacccaccaggacggggcactccgcccccacccgtcggcagagcaaccccacctccaggcattatggctcctccacctggtatgagaccacccatgggcccaccaattgggcttccccctgctcgagggacgccaataggcatgccgcctccgggaatgagaccccctccaccaggcattagaggtccacctcccccaggaatgcgtccaccaagaccttagcatactgttgatccatctcagtcactttttcccctgcaatgcgtcttgtgaaattgtgtagagtgtttgtgagctttttgttccctcattctgcattaataatagctaataataaatgcatagagcaattaaactgtg

SEQ ID NO: 28357 - DNA, 1643 bp, Homo sapiens
  source 1..1643: mol_type = unassigned DNA
caccaagggctggccgcagccactgtagctgagctcagagccttctgtgtggtttgcgggggcaaggtcagctgccccctgccctctctctggggctatttgaggaatgcggcctttttgcataagaaaggcttttctctacagtaactgtggtcgctgatcaatgacaccttcctggtaacatttcatattgcttttttggagatactttgacgaaggtaattgggactcccatcaagtctccacacagctagcagccacgtggggcacttctccagcatatgtaagtggaactcagaaggcaacattccctgaacatactcttccaccagaatctcctctacagatttttgctgccccttttaccagtggctgaatctactttctcttatggatcgcttacacctgagacgaactacagaacagcacgtaccagaggtggaagtccaagtcaaacgcagaaggactgcctcactgagcaaccaagagtgtcagttgtacccgaggcgttctcagcagcagcaagtacctgtggtggatttccaggctgaactgaggcaggcattcttagctgagacaccaagaggtggttaaagccatattggagtagcgaggaatctgattccaagcaaaaaccaggctccatctactctttgaagcttctgcccagcttgcattgtttctaggagaacctgcgtcatacctttatctatagccttcccctaggtcttcagaagcatcaagttttaactgtggacattggatttggtggaacagcaatcatgactgttggcaagagtagcaagatgctgcagcacattgactatagaatgagatgtatcctgcaagatggccgaatcttcattggcacctttaaggcttttgacaagcatatgaatttgatcctctgtgattgtgatgagttcagaaagatcaagccaaagaatgcgaagcaaccagagcgtgaagaaaagcgggttttgggtctggtgttgctgcgtggggagaacttggtatccatgactgtggaggggccaccccccaaagatactggcattgctcgggtaccacttgctggagctgctggaggccctggggttggtagggcagctggtagaggagtaccagctggtgtgccaattccccaggcccctgctggattggcaggccctgtccgaggagttgggggaccatcccagcaggtaatgactccacagggaagaggcactgtagcagctgctgctgttgctgcgactgccagtattgctggagccccaacacagtacccaccaggacggggcactccgcccccacccgtcggcagagcaaccccacctccaggcattatggctcctccacctggtatgagaccacccatgggcccaccaattgggcttccccctgctcgagggacgccaataggcatgccgcctccgggaatgagaccccctccaccaggcattagaggtccacctcccccaggaatgcgtccaccaagaccttagcatactgttgatccatctcagtcactttttcccctgcaatgcgtcttgtgaaattgtgtagagtgtttgtgagctttttgttccctcattctgcattaataatagctaataataaatgcatagagcaattaaactgtg

SEQ ID NO: 28358 - DNA, 1751 bp, Homo sapiens
  source 1..1751: mol_type = unassigned DNA
caccaagggctggccgcagccactgtagctgagctcagagccttctgtgtggtttgcgggggcaaggtcagctgccccctgccctctctctggggctatttgaggaatgcggcctttttgcataagaaaggcttttctctacagtaactgtggtcgctgatcaatgacaccttcctggtaacatttcatattgcttttttggagatgtaagtgggatctgtggatctgaaaattcacagtggccagctcaccaccacctgatgaaagatacaccacagggtgagagcatcctaacagcaaactgcaaatgagatactttgacgaaggtaattgggactcccatcaagtctccacacagctagcagccacgtggggcacttctccagcatatgtaagtggaactcagaaggcaacattccctgaacatactcttccaccagaatctcctctacagatttttgctgccccttttaccagtggctgaatctactttctcttatggatcgcttacacctgagacgaactacagaacagcacgtaccagaggtggaagtccaagtcaaacgcagaaggactgcctcactgagcaaccaagagtgtcagttgtacccgaggcgttctcagcagcagcaagtacctgtggtggatttccaggctgaactgaggcaggcattcttagctgagacaccaagaggtggttaaagccatattggagtagcgaggaatctgattccaagcaaaaaccaggctccatctactctttgaagcttctgcccagcttgcattgtttctaggagaacctgcgtcatacctttatctatagccttcccctaggtcttcagaagcatcaagttttaactgtggacattggatttggtggaacagcaatcatgactgttggcaagagtagcaagatgctgcagcacattgactatagaatgagatgtatcctgcaagatggccgaatcttcattggcacctttaaggcttttgacaagcatatgaatttgatcctctgtgattgtgatgagttcagaaagatcaagccaaagaatgcgaagcaaccagagcgtgaagaaaagcgggttttgggtctggtgttgctgcgtggggagaacttggtatccatgactgtggaggggccaccccccaaagatactggcattgctcgggtaccacttgctggagctgctggaggccctggggttggtagggcagctggtagaggagtaccagctggtgtgccaattccccaggcccctgctggattggcaggccctgtccgaggagttgggggaccatcccagcaggtaatgactccacagggaagaggcactgtagcagctgctgctgttgctgcgactgccagtattgctggagccccaacacagtacccaccaggacggggcactccgcccccacccgtcggcagagcaaccccacctccaggcattatggctcctccacctggtatgagaccacccatgggcccaccaattgggcttccccctgctcgagggacgccaataggcatgccgcctccgggaatgagaccccctccaccaggcattagaggtccacctcccccaggaatgcgtccaccaagaccttagcatactgttgatccatctcagtcactttttcccctgcaatgcgtcttgtgaaattgtgtagagtgtttgtgagctttttgttccctcattctgcattaataatagctaataataaatgcatagagcaattaaactgtg

SEQ ID NO: 28359 - DNA, 1904 bp, Homo sapiens
  source 1..1904: mol_type = unassigned DNA
ttgtccttcattacttgatctatgaaagttgtttatgtgagtctatatatatatattccatagtcatgtgttctcttttgacatgggaagtcttaggcaggtttataacacacttggctcttagtggggaaagattacctgccatcatcttgaagcgaatttaggggaagaaagaatattgcaaatgacaacataggtatttcagaaaaaaggaaaaatctgaatgaaagagtaattgagatgttgatacagagatgacttcatattaattctgaactagagagagagacactaccttaaataaggatggaaagaaaaatactaaatttgggaaaatgacgcttagtttttgaaacatttaggaattactaggtaaaataaaattcaatgactttcatcagtcctaagtgtgtcaaatgtgagagttaagaatgagggactagggaaatgtggcagtcccttggtgaggaagctagtatgagaggaaggatgtttttgaacgtgtctgtcatagtgattttcatgcaaaattgtctgcctgttttaaaacatggtagattgcagtgcagctttaacatgctttcctctgcaggctccatctactctttgaagcttctgcccagcttgcattgtttctaggagaacctgcgtcatacctttatctatagccttcccctaggtcttcagaagcatcaagttttaactgtggacattggatttggtggaacagcaatcatgacggggtcttgctctgtctcccagtctggagtgcagtggtgcggtcttggctcactgcaaccctgggttcaagagattctcgtgcctcagcctctttattagaaacagggtttcactgtgttggccaggctggtctcaggctcctgacctctggtgatccacccacctcggcctcccaaagtgctgggattacaggcatgagatgagccactgtgcctggccatgagaaatgtttcatgatgtgagaaaatacaggagtttttggtcatgattccaccagtggtgaaggactgtcctgcagatgatggactctcagactgttggcaagagtagcaagatgctgcagcacattgactatagaatgagatgtatcctgcaagatggccgaatcttcattggcacctttaaggcttttgacaagcatatgaatttgatcctctgtgattgtgatgagttcagaaagatcaagccaaagaatgcgaagcaaccagagcgtgaagaaaagcgggttttgggtctggtgttgctgcgtggggagaacttggtatccatgactgtggaggggccaccccccaaagatactggcattgctcgggtaccacttgctggagctgctggaggccctggggttggtagggcagctggtagaggagtaccagctggtgtgccaattccccaggcccctgctggattggcaggccctgtccgaggagttgggggaccatcccagcaggtaatgactccacagggaagaggcactgtagcagctgctgctgttgctgcgactgccagtattgctggagccccaacacagtacccaccaggacggggcactccgcccccacccgtcggcagagcaaccccacctccaggcattatggctcctccacctggtatgagaccacccatgggcccaccaattgggcttccccctgctcgagggacgccaataggcatgccgcctccgggaatgagaccccctccaccaggcattagaggtccacctcccccaggaatgcgtccaccaagaccttagcatactgttgatccatctcagtcactttttcccctgcaatgcgtcttgtgaaattgtgtagagtgtttgtgagctttttgttccctcattctgcattaataatagctaataataaatgcatagagcaatt

SEQ ID NO: 28360 - DNA, 4744 bp, Homo sapiens
  source 1..4744: mol_type = unassigned DNA
gccccgcggctgaggagcgggaggccgtccgggcagcgcggccggcggcgagaggggccccgccgctctccggaggcagaagttgtggatcggccggcgggggcgagcgggcccgggggccggggccgcgctgcccgggccgcgaggacgaggcggcgccgccgggctgtggaggcagcagcccagacgcggcacagagagggcctgggagcttgctgcagcttcagacagggagccaggatgggaaccacggactgacctgacctgcgtcctcggggccactgcactgggtgattcacgtgtgcccaggccctgaggtgggccggacctgggagtggcagccacacccactcgcccgggtctatggccacggtcggagagtggtcctgtgtgcgctgcaccttcctgaacccggccggccagcgccagtgctccatctgcgaggctccccggcacaagcccgacctcaaccacatcctgcggctcagcgtggaggagcagaaatggccctgcgcccgctgcaccttccgcaacttcctgggcaaggaggcctgcgaggtgtgcggcttcaccccggagcctgcgcctggggctgccttcctgccagtcctcaacggggtcctccccaagccacccgccatcctgggggagcccaagggcagctgccaggaggaagcaggtccagtgaggactgcggggctggtggccacggagcccgccagggggcagtgcgaggacaaggacgaggaggagaaggaggagcaggaggaggaggagggagcggcggagcccagagggggctgggcgtgtccgcgttgcacgctgcacaacacgcccgtggccagctcctgctccgtctgcgggggcccacgcaggctctcgctgccacggatccctcctgaggccctggtggtcccggaagtggtggccccggccggcttccacgtcgtgcctgccgcgcctccacctggcctccccggggaaggtgccgaggccaaccccccagccaccagccagggcccagctgccgaaccagagccgcccagggtcccgcccttcagccccttctcgtccaccctgcagaacaaccccgtgccgcgcagccgacgcgaggttcccccccagctgcagccaccggtgcctgaggctgcccagccgtcaccctctgccggctgcaggggagccccccagggctcgggctgggctggggcctcccgcctagcagagttgctgtctggcaagcggctgagtgtgctggaggaagaggccacggagggtggcaccagccgcgtagaggccggcagctccacctcgggcagtgacatcattgacctggccggagacaccgtgcgttacacgcccgccagcccctccagccccgacttcaccacctggtcatgtgccaagtgcacgctcagaaaccccacagtggcccccaggtgctcggcctgcggctgctccaaactgcacggcttccaggagcatggcgagccccccacccactgccccgactgtggggccgacaagcccagcccctgcggcagaagctgcggacgggtgtcctcggcccagaaggccgcccgcgtcctgcccgagcgcccgggccagtgggcctgccctgcctgtaccctgctcaacgcactgcgggccaagcactgcgccgcctgccacacgcctcagctcctggtggcccagcggcggggggccgcgcccctgaggcgcagggagagcatgcacgtggagcagcggcggcagacagacgagggcgaggccaaggcactctgggagaacatcgtggccttctgccgggagaacaatgtgagcttcgtggatgacagcttccctcccgggcccgagtctgtcggcttccccgcgggtgacagcgtgcagcagcgtgtgaggcagtggctgcgaccccaggagatcaactgctccgtcttcagggaccacagggccacgtggtctgtgttccacacactgcggccctcagacatcctgcaggggctgctggggaactgctggttcctgagcgccctggcggtgctggcggagcggccggacctggtggagcgggtgatggtcacgcgcagcctgtgtgcagagggcgcctaccaggtgcggctgtgcaaggacggcacgtggaccacggtgctggtggacgacatgctgccctgtgatgaggccggctgcctcctcttctcacaggcgcagcggaagcagctgtgggtggccctcatcgagaaggcgctggccaagctgcacggctcctactttgcgctccaggcgggccgcgccatcgaaggcctggccacgctcaccggcgccccctgtgagagcctggcgctgcagctcagctccactaacccccgcgaggagcccgttgacactgacctcatctgggccaaaatgctgagttctaaggaggctgggttcctcatgggtgcctcctgtggcgggggcaacatgaaggtggacgattcggcctacgagagcctgggcctgcgcccccggcatgcctactccatcctggatgtccgagatgtccagggcaccaggcttctgcggctccgaaacccgtggggccgtttctcctggaacggcagctggtccgacgagtggccacactggccggggcacctgcgtggcgagctcatgccgcacggcagcagtgagggtgtcttctggatggagtacggcgactttgtcaggtacttcgactccgtggacatctgtaaggtgcactcggactggcaggaggcgcgggtgcagggctgctttcccagctcggccagcgcgcccgtgggggtaacagcgctcacggtgctggagcgggcctcgctggagttcgcgctcttccaggagggcagcaggcgctcggacgccgtggacagccacctgctggacctgtgcatcctggtgttccgggccacgttcggcagcggcggccacctcagcctgggccgcctcctggcccacagtaagcgcgcggtcaagaagttcgtcagctgcgacgtcatgctggagcctggcgagtacgctgtggtgtgctgcgccttcaaccactgggggccgcccctgccgggcacccctgccccccaggcctccagcccctcggcaggggtcccgagagcctccccagagccgccgggccacgtgctggctgtgtacagctcgaggctggtcatggtggagcccgtggaagcccagccgaccacgctggccgacgccatcatcctgctcaccgagagccgcggagagcggcacgagggccgtgagggcatgacctgctactacctgacacacggttgggcggggctcatcgtggtggtggagaaccgacaccccaaggcctacctgcacgtgcagtgtgactgcaccgacagcttcaacgtggtgtccacacgcggcagcctgcgtacccaggatagcgtgccacccctgcacaggcaggtcctggtgatcttgtcccagctagagggcaacgccggcttctctatcacccaccgcctggcacatcgcaaggcagcccaggccttcctcagtgactggacagcctccaaggggacccacagccccccactcacgccagaggtcgccggtctgcatgggccccgaccgctgtgaccaccatgcctggggcaggggctgtgcacagacggaccccccacccccacacgcactttatgagggagaccccgacagaggacgcttgagccagaatctcaggaccccgcccagggagctgccagcccagggctcagcttcccatgggccccccgcccccctccttcccctccctgaaccccacagtccgcctggccaggcctcctggccgccacgcagaatacctcgaaccaggcgggctgtgaaccagccccgctcacctgccagccccaacacccgacgggggccgaggccaggctgcccctccctgtgggctcagggtctcctgcgggctaggcagccaggagctctgtccgcaaaaccaaatctgggtgtcagaggccaagaccctggggtgggatcagggaccacccctcacggggcataaggtcagttttcccccagagcccgggtccctgtcccccacagggcaggcggggtccctggagccctggtgtggagcggcgagtcccggggcggtgcctgtctcagaagaaggggcccttggccagccccccagcgacactatgcaaatcctggagtgcccgccaggatcgaagccatgactgggtgcaggcgggcgccaggcccgctgtgggtgggcaccagttctcagcaccgctcactgctgccgggcacactgggaccagcaggctcctcagccaaccctgtccctcggcccggccctgccagagagggaccccagcacatcgtgggcacgggcagggctcagccgctcccacctccccacagaagcccaggagtgtgtggacgtctgagcccagctttctgcgtgccctcctggcccctcactcccggcagcgggccggcctcgcccccactccccctcctaccccggcaggggcttccggggccttttcacctggagaaacattcccactcccctttggcctccctgtactctgagctgtgaatatttttaaccctgtaaatacggccagctcttgtgacacagagactattttatcaattgtcagtcccgttcctttaccataggattctccacagtggcttccgactcaggctccaatggaccaaataaaagcgttttgttttgtaa

SEQ ID NO: 28361 - DNA, 2715 bp, Homo sapiens
  source 1..2715: mol_type = unassigned DNA
atggccacggtcggagagtggtcctgtgtgcgctgcaccttcctgaacccggccggccagcgccagtgctccatctgcgaggctccccggcacaagcccgacctcaaccacatcctgcggctcagcgtggaggagcagaaatggccctgcgcccgctgcaccttccgcaacttcctgggcaaggaggcctgcgaggtgtgcggcttcaccccggagcctgcgcctggggctgccttcctgccagtcctcaacggggtcctccccaagccacccgccatcctgggggagcccaagggcagctgccaggaggaagcaggtccagtgaggactgcggggctggtggccacggagcccgccagggggcagtgcgaggacaaggacgaggaggagaaggaggagcaggaggaggaggagggagcggcggagcccagagggggctgggcgtgtccgcgttgcacgctgcacaacacgcccgtggccagctcctgctccgtctgcgggggcccacgcaggctctcgctgccacggatccctcctgaggccctggtggtcccggaagtggtggccccggccggcttccacgtcgtgcctgccgcgcctccacctggcctccccggggaaggtgccgaggccaaccccccagccaccagccagggcccagctgccgaaccagagccgcccagggtcccgcccttcagccccttctcgtccaccctgcagaacaaccccgtgccgcgcagccgacgcgaggttcccccccagctgcagccaccggtgcctgaggctgcccagccgtcaccctctgccggctgcaggggagccccccagggctcgggctgggctggggcctcccgcctagcagagttgctgtctggcaagcggctgagtgtgctggaggaagaggccacggagggtggcaccagccgcgtagaggccggcagctccacctcgggcagtgacatcattgacctggccggagacaccgtgcgttacacgcccgccagcccctccagccccgacttcaccacctggtcatgtgccaagtgcacgctcagaaaccccagtccacccagcctccagcccctcggcaggggtcccgagagcctccccagagccgccgggccacgtgctggctgtgtacagctcgaggctggtcatggtggagcccgtggaagcccagccgaccacgctggccgacgccatcatcctgctcaccgagagccgcggagagcggcacgagggccgtgagggcatgacctgctactacctgacacacggttgggcggggctcatcgtggtggtggagaaccgacaccccaaggcctacctgcacgtgcagtgtgactgcaccgacagcttcaacgtggtgtccacacgcggcagcctgcgtacccaggatagcgtgccacccctgcacaggcaggtcctggtgatcttgtcccagctagagggcaacgccggcttctctatcacccaccgcctggcacatcgcaaggcagcccaggccttcctcagtgactggacagcctccaaggggacccacagccccccactcacgccagaggtcgccggtctgcatgggccccgaccgctgtgaccaccatgcctggggcaggggctgtgcacagacggaccccccacccccacacgcactttatgagggagaccccgacagaggacgcttgagccagaatctcaggaccccgcccagggagctgccagcccagggctcagcttcccatgggccccccgcccccctccttcccctccctgaaccccacagtccgcctggccaggcctcctggccgccacgcagaatacctcgaaccaggcgggctgtgaaccagccccgctcacctgccagccccaacacccgacgggggccgaggccaggctgcccctccctgtgggctcagggtctcctgcgggctaggcagccaggagctctgtccgcaaaaccaaatctgggtgtcagaggccaagaccctggggtgggatcagggaccacccctcacggggcataaggtcagttttcccccagagcccgggtccctgtcccccacagggcaggcggggtccctggagccctggtgtggagcggcgagtcccggggcggtgcctgtctcagaagaaggggcccttggccagccccccagcgacactatgcaaatcctggagtgcccgccaggatcgaagccatgactgggtgcaggcgggcgccaggcccgctgtgggtgggcaccagttctcagcaccgctcactgctgccgggcacactgggaccagcaggctcctcagccaaccctgtccctcggcccggccctgccagagagggaccccagcacatcgtgggcacgggcagggctcagccgctcccacctccccacagaagcccaggagtgtgtggacgtctgagcccagctttctgcgtgccctcctggcccctcactcccggcagcgggccggcctcgcccccactccccctcctaccccggcaggggcttccggggccttttcacctggagaaacattcccactcccctttggcctccctgtactctgagctgtgaatatttttaaccctgtaaatacggccagctcttgtgacacagagactattttatcaattgtcagtcccgttcctttaccataggattctccacagtggcttccgactcaggctccaatggaccaaataaaagcgttttgttttgt

SEQ ID NO: 28362 - DNA, 620 bp, Homo sapiens
  source 1..620: mol_type = unassigned DNA
caccagttctaagggaccatacagagtattcctctcttcacaccaggaccagtcactgttgcagcatgagttcccagcagcagaagcagccttgcaccccaccccctcagcttcagcagcagcaggtgaaacagccttgccagcctccacctcaggaaccatgcatccccaaaaccaaggagccctgccaccccaaggtgcctgagccctgccaccccaaagtgcccgagccctgccagcccaaggttccagagccatgccaccccaaggtgcctgagccctgcccttcaatagtcactccagcaccagcccagcagaagaccaagcagaagtaatgtggtccacagccatgcccttgaggagccggccaccagatgctgaatcccctatcccattctgcgtatgagtcccatttgccttgcaattagcattctgtctcccccaaaaaagaatgtgctatgaagctttctttcctacacactctgagtctctgaatgaagctgaaggtcttagtaccagagctagttttcagctgctcagaattcatctgaagagagacttaagatgaaagcaaatgattcagctcccttatacccccattaaattcactttcaattcca

SEQ ID NO: 28363 - DNA, 222 bp, Homo sapiens
  source 1..222: mol_type = unassigned DNA
atgagttcccagcagcagaagcagccttgcaccccaccccctcagcttcagcagcagcaggtgaaacagccttgccagcctccacctcaggaaccatgcatccccaaaaccaaggagccctgccaccccaaggtgcctgagccctgccaccccaaagtgcctgagccctgcccttcaatagtcactccagcaccagcccagcagaagaccaagcagaagtaa

SEQ ID NO: 28364 - DNA, 709 bp, Homo sapiens
  source 1..709: mol_type = unassigned DNA
agagatcctctgctgcacgactcttaaacccctggtacctgagcactgatctgccttggagaacctgatcctgagactccagcaggatgtcttatcaacagcagcagtgcaagcagccctgccagccacctcctgtgtgccccacgccaaagtgcccagagccatgtccacccccgaagtgccctgagccctgcccaccaccaaagtgtccacagccctgcccacctcagcagtgccagcagaaatatcctcctgtgacaccttccccaccctgccagtcaaagtatccaccgaagagcaagtaacagcttcagaattcatcaggaccaagaaaggataaggatatttggctcacctcgttccacagctccaccttcatcttctcatcaaagcctaccatggatacacagggagcttctttctccttagccagtaatctgcccatgatgatccctgacagcaaaaagtttcttttctgaggctgccatactgccactgtccaggtggagactgagcaaaggaagtcctgggctgtgccagctcccagagcttcggaagaaagagcagcagctctctccctgggaaccatcagagaattctgttgatgtgttctgtgtctgtctgtcacctggtcacgagcttctaccacctttgcaattgtcacttatctttcactccctgaataaagtatctatgcatatatatttgt

SEQ ID NO: 28365 - DNA, 662 bp, Homo sapiens
  source 1..662: mol_type = unassigned DNA
actcctggtactcgagcaccgatctgctttggagaaactggttaatcctgagactccagcaggatgtcttatcaacagcagcagtgcaagcagccctgccagccacctcctgtgtgccccacgccaaagtgcccagagccatgtccacccccgaagtgccctgagccctgcccaccaccaaagtgtccacagccctgcccacctcagcagtgccagcagaaatatcctcctgtgacaccttccccaccctgccagccaaagtatccaccgaagagcaagtaacagcttcaggattcatcaggagcatgagaggataaggataattggctcacctcgttccacagctccaccttcatcttctcatcaaagcttatcatggattcatagggagcttctttccccttagcctgtgatctgcccatgatgttccctgatagcaaaaggtttcctttctaaggctgccatactgccactgtccaggtggagactgagcaaaggaaccttggctttgtcagttcccagagcttcagcagaaagagctgcagctgtgtgcctgggaaccatcagagaattctgttgatgtgttctgtgtctgtctttcacctgggcatgagcttctaccacctgtgcaattgtcacttttctttcactccctgaataaa

SEQ ID NO: 28366 - DNA, 324 bp, Homo sapiens
  source 1..324: mol_type = unassigned DNA
gcaccgatctgctttggagaacctgatcctgagactccagcaggatgtcttatcaacagcagcagtgcaagcagccctgccagccacctcctgtgtgccccacgccaaagtgcccagagccatgtccacccccgaagtgccctgagccctgcccaccaccaaagtgtccacagccctgcccacctcagcagtgccagcagaaatatcctcctgtgacaccttccccaccctgccagccaaagtatccaccgaagagcaagtaacagcttcaggattcatcaggagcatgagaggataaggataattggctcacctcgttccaca

SEQ ID NO: 28367 - DNA, 698 bp, Homo sapiens
  source 1..698: mol_type = unassigned DNA
agaggttctctgctgcccaactcctaaactcctggtactcgagcaccgatctgctttggagaaactgatcctgagactccagcaggatgtcttatcaacagcagcagtgcaagcagccctgccagccacctcctgtgtgccccacgccaaagtgcccagagccatgtccacccccgaagtgccctgagccctgcccaccaccaaagtgtccacagccctgcccacctcagcagtgccagcagaaatatcctcctgtgacaccttccccaccctgccagccaaagtatccaccgaagagcaagtaacagcttcaggattcatcaggagcatgagaggataaggataattggctcacctcgttccacagctccaccttcatcttctcatcaaagcttatcatggattcatagggagcttctttccccttagcctgtgatctgcccatgatgttccctgatagcaaaaggtttcctttctaaggctgccatactgccactgtccaggtggagactgagcaaaggaaccttggctttgtcagttcccagagcttcagcagaaagagctgcagctgtgtgcctgggaaccatcagagaattctgttgatgtgttctgtgtctgtctttcacctgggcatgagcttctaccacctgtgcaattgtcacttttctttcactccctgaataaagtatctatgcata

SEQ ID NO: 28368 - DNA, 878 bp, Homo sapiens
  source 1..878: mol_type = unassigned DNA
cctcgaccttctctgcacagcaggtccagcatcctttgaagcatgagttcttaccagcagaagcagacctttaccccaccacctcagcttcaacagcagcaggtgaaacaacccagccagcctccacctcaggaaatatttgttcccacaaccaaggagccatgccactcaaaggttccacaacctggaaacacaaagattccagagccaggctgtaccaaggtccctgagccaggctgtaccaaggtccctgagccaggctgtaccaaggtccctgagccaggttgtaccaaggtccctgagccaggctgtaccaaggtccctgagccaggttgtaccaaggtccctgagccaggctacaccaaggtccctgaaccaggcagcatcaaggtccctgaccaaggcttcatcaagtttcctgagccaggtgccatcaaagttcctgagcaaggatacaccaaagttcctgtgccaggctacacaaagctaccagagccatgtccttcaacggtcactccaggcccagctcagcagaagaccaagcagaagtaatttggtgcacagacaagcccttgagaagccaaccaccagatgctggacaccctcttcccatctgtttctgtgtcttaattgtctgtagaccttgtaatcagcacattgtcaccccaagccatagtctctctcttatttgtatcctaaaaatacgtactataaagcttttgttcacacacactctgaagaatcctgtaagcccctgaattaagcagaaagtcttcatggcttttctggtcttcggctgctcagggttcatctgaagattcgaatgaaaagaaatgcatgtttcctgctcttccctcattaaattgcttttaattcca

SEQ ID NO: 28369 - DNA, 985 bp, Homo sapiens
  source 1..985: mol_type = unassigned DNA
tcaccagatcccagaggctgaacacctcgaccttctctgcacagcagatgatccctgagcagctgaagaccagaaaagccactaagactttctgcttaattcaggagcttagaggattcttcaaagagtgtgtccagcatcctttgaagcatgagttcttaccagcagaagcagacctttaccccaccacctcagcttcaacagcagcaggtgaaacaacccagccagcctccacctcaggaaatatttgttcccacaaccaaggagccatgccactcaaaggttccacaacctggaaacacaaagattccagagccaggctgtaccaaggtccctgagccaggctgtaccaaggtccctgagccaggctgtaccaaggtccctgagccaggttgtaccaaggtccctgagccaggctgtaccaaggtccctgagccaggttgtaccaaggtccctgagccaggctacaccaaggtccctgaaccaggcagcatcaaggtccctgaccaaggcttcatcaagtttcctgagccaggtgccatcaaagttcctgagcaaggatacaccaaagttcctgtgccaggctacacaaagctaccagagccatgtccttcaacggtcactccaggcccagctcagcagaagaccaagcagaagtaatttggtgcacagacaagcccttgagaagccaaccaccagatgctggacaccctcttcccatctgtttctgtgtcttaattgtctgtagaccttgtaatcagcacattgtcaccccaagccatagtctctctcttatttgtatcctaaaaatacgtactataaagcttttgttcacacacactctgaagaatcctgtaagcccctgaattaagcagaaagtcttcatggcttttctggtcttcggctgctcagggttcatctgaagattcgaatgaaaagaaatgcatgtttcctgctcttccctcattaaattgcttttaattcc

SEQ ID NO: 28370 - DNA, 622 bp, Homo sapiens
  source 1..622: mol_type = unassigned DNA
cagatcccagaggctgaacacctcgaccttctctgcacagcagatgatccctgagcagctgaagaccagaaaagccactaagactttctgcttaattcaggagcttagaggattcttcaaagagtgtgtccagcatcctttgaagcatgagttcttaccagcagaagcagacctttaccccaccacctcagcttcaacagcagcaggtgaaacaacccagccagcctccacctcaggaaatatttgttcccacaaccaaggagccatgccactcaaaggttccacaacctggaaacacaaagattccagagccaggctgtaccaaggtccctgagccaggctgtaccaaggtccctgagccaggctgtaccaaggtccctgagccaggttgtaccaaggtccctgagccaggctgtaccaaggtccctgagccaggttgtaccaaggtccctgagccaggctacaccaaggtccctgaaccaggcagcatcaaggtccctgaccaaggcttcatcaagtttcctgagccaggtgccatcaaagttcctgagcaaggatacaccaaagttcctgtgccaggctacacaaagctaccagagccatgtccttcaacggtcactcc

SEQ ID NO: 28371 - DNA, 486 bp, Homo sapiens
  source 1..486: mol_type = unassigned DNA
atgagttcttaccagcagaagcagacctttaccccaccacctcagcttcaacagcagcaggtgaaacaacccagccagcctccacctcaggaaatatttgttcccacaaccaaggagccatgccactcaaaggttccacaacctggaaacacaaagattccagagccaggctgtaccaaggtccctgagccaggctgtaccaaggtccctgagccaggctgtaccaaggtccctgagccaggttgtaccaaggtccctgagccaggctgtaccaaggtccctgagccaggctacaccaaggtccctgaaccaggcagcatcaaggtccctgaccaaggcttcatcaagtttcctgagccaggtgccatcaaagttcctgagcaaggatacaccaaagttcctgtgccaggctacacaaagctaccagagccatgtccttcaacggtcactccaggcccagctcagcagaagaccaagcagaagtaa

SEQ ID NO: 28372 - DNA, 16068 bp, Homo sapiens
  source 1..16068: mol_type = unassigned DNA
gccgtgtgagcgtgaggagctgccgccaccgcctgctcctcgtcgtcctcgtcctccggggccccggcgacgtgggccgcgcacggccctggaaaagacgtcgcctccccttcatccgcctctctctcaccgcgccgctcccgcctcctcgtcctgcgctgcgggctcaggcggaacccggaacggccgtcctcttcccccgccctccgccgcctcctccttctcctcctcctcctcctcctcctccttctcggcttcctcctcagccccgggccggagcggggtgtcggcggcggccggttcgggcggcgactcgcgcttctttgggcggcggcgcttggccatgtcgtgtcggggaaggtaatgagccgcagagccccggggtctcggctgagcagcggcggcggcggcggcggcaccaagtatccgcggagctggaatgactggcaacccagaactgatagtgcatcagccgacccagataatttaaaatattcttcatccagagatagaggtggttcttcctcttatggactgcaaccttcaaattcagctgtggtgtctcggcaaaggcacgatgataccagagtccacgctgacatacagaatgacgaaaagggtggctacagtgtcaatggaggatctggggaaaatacttatggtcggaagtcgttggggcaagagctgagggttaacaatgtgaccagccctgagttcaccagtgttcagcatggcagtcgtgctttagccaccaaagacatgaggaaatcacaggagagatcgatgtcttattctgatgagtctcgactgtcgaatcttcttcggaggatcacccgggaagacgacagagaccgaagattggctactgtaaagcagttgaaagaatttattcagcaaccagaaaataagctggtactagttaaacaattggataatatcttggctgctgtacatgacgtgcttaatgaaagtagcaaattgcttcaggagttgagacaggagggagcttgctgtcttggccttctttgtgcttctctgagctatgaggctgagaagatcttcaagtggatttttagcaaatttagctcatctgcaaaagatgaagttaaactcctctacttatgtgccacctacaaagcactagagactgtaggagaaaagaaagccttttcatctgtaatgcagcttgtaatgaccagcctgcagtctattcttgaaaatgtggatacaccagaattgctttgtaaatgtgttaagtgcattcttttggtggctcgatgttaccctcatattttcagcactaattttagggatacagttgatatattagttggatggcatatagatcatactcagaaaccttcgctcacgcagcaggtatctgggtggttgcagagtttggagccattttgggtagctgatcttgcattttctactactcttcttggtcagtttctggaagacatggaagcatatgctgaggacctcagccatgtggcctctggggaatcagtggatgaagatgtccctcctccatcagtgtcattaccaaagctggctgcacttctccgggtatttagtactgtggtgaggagcattggggaacgcttcagcccaattcggggtcctccaattactgaggcatatgtaacagatgttctgtacagagtaatgagatgtgtgacggctgcaaaccaggtgtttttttctgaggctgtgttgacagctgctaatgagtgtgttggtgttttgctcggcagcttggatcctagcatgactatacattgtgacatggtcattacatatggattagaccaactggagaattgccagacttgtggtaccgattatatcatctcagtcttgaatttactcacgctgattgttgaacagataaatacgaaactgccatcatcatttgtagaaaaactgtttataccatcatctaaactactattcttgcgttatcataaagaaaaagaggttgttgctgtagcccatgctgtttatcaagcagtgctcagcttgaagaatattcctgttttggagactgcctataagttaatattgggagaaatgacttgtgccctaaacaacctcctacacagtctacaacttcctgaggcctgttctgaaataaaacatgaggcttttaagaatcatgtgttcaatgtagacaatgcaaaatttgtagttatatttgacctcagtgccctgactacaattggaaatgccaaaaactcactaatagggatgtgggcgctatctccaactgtctttgcacttctgagtaagaatctgatgattgtgcacagtgacctggctgttcacttccctgccattcagtatgctgtgctctacacattgtattctcattgtaccaggcatgatcactttatctctagtagcctcagttcttcctctccttctttgtttgatggagctgtgattagcactgtaactacggctacaaagaaacatttctcaattatattaaatcttctgggaatattacttaagaaagataaccttaaccaggacacgaggaaactgttaatgacttgggctttggaagcagctgttttaatgaagaagtctgaaacatacgcacctttattctctcttccgtctttccataaattttgcaaaggccttttagccaacactctcgttgaagatgtgaatatctgtctgcaggcatgcagcagtctacatgctctgtcctcttccttgccagatgatcttttacagagatgtgtcgatgtttgccgtgttcaactagtgcacagtggaactcgtattcgacaagcatttggaaaactgttgaaatcaattcctttagatgttgtcctaagcaataacaatcacacagaaattcaagaaatttctttagcattaagaagtcacatgagtaaagcaccaagtaatacattccacccccaagatttctctgatgttattagttttattttgtatgggaactctcatagaacagggaaggacaattggttggaaagactgttctatagctgccagagactggataagcgtgaccagtcaacaattccacgcaatctcctgaagacagatgctgtcctttggcagtgggccatatgggaagctgcacaattcactgttctttctaagctgagaaccccactgggcagagctcaagacaccttccagacaattgaaggtatcattcgaagtctcgcagctcacacattaaaccctgatcaggatgttagtcagtggacaactgcagacaatgatgaaggccatggtaacaaccaacttagacttgttcttcttctgcagtatctggaaaatctggagaaattaatgtataatgcatacgagggatgtgctaatgcattaacttcacctcccaaggtcattagaacttttttctataccaatcgccaaacttgtcaggactggctaacgcggattcgactctccatcatgagggtaggattgttggcaggccagcctgcagtgacagtgagacatggctttgacttgcttacagagatgaaaacaaccagcctatctcaggggaatgaattggaagtaaccattatgatggtggtagaagcattatgtgaacttcattgtcctgaagctatacagggaattgctgtctggtcatcatctattgttggaaaaaatcttctgtggattaactcagtggctcaacaggctgaagggaggtttgaaaaggcctctgtggagtaccaggaacacctgtgtgccatgacaggtgttgattgctgcatctccagctttgacaaatcggtgctcaccttagccaatgctgggcgtaacagtgccagcccgaaacattctctgaatggtgaatccagaaaaactgtgctgtccaaaccgactgactcttcccctgaggttataaattatttaggaaataaagcatgtgagtgctacatctcaattgccgattgggctgctgtgcaggaatggcagaacgctatccatgacttgaaaaagagtaccagtagcacttccctcaacctgaaagctgacttcaactatataaaatcattaagcagctttgagtctggaaaatttgttgaatgtaccgagcagttagaattgttaccaggagaaaatatcaatctacttgctggaggatcaaaagaaaaaatagacatgaaaaaactgcttcctaacatgttaagtccggatccgagggaacttcagaaatccattgaagttcaattgttaagaagttctgtttgtttggcaactgctttaaacccgatagaacaagatcagaagtggcagtctataactgaaaatgtggtaaagtacttgaagcaaacatcccgcatcgctattggacctctgagactttctactttaacagtttcacagtctttgccagttctaagtaccttgcagctgtattgctcatctgctttggagaacacagtttctaacagactttcaacagaggactgtcttattccactcttcagtgaagctttacgttcatgtaaacagcatgacgtgaggccatggatgcaggcattaaggtatactatgtaccagaatcagttgttggagaaaattaaagaacaaacagtcccaattagaagccatctcatggaattaggtctaacagcagcaaaatttgctagaaaacgagggaatgtgtcccttgcaacaagactgctggcacagtgcagtgaagttcagctgggaaagaccaccactgcacaggatttagtccaacattttaaaaaactatcaacccaaggtcaagtggatgaaaaatgggggcccgaacttgatattgaaaaaaccaaattgctttatacagcaggccagtcaacacatgcaatggaaatgttgagttcttgtgccatatctttctgcaagtctgtgaaagctgaatatgcagttgctaaatcaattctgacactggctaaatggatccaggcagaatggaaagagatttcaggacagctgaaacaggtttacagagctcagcaccaacagaacttcacaggtctttctactttgtctaaaaacatactcactctaatagaactgccatctgttaatacgatggaagaagagtatcctcggatcgagagtgaatctacagtgcatattggagttggagaacctgacttcattttgggacagttgtatcacctgtcttcagtacaggcacctgaagtagccaaatcttgggcagcgttggccagctgggcttataggtggggcagaaaggtggttgacaatgccagtcagggagaaggtgttcgtctgctgcctagagaaaaatctgaagttcagaatctacttccagacactataactgaggaagagaaagagagaatatatggtattcttggacaggctgtgtgtcggccggcggggattcaggatgaagatataacacttcagataactgagagtgaagacaacgaagaagatgacatggttgatgttatctggcgtcagttgatatcaagctgcccatggctttcagaacttgatgaaagtgcaactgaaggagttattaaagtgtggaggaaagttgtagatagaatattcagcctgtacaaactctcttgcagtgcatactttactttccttaaactcaacgctggtcaaattcctttagatgaggatgaccctaggctgcatttaagtcacagagtggaacagagcactgatgacatgattgtgatggccacattgcgcctgctgcggttgctcgtgaagcatgctggtgagcttcggcagtatctggagcacggcttggagacaacacccactgcaccatggagaggaattattccgcaacttttctcacgcttaaaccaccctgaagtgtatgtgcgccaaagtatttgtaaccttctctgccgtgtggctcaagattccccacatctcatattgtatcctgcaatagtgggtaccatatcgcttagtagtgaatcccaggcttcaggaaataaattttccactgcaattccaactttacttggcaatattcaaggagaagaattgctggtttctgaatgtgagggaggaagtcctcctgcatctcaggatagcaataaggatgaacctaaaagtggattaaatgaagaccaagccatgatgcaggattgttacagcaaaattgtagataagctgtcctctgcaaaccccaccatggtattacaggttcagatgctcgtggctgaactgcgcagggtcactgtgctctgggatgagctctggctgggagttttgctgcaacaacacatgtatgtcctgagacgaattcagcagcttgaagatgaggtgaagagagtccagaacaacaacaccttacgcaaagaagagaaaattgcaatcatgagggagaagcacacagctttgatgaagcccatcgtatttgctttggagcatgtgaggagtatcacagcggctcctgcagaaacacctcatgaaaaatggtttcaggataactatggtgatgccattgaaaatgccctagaaaaactgaagactccattgaaccctgcaaagcctgggagcagctggattccatttaaagagataatgctaagtttgcaacagagagcacagaaacgtgcaagttacatcttgcgtcttgaagaaatcagtccatggttggctgccatgactaacactgaaattgctcttcctggggaagtctcagccagagacactgtcacaatccatagtgtgggcggaaccatcacaatcttaccgactaaaaccaagccaaagaaacttctctttcttggatcagatgggaagagctatccttatcttttcaaaggactggaggatttacatctggatgagagaataatgcagttcctatctattgtgaataccatgtttgctacaattaatcgccaagaaacaccccggttccatgctcgacactattctgtaacaccactaggaacaagatcaggactaatccagtgggtagatggagccacacccttatttggtctttacaaacgatggcaacaacgggaagctgccttacaagcacaaaaggcccaagattcctaccaaactcctcagaatcctggaattgtaccccgtcctagtgaactttattacagtaaaattggccctgctttgaaaacagttgggcttagcctggatgtgtcccgtcgggattggcctcttcatgtaatgaaggcagtattggaagagttaatggaggccacacccccgaatctccttgccaaagagctctggtcatcttgcacaacacctgatgaatggtggagagttacgcagtcttatgcaagatctactgcagtcatgtctatggttggatacataattggccttggagacagacatctggataatgttcttatagatatgacgactggagaagttgttcacatagattacaatgtttgctttgaaaaaggtaaaagccttagagttcctgagaaagtaccttttcgaatgacacaaaacattgaaacagcactgggtgtaactggagtagaaggtgtatttaggctttcatgtgagcaggttttacacattatgcggcgtggcagagagaccctgctgacgctgctggaggcctttgtgtacgaccctctggtggactggacagcaggaggcgaggctgggtttgctggtgctgtctatggtggaggtggccagcaggccgagagcaagcagagcaagagagagatggagcgagagatcacccgcagcctgttttcttctagagtagctgagattaaggtgaactggtttaagaatagagatgagatgctggttgtgcttcccaagttggacggtagcttagatgaatacctaagcttgcaagagcaactgacagatgtggaaaaactgcagggcaaactactggaggaaatagagtttctagaaggagctgaaggggtggatcatccttctcatactctgcaacacaggtattctgagcacacccaactacagactcagcaaagagctgttcaggaagcaatccaggtgaagctgaatgaatttgaacaatggataacacattatcaggctgcattcaataatttagaagcaacacagcttgcaagcttgcttcaagagataagcacacaaatggaccttggtcctccaagttacgtgccagcaacagcctttctgcagaatgctggtcaggcccacttgattagccagtgcgagcagctggagggggaggttggtgctctcctgcagcagaggcgctccgtgctccgtggctgtctggagcaactgcatcactatgcaaccgtggccctgcagtatccgaaggccatatttcagaaacatcgaattgaacagtggaagacctggatggaagagctcatctgtaacaccacagtagagcgttgtcaagagctctataggaaatatgaaatgcaatatgctccccagccacccccaacagtgtgtcagttcatcactgccactgaaatgaccctgcagcgatacgcagcagacatcaacagcagacttattagacaagtggaacgcttgaaacaggaagctgtcactgtgccagtttgtgaagatcagttgaaagaaattgaacgttgcattaaagttttccttcatgagaatggagaagaaggatctttgagtctagcaagtgttattatttctgccctttgtacccttacaaggcgtaacctgatgatggaaggtgcagcgtcaagtgctggagaacagctggttgatctgacttctcgggatggagcctggttcttggaggaactctgcagtatgagcggaaacgtcacctgcttggttcagttactgaagcagtgccacctggtgccacaggacttagatatcccgaaccccatggaagcgtctgagacagttcacttagccaatggagtgtatacctcacttcaggaattgaattcgaatttccggcaaatcatatttccagaagcacttcgatgtttaatgaaaggggaatacacgttagaaagtatgctgcatgaactggacggtcttattgagcagaccaccgatggcgttcccctgcagactctagtggaatctcttcaggcctacttaagaaacgcagctatgggactggaagaagaaacacatgctcattacatcgatgttgccagactactacatgctcagtacggtgaattaatccaaccgagaaatggttcagttgatgaaacacccaaaatgtcagctggccagatgcttttggtagcattcgatggcatgtttgctcaagttgaaactgctttcagcttattagttgaaaagttgaacaagatggaaattcccatagcttggcgaaagattgacatcataagggaagccaggagtactcaagttaatttttttgatgatgataatcaccggcaggtgctagaagagattttctttctaaaaagactacagactattaaggagttcttcaggctctgtggtaccttttctaaaacattgtcaggatcaagttcacttgaagatcagaatactgtgaatgggcctgtacagattgtcaatgtgaaaaccctttttagaaactcttgtttcagtgaagaccaaatggccaaacctatcaaggcattcacagctgactttgtgaggcagctcttgatagggctacccaaccaagccctcggactcacactgtgcagttttatcagtgctctgggtgtagacatcattgctcaagtagaggcaaaggactttggtgccgaaagcaaagtttctgttgatgatctctgtaagaaagcggtggaacataacatccagatagggaagttctctcagctggttatgaacagggcaactgtgttagcaagttcttacgacactgcctggaagaagcatgacttggtgcgaaggctagaaaccagtatttcttcttgtaagacaagcctgcagcgggttcagctgcatattgccatgtttcagcagtggcaacatgaagatctacttatcaatagaccacaagccatgtcagtcacacctcccccacggtctgctatcctaaccagcatgaaaaagaagctgcataccctgagccagattgaaacttctattgcaacagttcaggagaagctagctgcacttgaatcaagtattgaacagcgactcaagtgggcaggtggtgccaaccctgcattggcccctgtactacaagattttgaagcaacgatagctgaaagaagaaatcttgtccttaaagagagccaaagagcaagtcaggtcacatttctctgcagcaatatcattcattttgaaagtttacgaacaagaactgcagaagccttaaacctggatgcggcgttatttgaactaatcaagcgatgtcagcagatgtgttcgtttgcatcacagtttaacagttcagtgtctgagttagagcttcgtttattacagagagtggacactggtcttgaacatcctattggcagctctgaatggcttttgtcagcacacaaacagttgacccaggatatgtctactcagagggcaattcagacagagaaagagcagcagatagaaacggtctgtgaaacaattcagaatctggttgataatataaagactgtgctcactggtcataaccgacagcttggagatgtcaaacatctcttgaaagctatggctaaggatgaagaagctgctctggcagatggtgaagatgttccctatgagaacagtgttaggcagtttttgggtgaatataaatcatggcaagacaacattcaaacagttctatttacattagtccaggctatgggtcaggttcgaagtcaagaacacgttgaaatgctccaggaaatcactcccaccttgaaagaactgaaaacacaaagtcagagtatctataataatttagtgagttttgcatcacccttagtcaccgatgcaacaaatgaatgttcgagtccaacgtcatctgctacttatcagccatccttcgctgcagcagtccggagtaacactggccagaagactcagcctgatgtcatgtcacagaatgctagaaagctgatccaaaaaaatcttgctacatcagctgatactccaccaagcaccgttccaggaactggcaagagtgttgcttgtagtcctaaaaaggcagtcagagaccctaaaactgggaaagcggtgcaagagagaaactcctatgcagtgagtgtgtggaagagagtgaaagccaagttagagggccgagatgttgatccgaataggaggatgtcagttgctgaacaggttgactatgtcattaaggaagcaactaatctagataacttggctcagctgtatgaaggttggacagcctgggtgtgaatggcaagacagtagatgagtctggttaagcgaggtcagacatccaccagaatcaactcagcctcaggcatccaaagccacaccacagtcggtggtgatgcaactgggggcttactctgaggaaacctaggaaatctcggtgcactaggaagtgaatcccgcaggacagctgcactcagggatacgcccaacaccatggcctgcaaccccagggtcaagggtgaaggaaagcaagctcaccgcctgaacacggagattgtctttctgccacagaacagcagcagacgtgtcgggaggttagctgcggaaagaaatcgggatgccgcggagcacagagtgatttggaactccattccacctgaccctgtgtgtacaatccaggaaaaaaacaaaccccactcagaaacagagaaaactggggtcgcgaagaaatcacagccaaggaagatttgatgcattcagattctcgtgtaacacttgttgcttggcaacagtactggttgggttgaccagtaagtagaaaaaggctaaaggctatgcgatatgaatttcagaaatggactgaaaatggagagctatgtaacagatacactacagtagaagaacttacttctgaaatgaagggaaaaaaaccaccccatcgttccctactcctccccaccacttacccgttccccctttacctaatctagtagattagccatctttcaaattcacttttatttcagtccttatatttcatatacttccgtctcgatgctgttaacaacttctgataacatggaaaattcaaggattgtttaaaggtctgatgatcacacacaaaatgtaattccggttatttaagtcatttctgtgattctatcatgtacagtttccagaattgtcactgtgcattcaaaagtaatgaatctaacagacatttgatttaatgtacactcccttttgcttatagtgtgcattttttttggaggtcattcaaattttccctcttctgtgatagctgtagtttctttcatagaaagtagctaatccagtgtaatcttttacctttttaaaaaccaagatagagtatctattagagttttacattgttgatgatagattaacaataaagtgatgttctggtggaggtagactgaaatttttttaattcatgtttttcatttgatacttttaatttacacttagtaaattaaaagttgtttaatttacttggcattttaggacatgtacatgaaacagtgaaaatgagatccaccaacatcttttattaagttcagttattagtctgtgaagtgctttactttttgcacaattttaatagcttgctattcagtaatacattatagtgaattcatgatcaaggtttccttaaatttagcattgcatttcagtactgactgtgtaagctaaattgctgatccaaaataaaaacccagactagaatagggttcttaaaatcaagtatcaatacaaaatagaacacaattaaaatcttaattgttggctgggcacagtggctcacgcctgtaatcccagcactttgggaggccgaggcgggcggatcatgaggttaggagagcgagaccatcctggctaacacggtgaaaccccgtctttactaaaaatacaaaaaaaattagccgggcgtggtggcgggcgcctgtagtcccagctactcgggaggctgaggcaggagaatggcgtgaacccaggaggcggagcttgcagtgagccgagattgtgccactgcactccagcctgggcaacagagctagactctgtgtcaaaaataaatgactagataaaaaaaaaaattgtttgagtacattttccctgcattttagagattaggacagtggtcactttctagttgccgtcttcacagacaaacttgaaaggtattaaggaaaaaattccacatagctctgggccttttttgtattctgattgccacgttaatctgtaatcgttaagtacccatgaaagaatgtgtttcagtatcagtgcttttttggtactttaacaagtattgtaggcacggtggatttttttgaaatacccatgtgtccaatagcaagttaaggaacctagcgcatcaaattttgttttcttcattcatttggaaccttattttcgcaaaaaacctagctggaataataatgccatattgtattttgcacactgctttattttctagaggctctgggagcaaattacattcatcacattacctctgctctctcaagattaaagtctttcagcaacattctttattgtcatcataaggaaaaacttttatcgcaatgatagtcagttcacattagtttagcactatagatagtattcagaaattgctttctctttggtaaagaagataaataggtgaattttattgcctgtgttttcaggcttcagaggtacctggcaccttactcaagcaaaaacaaaaaacagctttacttcaaaagcatgtgcctctggtaaattatccatcacttttgttttaaagtggtccctccaagaataatgtggcatacacagtgggtttggttgtaaggcagatgtaatagatgacttcaaaagcctgctccttactgcactctggacaaggccctggtctgtatagtttggcttcctctgttaagtcattctacaaggtgacttgccatttgaactttcgtaagagacctcagcagttagactgagaaaagttagagtgctgtagttatgaagtcatacatttttgataaaatacctgtggaaaaccagggatcctctcctgtttctctctcttgcctccccctttccctccattcctctgtcgcctccccctctcctccactttctttaagaatcagggggtacagaataacctacaaacaacctcttcaaagtacccttggaaattgaagttcaatcttaagttttttgctgtctttaatttactagaattgcctaatttttagttgatttctctacagagcttagcttgtgtagttatttctcttttactgttgctttggtgtgtcttgaagtttgattgattatttttggtcattgagttcttagtgtagtttgctagatgattattaagattcttttgtgtctgacacttgtggtgagttgcttttgaaatctgttgagatttccatgtgagaactgataatcaggctcttgatctgcttccctaaattacttttttagagcccaaaccccaggtttagggtgagggtttgtaatacaaagaaacacttccatcacttctgcccttaacccttgcctctattacctaagcttagtaagtagttttcttaatattgtccaatgtttggtgttatctgcattgttttttgtttttttaattgtggttgttctgacgtgtgaaatttaaggaaagagccattttttaaaaatgccgagcagggcaatgcaagtacagccaaatattagacttgatgtgcaatcttcggtcctttttaatctggggtattataggcagtactttaaattgcaaagtcttccgggcctattttcctctacatttttgtaattaactctgggggcttacttgttttggcagtactgaaatcaaaggagctggttcttcttttctcccaattattttcatatgaaagcacctacaattagcctgttagtcctattcagatacatcaaatatcagtgaatgctttactattcgcacatttaagcatctttgttttacataaaattagagtatgaaaaccagtgttcaattttttatcttgttgagcttgtaaaatgccagcaatttaaaactaggacttttccccccataagccaaggaggtagaattactaatacaagggttaaagaaggtagattttgttttcaatatttgggtaatattagaaagattcttcccacagggaagaactagcaagtgtcccaattttttccaaacgttggggaggggaaaattcactgtatcatgaaaccctaagggtttgttgcacttcctgctttttaggcctggataacagtatcaccatccttatttacagaagggtaaaactgactcttaatgagaaaagctttataagttcaagggctgtaaaatatgaactacttagggtcgtttgccttccatgggaacttggctagacttagaaaaagctgtttgttgtgctaatgtaaaagtgtcatacaatttagaagatttttgaagatggtaaacttagaagaattctatgttctgaaatgcacacttttagaatgtttttctttgaaaacaggctaatagttttttctttttttgacaaagtttcagctcctctttaaagttattgtgtcatttttctggtttaaatttcccttatatttccacctgtaatgtcagtggcaacaacatcatacttcacttacttgttaatttactttttacccttattctaagagcaagttgagttgaactgaatcttccttgtcttagtaacaatgtataaatagtggcttttctgtacaaaaggttgtaatgcctcctgatggatataattttgtgattgtatttaaaagttgaataaatcacaccagcttcctgaaaatgttcataatgcatcttttggaaaacaaatacatgcctactttgtgcatatttgcattaacatggcaaagattgtatgaaatacctgtttttcagaaaataaaggttcagtctcaaaagatacagca

SEQ ID NO: 28373 - DNA, 16115 bp, Homo sapiens
  source 1..16115: mol_type = unassigned DNA
gtgcgacagcggcggcgcggcgggcggagccgggaggcggggaagcagtggccgtgtgagcgtgaggagctgccgccaccgcctgctcctcgtcgtcctcgtcctccggggccccggcgacgtgggccgcgcacggccctggaaaagacgtcgcctccccttcatccgcctctctctcaccgcgccgctcccgcctcctcgtcctgcgctgcgggctcaggcggaacccggaacggccgtcctcttcccccgccctccgccgcctcctccttctcctcctcctcctcctcctcctccttctcggcttcctcctcagccccgggccggagcggggtgtcggcggcggccggttcgggcggcgactcgcgcttctttgggcggcggcgcttggccatgtcgtgtcggggaaggtaatgagccgcagagccccggggtctcggctgagcagcggcggcggcggcggcggcaccaagtatccgcggagctggaatgactggcaacccagaactgatagtgcatcagccgacccagataatttaaaatattcttcatccagagatagaggtggttcttcctcttatggactgcaaccttcaaattcagctgtggtgtctcggcaaaggcacgatgataccagagtccacgctgacatacagaatgacgaaaagggtggctacagtgtcaatggaggatctggggaaaatacttatggtcggaagtcgttggggcaagagctgagggttaacaatgtgaccagccctgagttcaccagtgttcagcatggcagtcgtgctttagccaccaaagacatgaggaaatcacaggagagatcgatgtcttattctgatgagtctcgactgtcgaatcttcttcggaggatcacccgggaagacgacagagaccgaagattggctactgtaaagcagttgaaagaatttattcagcaaccagaaaataagctggtactagttaaacaattggataatatcttggctgctgtacatgacgtgcttaatgaaagtagcaaattgcttcaggagttgagacaggagggagcttgctgtcttggccttctttgtgcttctctgagctatgaggctgagaagatcttcaagtggatttttagcaaatttagctcatctgcaaaagatgaagttaaactcctctacttatgtgccacctacaaagcactagagactgtaggagaaaagaaagccttttcatctgtaatgcagcttgtaatgaccagcctgcagtctattcttgaaaatgtggatacaccagaattgctttgtaaatgtgttaagtgcattcttttggtggctcgatgttaccctcatattttcagcactaattttagggatacagttgatatattagttggatggcatatagatcatactcagaaaccttcgctcacgcagcaggtatctgggtggttgcagagtttggagccattttgggtagctgatcttgcattttctactactcttcttggtcagtttctggaagacatggaagcatatgctgaggacctcagccatgtggcctctggggaatcagtggatgaagatgtccctcctccatcagtgtcattaccaaagctggctgcacttctccgggtatttagtactgtggtgaggagcattggggaacgcttcagcccaattcggggtcctccaattactgaggcatatgtaacagatgttctgtacagagtaatgagatgtgtgacggctgcaaaccaggtgtttttttctgaggctgtgttgacagctgctaatgagtgtgttggtgttttgctcggcagcttggatcctagcatgactatacattgtgacatggtcattacatatggattagaccaactggagaattgccagacttgtggtaccgattatatcatctcagtcttgaatttactcacgctgattgttgaacagataaatacgaaactgccatcatcatttgtagaaaaactgtttataccatcatctaaactactattcttgcgttatcataaagaaaaagaggttgttgctgtagcccatgctgtttatcaagcagtgctcagcttgaagaatattcctgttttggagactgcctataagttaatattgggagaaatgacttgtgccctaaacaacctcctacacagtctacaacttcctgaggcctgttctgaaataaaacatgaggcttttaagaatcatgtgttcaatgtagacaatgcaaaatttgtagttatatttgacctcagtgccctgactacaattggaaatgccaaaaactcactaatagggatgtgggcgctatctccaactgtctttgcacttctgagtaagaatctgatgattgtgcacagtgacctggctgttcacttccctgccattcagtatgctgtgctctacacattgtattctcattgtaccaggcatgatcactttatctctagtagcctcagttcttcctctccttctttgtttgatggagctgtgattagcactgtaactacggctacaaagaaacatttctcaattatattaaatcttctgggaatattacttaagaaagataaccttaaccaggacacgaggaaactgttaatgacttgggctttggaagcagctgttttaatgaagaagtctgaaacatacgcacctttattctctcttccgtctttccataaattttgcaaaggccttttagccaacactctcgttgaagatgtgaatatctgtctgcaggcatgcagcagtctacatgctctgtcctcttccttgccagatgatcttttacagagatgtgtcgatgtttgccgtgttcaactagtgcacagtggaactcgtattcgacaagcatttggaaaactgttgaaatcaattcctttagatgttgtcctaagcaataacaatcacacagaaattcaagaaatttctttagcattaagaagtcacatgagtaaagcaccaagtaatacattccacccccaagatttctctgatgttattagttttattttgtatgggaactctcatagaacagggaaggacaattggttggaaagactgttctatagctgccagagactggataagcgtgaccagtcaacaattccacgcaatctcctgaagacagatgctgtcctttggcagtgggccatatgggaagctgcacaattcactgttctttctaagctgagaaccccactgggcagagctcaagacaccttccagacaattgaaggtatcattcgaagtctcgcagctcacacattaaaccctgatcaggatgttagtcagtggacaactgcagacaatgatgaaggccatggtaacaaccaacttagacttgttcttcttctgcagtatctggaaaatctggagaaattaatgtataatgcatacgagggatgtgctaatgcattaacttcacctcccaaggtcattagaacttttttctataccaatcgccaaacttgtcaggactggctaacgcggattcgactctccatcatgagggtaggattgttggcaggccagcctgcagtgacagtgagacatggctttgacttgcttacagagatgaaaacaaccagcctatctcaggggaatgaattggaagtaaccattatgatggtggtagaagcattatgtgaacttcattgtcctgaagctatacagggaattgctgtctggtcatcatctattgttggaaaaaatcttctgtggattaactcagtggctcaacaggctgaagggaggtttgaaaaggcctctgtggagtaccaggaacacctgtgtgccatgacaggtgttgattgctgcatctccagctttgacaaatcggtgctcaccttagccaatgctgggcgtaacagtgccagcccgaaacattctctgaatggtgaatccagaaaaactgtgctgtccaaaccgactgactcttcccctgaggttataaattatttaggaaataaagcatgtgagtgctacatctcaattgccgattgggctgctgtgcaggaatggcagaacgctatccatgacttgaaaaagagtaccagtagcacttccctcaacctgaaagctgacttcaactatataaaatcattaagcagctttgagtctggaaaatttgttgaatgtaccgagcagttagaattgttaccaggagaaaatatcaatctacttgctggaggatcaaaagaaaaaatagacatgaaaaaactgcttcctaacatgttaagtccggatccgagggaacttcagaaatccattgaagttcaattgttaagaagttctgtttgtttggcaactgctttaaacccgatagaacaagatcagaagtggcagtctataactgaaaatgtggtaaagtacttgaagcaaacatcccgcatcgctattggacctctgagactttctactttaacagtttcacagtctttgccagttctaagtaccttgcagctgtattgctcatctgctttggagaacacagtttctaacagactttcaacagaggactgtcttattccactcttcagtgaagctttacgttcatgtaaacagcatgacgtgaggccatggatgcaggcattaaggtatactatgtaccagaatcagttgttggagaaaattaaagaacaaacagtcccaattagaagccatctcatggaattaggtctaacagcagcaaaatttgctagaaaacgagggaatgtgtcccttgcaacaagactgctggcacagtgcagtgaagttcagctgggaaagaccaccactgcacaggatttagtccaacattttaaaaaactatcaacccaaggtcaagtggatgaaaaatgggggcccgaacttgatattgaaaaaaccaaattgctttatacagcaggccagtcaacacatgcaatggaaatgttgagttcttgtgccatatctttctgcaagtctgtgaaagctgaatatgcagttgctaaatcaattctgacactggctaaatggatccaggcagaatggaaagagatttcaggacagctgaaacaggtttacagagctcagcaccaacagaacttcacaggtctttctactttgtctaaaaacatactcactctaatagaactgccatctgttaatacgatggaagaagagtatcctcggatcgagagtgaatctacagtgcatattggagttggagaacctgacttcattttgggacagttgtatcacctgtcttcagtacaggcacctgaagtagccaaatcttgggcagcgttggccagctgggcttataggtggggcagaaaggtggttgacaatgccagtcagggagaaggtgttcgtctgctgcctagagaaaaatctgaagttcagaatctacttccagacactataactgaggaagagaaagagagaatatatggtattcttggacaggctgtgtgtcggccggcggggattcaggatgaagatataacacttcagataactgagagtgaagacaacgaagaagatgacatggttgatgttatctggcgtcagttgatatcaagctgcccatggctttcagaacttgatgaaagtgcaactgaaggagttattaaagtgtggaggaaagttgtagatagaatattcagcctgtacaaactctcttgcagtgcatactttactttccttaaactcaacgctggtcaaattcctttagatgaggatgaccctaggctgcatttaagtcacagagtggaacagagcactgatgacatgattgtgatggccacattgcgcctgctgcggttgctcgtgaagcatgctggtgagcttcggcagtatctggagcacggcttggagacaacacccactgcaccatggagaggaattattccgcaacttttctcacgcttaaaccaccctgaagtgtatgtgcgccaaagtatttgtaaccttctctgccgtgtggctcaagattccccacatctcatattgtatcctgcaatagtgggtaccatatcgcttagtagtgaatcccaggcttcaggaaataaattttccactgcaattccaactttacttggcaatattcaaggagaagaattgctggtttctgaatgtgagggaggaagtcctcctgcatctcaggatagcaataaggatgaacctaaaagtggattaaatgaagaccaagccatgatgcaggattgttacagcaaaattgtagataagctgtcctctgcaaaccccaccatggtattacaggttcagatgctcgtggctgaactgcgcagggtcactgtgctctgggatgagctctggctgggagttttgctgcaacaacacatgtatgtcctgagacgaattcagcagcttgaagatgaggtgaagagagtccagaacaacaacaccttacgcaaagaagagaaaattgcaatcatgagggagaagcacacagctttgatgaagcccatcgtatttgctttggagcatgtgaggagtatcacagcggctcctgcagaaacacctcatgaaaaatggtttcaggataactatggtgatgccattgaaaatgccctagaaaaactgaagactccattgaaccctgcaaagcctgggagcagctggattccatttaaagagataatgctaagtttgcaacagagagcacagaaacgtgcaagttacatcttgcgtcttgaagaaatcagtccatggttggctgccatgactaacactgaaattgctcttcctggggaagtctcagccagagacactgtcacaatccatagtgtgggcggaaccatcacaatcttaccgactaaaaccaagccaaagaaacttctctttcttggatcagatgggaagagctatccttatcttttcaaaggactggaggatttacatctggatgagagaataatgcagttcctatctattgtgaataccatgtttgctacaattaatcgccaagaaacaccccggttccatgctcgacactattctgtaacaccactaggaacaagatcaggactaatccagtgggtagatggagccacacccttatttggtctttacaaacgatggcaacaacgggaagctgccttacaagcacaaaaggcccaagattcctaccaaactcctcagaatcctggaattgtaccccgtcctagtgaactttattacagtaaaattggccctgctttgaaaacagttgggcttagcctggatgtgtcccgtcgggattggcctcttcatgtaatgaaggcagtattggaagagttaatggaggccacacccccgaatctccttgccaaagagctctggtcatcttgcacaacacctgatgaatggtggagagttacgcagtcttatgcaagatctactgcagtcatgtctatggttggatacataattggccttggagacagacatctggataatgttcttatagatatgacgactggagaagttgttcacatagattacaatgtttgctttgaaaaaggtaaaagccttagagttcctgagaaagtaccttttcgaatgacacaaaacattgaaacagcactgggtgtaactggagtagaaggtgtatttaggctttcatgtgagcaggttttacacattatgcggcgtggcagagagaccctgctgacgctgctggaggcctttgtgtacgaccctctggtggactggacagcaggaggcgaggctgggtttgctggtgctgtctatggtggaggtggccagcaggccgagagcaagcagagcaagagagagatggagcgagagatcacccgcagcctgttttcttctagagtagctgagattaaggtgaactggtttaagaatagagatgagatgctggttgtgcttcccaagttggacggtagcttagatgaatacctaagcttgcaagagcaactgacagatgtggaaaaactgcagggcaaactactggaggaaatagagtttctagaaggagctgaaggggtggatcatccttctcatactctgcaacacaggtattctgagcacacccaactacagactcagcaaagagctgttcaggaagcaatccaggtgaagctgaatgaatttgaacaatggataacacattatcaggctgcattcaataatttagaagcaacacagcttgcaagcttgcttcaagagataagcacacaaatggaccttggtcctccaagttacgtgccagcaacagcctttctgcagaatgctggtcaggcccacttgattagccagtgcgagcagctggagggggaggttggtgctctcctgcagcagaggcgctccgtgctccgtggctgtctggagcaactgcatcactatgcaaccgtggccctgcagtatccgaaggccatatttcagaaacatcgaattgaacagtggaagacctggatggaagagctcatctgtaacaccacagtagagcgttgtcaagagctctataggaaatatgaaatgcaatatgctccccagccacccccaacagtgtgtcagttcatcactgccactgaaatgaccctgcagcgatacgcagcagacatcaacagcagacttattagacaagtggaacgcttgaaacaggaagctgtcactgtgccagtttgtgaagatcagttgaaagaaattgaacgttgcattaaagttttccttcatgagaatggagaagaaggatctttgagtctagcaagtgttattatttctgccctttgtacccttacaaggcgtaacctgatgatggaaggtgcagcgtcaagtgctggagaacagctggttgatctgacttctcgggatggagcctggttcttggaggaactctgcagtatgagcggaaacgtcacctgcttggttcagttactgaagcagtgccacctggtgccacaggacttagatatcccgaaccccatggaagcgtctgagacagttcacttagccaatggagtgtatacctcacttcaggaattgaattcgaatttccggcaaatcatatttccagaagcacttcgatgtttaatgaaaggggaatacacgttagaaagtatgctgcatgaactggacggtcttattgagcagaccaccgatggcgttcccctgcagactctagtggaatctcttcaggcctacttaagaaacgcagctatgggactggaagaagaaacacatgctcattacatcgatgttgccagactactacatgctcagtacggtgaattaatccaaccgagaaatggttcagttgatgaaacacccaaaatgtcagctggccagatgcttttggtagcattcgatggcatgtttgctcaagttgaaactgctttcagcttattagttgaaaagttgaacaagatggaaattcccatagcttggcgaaagattgacatcataagggaagccaggagtactcaagttaatttttttgatgatgataatcaccggcaggtgctagaagagattttctttctaaaaagactacagactattaaggagttcttcaggctctgtggtaccttttctaaaacattgtcaggatcaagttcacttgaagatcagaatactgtgaatgggcctgtacagattgtcaatgtgaaaaccctttttagaaactcttgtttcagtgaagaccaaatggccaaacctatcaaggcattcacagctgactttgtgaggcagctcttgatagggctacccaaccaagccctcggactcacactgtgcagttttatcagtgctctgggtgtagacatcattgctcaagtagaggcaaaggactttggtgccgaaagcaaagtttctgttgatgatctctgtaagaaagcggtggaacataacatccagatagggaagttctctcagctggttatgaacagggcaactgtgttagcaagttcttacgacactgcctggaagaagcatgacttggtgcgaaggctagaaaccagtatttcttcttgtaagacaagcctgcagcgggttcagctgcatattgccatgtttcagtggcaacatgaagatctacttatcaatagaccacaagccatgtcagtcacacctcccccacggtctgctatcctaaccagcatgaaaaagaagctgcataccctgagccagattgaaacttctattgcaacagttcaggagaagctagctgcacttgaatcaagtattgaacagcgactcaagtgggcaggtggtgccaaccctgcattggcccctgtactacaagattttgaagcaacgatagctgaaagaagaaatcttgtccttaaagagagccaaagagcaagtcaggtcacatttctctgcagcaatatcattcattttgaaagtttacgaacaagaactgcagaagccttaaacctggatgcggcgttatttgaactaatcaagcgatgtcagcagatgtgttcgtttgcatcacagtttaacagttcagtgtctgagttagagcttcgtttattacagagagtggacactggtcttgaacatcctattggcagctctgaatggcttttgtcagcacacaaacagttgacccaggatatgtctactcagagggcaattcagacagagaaagagcagcagatagaaacggtctgtgaaacaattcagaatctggttgataatataaagactgtgctcactggtcataaccgacagcttggagatgtcaaacatctcttgaaagctatggctaaggatgaagaagctgctctggcagatggtgaagatgttccctatgagaacagtgttaggcagtttttgggtgaatataaatcatggcaagacaacattcaaacagttctatttacattagtccaggctatgggtcaggttcgaagtcaagaacacgttgaaatgctccaggaaatcactcccaccttgaaagaactgaaaacacaaagtcagagtatctataataatttagtgagttttgcatcacccttagtcaccgatgcaacaaatgaatgttcgagtccaacgtcatctgctacttatcagccatccttcgctgcagcagtccggagtaacactggccagaagactcagcctgatgtcatgtcacagaatgctagaaagctgatccaaaaaaatcttgctacatcagctgatactccaccaagcaccgttccaggaactggcaagagtgttgcttgtagtcctaaaaaggcagtcagagaccctaaaactgggaaagcggtgcaagagagaaactcctatgcagtgagtgtgtggaagagagtgaaagccaagttagagggccgagatgttgatccgaataggaggatgtcagttgctgaacaggttgactatgtcattaaggaagcaactaatctagataacttggctcagctgtatgaaggttggacagcctgggtgtgaatggcaagacagtagatgagtctggttaagcgaggtcagacatccaccagaatcaactcagcctcaggcatccaaagccacaccacagtcggtggtgatgcaactgggggcttactctgaggaaacctaggaaatctcggtgcactaggaagtgaatcccgcaggacagctgcactcagggatacgcccaacaccatggcctgcaaccccagggtcaagggtgaaggaaagcaagctcaccgcctgaacacggagattgtctttctgccacagaacagcagcagacgtgtcgggaggttagctgcggaaagaaatcgggatgccgcggagcacagagtgatttggaactccattccacctgaccctgtgtgtacaatccaggaaaaaaacaaaccccactcagaaacagagaaaactggggtcgcgaagaaatcacagccaaggaagatttgatgcattcagattctcgtgtaacacttgttgcttggcaacagtactggttgggttgaccagtaagtagaaaaaggctaaaggctatgcgatatgaatttcagaaatggactgaaaatggagagctatgtaacagatacactacagtagaagaacttacttctgaaatgaagggaaaaaaaccaccccatcgttccctactcctccccaccacttacccgttccccctttacctaatctagtagattagccatctttcaaattcacttttatttcagtccttatatttcatatacttccgtctcgatgctgttaacaacttctgataacatggaaaattcaaggattgtttaaaggtctgatgatcacacacaaaatgtaattccggttatttaagtcatttctgtgattctatcatgtacagtttccagaattgtcactgtgcattcaaaagtaatgaatctaacagacatttgatttaatgtacactcccttttgcttatagtgtgcattttttttggaggtcattcaaattttccctcttctgtgatagctgtagtttctttcatagaaagtagctaatccagtgtaatcttttacctttttaaaaaccaagatagagtatctattagagttttacattgttgatgatagattaacaataaagtgatgttctggtggaggtagactgaaatttttttaattcatgtttttcatttgatacttttaatttacacttagtaaattaaaagttgtttaatttacttggcattttaggacatgtacatgaaacagtgaaaatgagatccaccaacatcttttattaagttcagttattagtctgtgaagtgctttactttttgcacaattttaatagcttgctattcagtaatacattatagtgaattcatgatcaaggtttccttaaatttagcattgcatttcagtactgactgtgtaagctaaattgctgatccaaaataaaaacccagactagaatagggttcttaaaatcaagtatcaatacaaaatagaacacaattaaaatcttaattgttggctgggcacagtggctcacgcctgtaatcccagcactttgggaggccgaggcgggcggatcatgaggttaggagagcgagaccatcctggctaacacggtgaaaccccgtctttactaaaaatacaaaaaaaattagccgggcgtggtggcgggcgcctgtagtcccagctactcgggaggctgaggcaggagaatggcgtgaacccaggaggcggagcttgcagtgagccgagattgtgccactgcactccagcctgggcaacagagctagactctgtgtcaaaaataaatgactagataaaaaaaaaaattgtttgagtacattttccctgcattttagagattaggacagtggtcactttctagttgccgtcttcacagacaaacttgaaaggtattaaggaaaaaattccacatagctctgggccttttttgtattctgattgccacgttaatctgtaatcgttaagtacccatgaaagaatgtgtttcagtatcagtgcttttttggtactttaacaagtattgtaggcacggtggatttttttgaaatacccatgtgtccaatagcaagttaaggaacctagcgcatcaaattttgttttcttcattcatttggaaccttattttcgcaaaaaacctagctggaataataatgccatattgtattttgcacactgctttattttctagaggctctgggagcaaattacattcatcacattacctctgctctctcaagattaaagtctttcagcaacattctttattgtcatcataaggaaaaacttttatcgcaatgatagtcagttcacattagtttagcactatagatagtattcagaaattgctttctctttggtaaagaagataaataggtgaattttattgcctgtgttttcaggcttcagaggtacctggcaccttactcaagcaaaaacaaaaaacagctttacttcaaaagcatgtgcctctggtaaattatccatcacttttgttttaaagtggtccctccaagaataatgtggcatacacagtgggtttggttgtaaggcagatgtaatagatgacttcaaaagcctgctccttactgcactctggacaaggccctggtctgtatagtttggcttcctctgttaagtcattctacaaggtgacttgccatttgaactttcgtaagagacctcagcagttagactgagaaaagttagagtgctgtagttatgaagtcatacatttttgataaaatacctgtggaaaaccagggatcctctcctgtttctctctcttgcctccccctttccctccattcctctgtcgcctccccctctcctccactttctttaagaatcagggggtacagaataacctacaaacaacctcttcaaagtacccttggaaattgaagttcaatcttaagttttttgctgtctttaatttactagaattgcctaatttttagttgatttctctacagagcttagcttgtgtagttatttctcttttactgttgctttggtgtgtcttgaagtttgattgattatttttggtcattgagttcttagtgtagtttgctagatgattattaagattcttttgtgtctgacacttgtggtgagttgcttttgaaatctgttgagatttccatgtgagaactgataatcaggctcttgatctgcttccctaaattacttttttagagcccaaaccccaggtttagggtgagggtttgtaatacaaagaaacacttccatcacttctgcccttaacccttgcctctattacctaagcttagtaagtagttttcttaatattgtccaatgtttggtgttatctgcattgttttttgtttttttaattgtggttgttctgacgtgtgaaatttaaggaaagagccattttttaaaaatgccgagcagggcaatgcaagtacagccaaatattagacttgatgtgcaatcttcggtcctttttaatctggggtattataggcagtactttaaattgcaaagtcttccgggcctattttcctctacatttttgtaattaactctgggggcttacttgttttggcagtactgaaatcaaaggagctggttcttcttttctcccaattattttcatatgaaagcacctacaattagcctgttagtcctattcagatacatcaaatatcagtgaatgctttactattcgcacatttaagcatctttgttttacataaaattagagtatgaaaaccagtgttcaattttttatcttgttgagcttgtaaaatgccagcaatttaaaactaggacttttccccccataagccaaggaggtagaattactaatacaagggttaaagaaggtagattttgttttcaatatttgggtaatattagaaagattcttcccacagggaagaactagcaagtgtcccaattttttccaaacgttggggaggggaaaattcactgtatcatgaaaccctaagggtttgttgcacttcctgctttttaggcctggataacagtatcaccatccttatttacagaagggtaaaactgactcttaatgagaaaagctttataagttcaagggctgtaaaatatgaactacttagggtcgtttgccttccatgggaacttggctagacttagaaaaagctgtttgttgtgctaatgtaaaagtgtcatacaatttagaagatttttgaagatggtaaacttagaagaattctatgttctgaaatgcacacttttagaatgtttttctttgaaaacaggctaatagttttttctttttttgacaaagtttcagctcctctttaaagttattgtgtcatttttctggtttaaatttcccttatatttccacctgtaatgtcagtggcaacaacatcatacttcacttacttgttaatttactttttacccttattctaagagcaagttgagttgaactgaatcttccttgtcttagtaacaatgtataaatagtggcttttctgtacaaaaggttgtaatgcctcctgatggatataattttgtgattgtatttaaaagttgaataaatcacaccagcttcctgaaaatgttcataatgcatcttttggaaaacaaatacatgcctactttgtgcatatttgcattaacatggcaaagattgtatgaaatacctgtttttcagaaaataaaggttcagtctcaaaagatacagca

SEQ ID NO: 28374 - DNA, 4559 bp, Homo sapiens
  source 1..4559: mol_type = unassigned DNA
gtcgcgggcagccgcctcacagcgatggcggccgagcagggccggtggcggcggcggctgcggctacggccggagacggcagtgttggcggtagtggtgggtggcaggggcctgtgaccgggagctgcccccggacccgggcaccatgagccaaggcccccccacaggggagagcagcgagcccgaagcaaaagtcctccacactaagcggctttaccgggctgtggtggaggctgtgcatcgacttgacctcatcctttgcaacaaaactgcttatcaagaagtattcaaaccagaaaacattagcctgaggaacaagctgcgtgagctctgcgtcaagcttatgttcctgcacccagtggactatgggagaaaggctgaggagctgctgtggagaaaggtatactatgaagttatccagcttatcaagactaacaaaaagcacatccacagccggagcactttggaatgtgcctacaggacgcacctggttgctggtattggcttctaccagcatctccttctctatatccagtcccactaccagctggaactgcagtgctgcatcgactggacccatgtcactgaccccctcataggatgcaagaagccagtgtctgcctcagggaaggagatggattgggcacagatggcatgtcaccgatgtctggtgtatctgggggatttgtcccgatatcagaatgaattagctggcgtagataccgagctgctagccgagagattttactaccaagccctgtcagtagctcctcagattggaatgcccttcaatcagctgggcaccctggcaggcagcaagtactataatgtggaagccatgtattgctacctgcgctgcatccagtcagaagtgtcctttgagggagcctatgggaacctcaagcggctgtatgacaaggcagccaaaatgtaccaccaactgaagaagtgtgagactcggaaactgtctcctggcaaaaagcgatgtaaagacattaaaaggttgctagtgaactttatgtatctgcaaagcctcctacagcccaaaagcagctccgtggactcagagctgacctcactttgccagtcagtcctggaggacttcaacctctgcctcttctacctgccctcctcacccaacctcagcctggccagtgaggatgaggaggagtatgagagtggatatgctttcctcccggaccttctcatctttcaaatggtcatcatctgccttatgtgtgtgcacagcttggagagagcaggatccaagcagtacagtgcagccattgccttcaccctggccctcttttcccacctcgtcaatcatgtcaacatacggctgcaggctgagctggaagagggcgagaatcccgtcccggcattccagagtgatggcacagatgaaccagagtccaaggaacctgtggagaaagaggaggagccagatcctgagcctcctcctgtaacaccccaagtgggtgagggcagaaagagccgtaagttctctcgcctctcctgtctccgccgtcgccgccacccacccaaagttggtgatgacagtgacctgagtgaaggctttgaatcggactcaagccatgactcagcccgggccagtgagggctcagacagtggctctgacaagagtcttgaaggtgggggaacggcctttgatgctgaaacagactcggaaatgaatagccaggagtcccgatcagacttggaagatatggaggaagaggaggggacacggtcaccaaccctggagccccctcggggcagatcagaggctcccgattccctcaatggcccactgggccccagtgaggctagcattgccagcaatctacaagccatgtccacccagatgttccagactaagcgctgcttccgactggcccccacctttagcaacctgctcctccagcccaccaccaaccctcatacctcggccagccacaggccttgcgtcaatggggatgtagacaagccttcagagccagcctctgaggagggctctgagtcggaggggagtgagtccagtggacgctcctgtcggaatgagcgcagcatccaggagaagcttcaggtcctgatggccgaaggtctgcttcctgctgtgaaagtcttcctggactggcttcggaccaaccccgacctcatcatcgtgtgtgcgcagagctctcaaagtctgtggaaccgcctgtctgtgttgctgaatctgttgcctgctgctggtgaactccaggagtctggcctggccttgtgtcctgaggtccaagatcttcttgaaggttgtgaactgcctgacctcccctctagccttctgctcccagaggacatggctcttcgtaacctgcccccgctccgagctgcccacagacgctttaactttgacacggatcggcccctgctcagcaccttagaggagtcagtggtgcgcatctgctgcatccgcagctttggtcatttcatcgcccgcctgcaaggcagcatcctgcagttcaacccagaggttggcatcttcgtcagcattgcccagtctgagcaggagagcctgctgcagcaggcccaggcacagttccgaatggcacaggaggaagctcgtcggaacaggctcatgagagacatggctcagctacgacttcagctcgaagtgtctcagctggagggcagcctgcagcagcccaaggcccagtcagccatgtctccctacctcgtccctgacacccaggccctctgccaccatctccctgtcatccgccaactggccaccagtggccgcttcattgtcatcatcccaaggacagtgatcgatggcctggatttgctgaagaaggaacacccaggggcccgggatgggattcggtacctggaggcagagtttaaaaaaggaaacaggtacattcgctgccagaaagaggtgggaaagagctttgagcggcataagctgaagaggcaggatgcagatgcctggactctctataagatcctagacagctgcaaacagctgactctggcccagggggcaggtgaggaggatccgagtggcatggtgaccatcatcacaggccttccactggacaaccccagcgtgctttcaggccccatgcaggcagccctgcaggccgctgcccacgccagtgtggacatcaagaatgttctggacttctacaagcagtggaaggaaattggttgatactgacccccaggccctgcagtggggctgactccagatctctcctgccctccctggcagccaggaccagcacctgtagtcaccccaccacacgcagactcatgcacgcacacaggagggaggcctagctgctcagaggctgcagggagggcccaggagccggctgggagggtggggtccctttgttgccaagacgttaggaaagcgaggaaagtgcttggattaggagagtcttgtgggcccctggccagccttcctgcctcagctcccctgctgtctccaggggcaggtggtaggcatgggtacctgcatttcactggaatgggttcttggatctctgaggggaaggaacagcaaaagaggcccttcttcctcacccaagatgcagggtggttggggccaggagtttggaccctctaggtcttgggggaagagctgggtaatacctggtgtctgagtgattctctgcagacccttcccctcctcaaggatcacccatcctcctttcagccccctttatggggaccaggcagctctggagccagccacaggggctgttagagaagcaaggcctggagtggcctgcaccgagtagcagggtcagggttcgtgtgctcctcctcctgctgcaggggctgcacatcccattgccccacttctgctttgtgtctccctctgtctagcttccagggcagggagcaggccccacctagggctgcaggcagtctggcctgtgccagcacggtctcctgtgcccaccagccccacaggtgctgtgctttgtgctcttggctgctgtgctgggacagaatgggatgccaggaagagaagaaagggggtgcagtctgaggccaccaccccccttcctatctaagggagggctgaagacaaggggccggcattcagtgggcagcagaaaggagaggctccttgaagctgctcagtcagaggcccccgtccctccttttgccttccgcaggactgaagacctgaaggggctggcttttggagtgttgaggtgaatatctgggagcagagatcatgaatagctcagggcagtgaatggcgcaccaagagcagggctgtgtgtgggaggctgcagccaggattgcctcagctcctccccctcaggctgggaggatagcacaggctaggggctcggggtggagggtctcagctctgctgcccccaccccagtactagcctagcttcccaagctgtggcttagaggatagttggcttcctgcctctctcctctaaaatagcaagtctgggaaatcctggggtgagtggagtcaccccactcccagttgctggcagagactgagactaaagcatcacttaataaaccccccaagcccaa

SEQ ID NO: 28375 - DNA, 1762 bp, Homo sapiens
  source 1..1762: mol_type = unassigned DNA
agcgatggcggccgagcagggccggtggcggcggcggctgcggctacggccggagacggcagtgttggcggtagtggtgggtggcaggggcctgtgaccgggagctgcccccggacccgggcaccatgagccaaggcccccccacaggggagagcagcgagcccgaagcaaaagtcctccacactaagcggctttaccgggctgtggtggaggctgtgcatcgacttgacctcatcctttgcaacaaaactgcttatcaagaagtattcaaaccagaaaacattagcctgaggaacaagctgcgtgagctctgcgtcaagcttatgttcctgcacccagtggactatgggagaaaggctgaggagctgctgtggagaaaggtatactatgaagttatccagcttatcaagactaacaaaaagcacatccacagccggagcactttggaatgtgcctacaggacgcacctggttgctggtattggcttctaccagcatctccttctctatatccagtcccactaccagctggaactgcagtgctgcatcgactggacccatgtcactgaccccctcataggatgcaagaagccagtgtctgcctcagggaaggagatggattgggcacagatggcatgtcaccgatgtctggtgtatctgggggatttgtcccgatatcagaatgaattagctggcgtagataccgagctgctagccgagagattttactaccaagccctgtcagtagctcctcagattggaatgcccttcaatcagctgggcaccctggcaggcagcaagtactataatgtggaagccatgtattgctacctgcgctgcatccagtcagaagtgtcctttgagggagcctatgggaacctcaagcggctgtatgacaaggcagccaaaatgtaccaccaactgaagaagtgtgagactcggaaactgtctcctggcaaaaagcgatgtaaagacattaaaaggttgctagtgaactttatgtatctgcaaagcctcctacagcccaaaagcaggggctgcacatcccattgccccacttctgctttgtgtctccctctgtctagcttccagggcagggagcaggccccacctagggctgcaggcagtctggcctgtgccagcacggtctcctgtgcccaccagccccacaggtgctgtgctttgtgctcttggctgctgtgctgggacagaatgggatgccaggaagagaagaaagggggtgcagtctgaggccaccaccccccttcctatctaagggagggctgaagacaaggggccggcattcagtgggcagcagaaaggagaggctccttgaagctgctcagtcagaggcccccgtccctccttttgccttccgcaggactgaagacctgaaggggctggcttttggagtgttgaggtgaatatctgggagcagagatcatgaatagctcagggcagtgaatggcgcaccaagagcagggctgtgtgtgggaggctgcagccaggattgcctcagctcctccccctcaggctgggaggatagcacaggctaggggctcggggtggagggtctcagctctgctgcccccaccccagtactagcctagcttcccaagctgtggcttagaggatagttggcttcctgcctctctcctctaaaatagcaagtctgggaaatcctggggtgagtggagtcaccccactcccagttgctggcagagactgagactaaagcatcacttaataaaccccccaagccc

SEQ ID NO: 28376 - DNA, 670 bp, Homo sapiens
  source 1..670: mol_type = unassigned DNA
cttcattgtcatcatcccaaggacagtgatcgatggcctggatttgctgaagaaggaacacccaggggcccgggatgggattcggtacctggaggcagagtttaaaaaaggaaacaggtacattcgctgccagaaagaggtgggaaagagctttgagcggcataagctgaagaggcaggatgcagatgcctggactctctataagatcctagacagctgcaaacagctgactctggcccagggggcaggtgaggaggatccgagtggcatggtgaccatcatcacaggccttccactggacaaccccagcgtgctttcaggccccatgcaggcagccctgcaggccgctgcccacgccagtgtggacatcaagaatgttctggacttctacaagcagtggaaggaaattggttgatactgacccccaggccccctcaggctgggaggatagcacaggctaggggctcggggtggagggtctcagctctgctgcccccaccccagtactagcctagcttcccaagctgtggcttagaggatagttggcttcctgcctctctcctctaaaatagcaagtctgggaaatcctggggtgagtggagtcaccccactcccagttgctggcagagactgagactaaagcatcacttaataaaccccccaagcccaa

SEQ ID NO: 28377 - DNA, 3985 bp, Homo sapiens
  source 1..3985: mol_type = unassigned DNA
aggagccggaggagaggaagatggcggcggccgccagcacccgcggtgccgcggggccgctccgaggagcctgagagacccacggaggcttcgcgggaagacgcggcggcggcggcggaggatgagcctgcagagcgcgcagtacctccgattctaagctgggtccagctgaagtctggacatccaggcaggctctgcaggacctgtaccagaaaatgctagttaccgatttggaatacgctttagacaagaaagtagaacaggatctctggaatcacgcctttaagaatcagatcacaacactgcaaggccaggcaaagaatcgagcaaatccgaatcggagtgaagttcaggcaaacctttctctgttcctagaggcagctagtggcttctatactcagttattacaagaactgtgtacagtatttaatgtagatttaccatgccgtgtgaagtcttcccaattgggaattatcagcaataaacagacgcataccagcgccatagtgaagccacagtctagctcctgttcctatatctgccagcactgcctcgtccaccttggagacattgctcgatacagaaaccagaccagccaggcagagtcctactataggcatgcagctcagcttgtcccctccaatggtcagccttataatcagttggctatcttagcttcttccaaaggagaccatctgaccacaattttctactactgcagaagcattgctgtgaagttccctttcccagctgcctccactaatctgcaaaaagcactttctaaagcactggaaagccgagatgaggtgaaaaccaagtggggtgtttctgacttcatcaaggcctttattaaattccacggtcatgtgtacctgagtaagagcttggaaaagttgagccctcttcgagagaaattggaagaacagtttaagaggctgctattccaaaaagctttcaactctcagcagttagttcatgtcactgtcattaacctgtttcaacttcatcaccttcgtgactttagcaatgaaaccgagcagcacacttatagccaagatgagcagctatgttggacacagttgctggccctctttatgtcttttcttggcatcctgtgcaagtgtcctctacagaatgagtctcaggaggagtcctacaatgcctatcctcttccagcagtcaaggtctccatggactggctaagactcagacccagggtctttcaggaggcagtggtggatgaaagacagtacatttggccctggttgatttctcttctgaatagtttccatccccatgaagaggacctctcaagtattagtgcgacaccacttccagaggagtttgaattacaaggatttttggcattgagaccttctttcaggaacttggatttttccaaaggtcaccagggtattacaggggacaaagaaggccagcaacgacgaatacgacagcaacgcttgatctctataggcaaatggattgctgataatcagccaaggctgattcagtgtgaaaatgaggtagggaaattgttgtttatcacagaaatcccagaattaatactggaagaccccagtgaagccaaagagaacctcattctgcaagaaacatctgtgatagagtcgctggctgcagatgggagcccagggctaaaatcagtgctatctacaagccgaaatttaagcaacaactgtgacacaggagagaagccagtggttaccttcaaagaaaacattaagacacgagaagtgaacagagaccaaggaagaagttttcctcccaaagaggtgagaagggactatagcaaaggaataactgtaactaagaatgatggaaagaaggacaacaacaagaggaaaactgaaaccaagaaatgcaccttagaaaagttacaggaaacaggaaagcagaatgtggcagtgcaggtaaaatcccagacagaactaagaaagactccagtgtctgaagccagaaaaacacctgtaactcaaaccccaactcaagcaagtaactcccagttcatccccattcatcaccctggagccttccctcctcttcccagcaggccagggtttccgcccccaacatatgttatccccccgcctgtggcattttctatgggctcaggttacaccttcccagctggtgtttctgtcccaggaacctttcttcagcctacagctcactctccagcaggaaaccaggtgcaagctgggaaacagtcccacattccttacagccagcaacggccctctggaccagggccaatgaaccagggacctcaacaatcacagccaccttcccagcaaccccttacatctttaccagctcagccaacagcacagtctacaagccagctgcaggttcaagctctaactcagcaacaacaatcccctacaaaagctgtgccggctttggggaaaagcccgcctcaccactctggattccagcagtatcaacaggcagatgcctccaaacagctgtggaatccccctcaggttcaaggcccattagggaaaattatgcctgtgaaacagccctactaccttcagacccaagaccccataaaactgtttgagccgtcattgcaacctcctgtaatgcagcagcagcctctagaaaaaaaaatgaagccttttcccatggagccatataaccataatccctcagaagtcaaggtcccagaattctactgggattcttcctacagcatggctgataacagatctgtaatggcacagcaagcaaacatagaccgcaggggcaaacggtcaccaggagtcttccgtccagagcaggatcctgtacccagaatgccgtttgaggaccccaagagctcccctctgcttcctccggacctgttaaagagtctggctgccttggaggaagaggaagagctgattttttctaaccctcctgatctttacccggctctgctggggcctctcgcctctcttcctggacgaagcctttttaaatccttattggagaagccctcagagctcatgtcacattcatcctctttcctgtccctcaccggattctctctcaatcaggaaagatacccaaataatagtatgttcaatgaggtatatgggaaaaacctgacatccagctccaaagcagaactcagtccctcaatggccccccaggaaacatctctgtattccctttttgaagggactccgtggtctccatcacttcctgccagttcagatcattcaacaccagccagccagtctcctcattcctctaacccaagcagcctacccagctctcctccaacacacaaccataattctgttccattctccaattttggacccattgggactccagataacagggatagaaggactgcagatcggtggaaaactgataagccagccatgggtgggtttggcattgattatctctcagcaacgtcatcctctgagagcagttggcatcaggccagcactccgagtggcacctggacaggccatggcccttccatggaggattcctctgctgtcctcatggaaagcctaaagtctatctggtccagttccatgatgcatcctggaccttctgctctggagcagctgttaatgcagcagaagcagaaacagcaacggggacaaggcaccatgaaccctccacactgaggccaaagtggcaacctgggaatgaaggctccataaaccatggcatgttgggtttgcaggactggcccacacagtcccctgcaggtggcagccctcttttctgtttctcgctgtcaagagggtgtaagtattccaccagcccgctgagtgtgcacgaaatgttcgcagtgcaacaaaaagaaaaatccatcaggaactctccgtccccccggggccctccggagggagagagagaggaactgctgtttatctcactcagttacttggtatcaccgcctctcaccttctccatcgtgcatgtccccagccacatgggaagtgaaagctgagaa

SEQ ID NO: 28378 - DNA, 5788 bp, Homo sapiens
  source 1..5788: mol_type = unassigned DNA
gagccggaggagaggaagatggcggcggccgccagcacccgcggtgccgcggggccgctccgaggagcctgagagacccacggaggcttcgcgggaagacgcggcggcggcggcggaggatgagcctgcagagcgcgcagtacctccggcaggcagaagtcctgaaggctgacatgacagattctaagctgggtccagctgaagtctggacatccaggcaggctctgcaggacctgtaccagaaaatgctagttaccgatttggaatacgctttagacaagaaagtagaacaggatctctggaatcacgcctttaagaatcagatcacaacactgcaaggccaggcaaagaatcgagcaaatccgaatcggagtgaagttcaggcaaacctttctctgttcctagaggcagctagtggcttctatactcagttattacaagaactgtgtacagtatttaatgtagatttaccatgccgtgtgaagtcttcccaattgggaattatcagcaataaacagacgcataccagcgccatagtgaagccacagtctagctcctgttcctatatctgccagcactgcctcgtccaccttggagacattgctcgatacagaaaccagaccagccaggcagagtcctactataggcatgcagctcagcttgtcccctccaatggtcagccttataatcagttggctatcttagcttcttccaaaggagaccatctgaccacaattttctactactgcagaagcattgctgtgaagttccctttcccagctgcctccactaatctgcaaaaagcactttctaaagcactggaaagccgagatgaggtgaaaaccaagtggggtgtttctgacttcatcaaggcctttattaaattccacggtcatgtgtacctgagtaagagcttggaaaagttgagccctcttcgagagaaattggaagaacagtttaagaggctgctattccaaaaagctttcaactctcagcagttagttcatgtcactgtcattaacctgtttcaacttcatcaccttcgtgactttagcaatgaaaccgagcagcacacttatagccaagatgagcagctatgttggacacagttgctggccctctttatgtcttttcttggcatcctgtgcaagtgtcctctacagaatgagtctcaggaggagtcctacaatgcctatcctcttccagcagtcaaggtctccatggactggctaagactcagacccagggtctttcaggaggcagtggtggatgaaagacagtacatttggccctggttgatttctcttctgaatagtttccatccccatgaagaggacctctcaagtattagtgcgacaccacttccagaggagtttgaattacaaggatttttggcattgagaccttctttcaggaacttggatttttccaaaggtcaccagggtattacaggggacaaagaaggccagcaacgacgaatacgacagcaacgcttgatctctataggcaaatggattgctgataatcagccaaggctgattcagtgtgaaaatgaggtagggaaattgttgtttatcacagaaatcccagaattaatactggaagaccccagtgaagccaaagagaacctcattctgcaagaaacatctgtgatagagtcgctggctgcagatgggagcccagggctaaaatcagtgctatctacaagccgaaatttaagcaacaactgtgacacaggagagaagccagtggttaccttcaaagaaaacattaagacacgagaagtgaacagagaccaaggaagaagttttcctcccaaagaggtgagaagggactatagcaaaggaataactgtaactaagaatgatggaaagaaggacaacaacaagaggaaaactgaaaccaagaaatgcaccttagaaaagttacaggaaacaggaaagcagaatgtggcagtgcaggtaaaatcccagacagaactaagaaagactccagtgtctgaagccagaaaaacacctgtaactcaaaccccaactcaagcaagtaactcccagttcatccccattcatcaccctggagccttccctcctcttcccagcaggccagggtttccgcccccaacatatgttatccccccgcctgtggcattttctatgggctcaggttacaccttcccagctggtgtttctgtcccaggaacctttcttcagcctacagctcactctccagcaggaaaccaggtgcaagctgggaaacagtcccacattccttacagccagcaacggccctctggaccagggccaatgaaccagggacctcaacaatcacagccaccttcccagcaaccccttacatctttaccagctcagccaacagcacagtctacaagccagctgcaggttcaagctctaactcagcaacaacaatcccctacaaaagctgtgccggctttggggaaaagcccgcctcaccactctggattccagcagtatcaacaggcagatgcctccaaacagctgtggaatccccctcaggttcaaggcccattagggaaaattatgcctgtgaaacagccctactaccttcagacccaagaccccataaaactgtttgagccgtcattgcaacctcctgtaatgcagcagcagcctctagaaaaaaaaatgaagccttttcccatggagccatataaccataatccctcagaagtcaaggtcccagaattctactgggattcttcctacagcatggctgataacagatctgtaatggcacagcaagcaaacatagaccgcaggggcaaacggtcaccaggagtcttccgtccagagcaggatcctgtacccagaatgccgtttgagaaatccttattggagaagccctcagagctcatgtcacattcatcctctttcctgtccctcaccggattctctctcaatcaggaaagatacccaaataatagtatgttcaatgaggtatatgggaaaaacctgacatccagctccaaagcagaactcagtccctcaatggccccccaggaaacatctctgtattccctttttgaagggactccgtggtctccatcacttcctgccagttcagatcattcaacaccagccagccagtctcctcattcctctaacccaagcagcctacccagctctcctccaacacacaaccataattctgttccattctccaattttggacccattgggactccagataacagggatagaaggactgcagatcggtggaaaactgataagccagccatgggtgggtttggcattgattatctctcagcaacgtcatcctctgagagcagttggcatcaggccagcactccgagtggcacctggacaggccatggcccttccatggaggattcctctgctgtcctcatggaaagcctaaagtctatctggtccagttccatgatgcatcctggaccttctgctctggagcagctgttaatgcagcagaagcagaaacagcaacggggacaaggcaccatgaaccctccacactgaggccaaagtggcaacctgggaatgaaggctccataaaccatggcatgttgggtttgcaggactggcccacacagtcccctgcaggtggcagccctcttttctgtttctcgctgtcaagagggtgtaagtattccaccagcccgctgagtgtgcacgaaatgttcgcagtgcaacaaaaagaaaaatccatcaggaactctccgtccccccggggccctccggagggagagagagaggaactgctgtttatctcactcagttacttggtatcaccgcctctcaccttctccatcgtgcatgtccccagccacatgggaagtgaaagctgagaagggaaggcagatgggagaagccaatgggaacttctcagtccttttttcctctttggggaataaaataggaatccattaatgattgctttgctgactgagaatgtagttgaaattattcttaaacatcttttattattattactctcagtagtaaaatatcacactgaattcttccatacacaggtgtgcttctagtcagtgtgtagcaaggaaagccccgttcactgctcctgtgagaggttggtggtgacaggatggggaaccgacctcttcagccagtggaaatgttccataagggagagttcaaggcctgtcagaaggctctggtaggccttcctctggccaggagactccagcagggaatgcccttcactctgtaggtgctcgagccccaatcgaggatacagtgtgggtggtggtgctgggctggactagcaggtagactgctgtaggatttcaaattacgtttttgattcctgtacattttacagtcgcacagcaagcagtctcacagaaggcaggctagtccattcacagcctgacacgttctaataggtagaagctttcagtgtggttattttttctttggttggtttttgtgcccccattctacttcccaccctcctgccccatctccatcccttcttttacccaatgctgtatgctagtaattgtttttattcctaatgtgtgcaacatcacatctccccaagaagcaacagcatggggtccagcagttggggcccaaaagacagtctgaagaggaaggaagcagcagtatctgcgtagcccacagagggcccaggcccctgcccagctgcagtctcccagcctccactttcagagtgaaattcaaggcagcacggacatgtgcccatcaggcacagaagaaaacacgacgtcgtccattttggaagagacgaaagaaaggaaaataaactctttgtatgatatttattaggaggaaagaggactgaaaatgttcttgtgtagaaacagaaggacagcatttctgttagtcatttcctggaaaagtaatattttaaggggaaattatggaaacaatctaattgttcaattgctgtgctagtggtagggtttattttctgggaggtctctcctttgtgtgtctgtatgtttgtgtacacacacgtgcccatctgctgtcccagaggggaggggttgtgtgtgcgagtgtatggagttagtgtggaacttaagagctggaagacagctgtagagcaaagcacatccaggagccccagttgtcactgcagtctgggcaaccccagcaatgaaaaggggtgagataacgctcattgctcttcagagagagtggttggagccccccccgccccgtatgcttacattattgctcttttagtttgacatggtgtttgggttttgtttttttgaaaggtctgaaaaggtgaagccccctacccaatggcaatatgaaaccttttgtgcttctcttcagccccttccctgtgtccacctttctctcctcttcccaagcctttttcctactacctttacccagtttgtgtgtttgagctctgcattcaggcagctgcaacattccagtgtttgaactgtcactgattcttgcgccctagacaagctaaccaggtttaccatctcactcccagtaatacccagctcctatctaaagccccattctgcatgagaatttggtgtttggaatgttttctgactcttggggcgggattcctcgccttatcatcctcactgtggagtaatgagggggaggagaatctttatcagaaactggttttgtgtagtaaactttcttttgtggttttttgttttgttttctgggttttgttttttgtttttgtctgtgcaagacctgcagctgctgaaaatcagctttgcctttaattaaaccatgttctctcc

SEQ ID NO: 28379 - DNA, 5970 bp, Homo sapiens
  source 1..5970: mol_type = unassigned DNA
cccacccccctgccgagcgaggaggagccggaggagaggaagatggcggcggccgccagcacccgcggtgccgcggggccgctccgaggagcctgagagacccacggaggcttcgcgggaagacgcggcggcggcggcggaggatgagcctgcagagcgcgcagtacctccgaatgtcttaaaccattctaccttatgagaaattggatgttcttgcagatagtcattgtgggagaaaacgtttcatttaagtcccagatgaggaccgaaaacttgaaatcagaggagcatctgaaatcaagtaatattaggcaggcagaagtcctgaaggctgacatgacagattctaagctgggtccagctgaagtctggacatccaggcaggctctgcaggacctgtaccagaaaatgctagttaccgatttggaatacgctttagacaagaaagtagaacaggatctctggaatcacgcctttaagaatcagatcacaacactgcaaggccaggcaaagaatcgagcaaatccgaatcggagtgaagttcaggcaaacctttctctgttcctagaggcagctagtggcttctatactcagttattacaagaactgtgtacagtatttaatgtagatttaccatgccgtgtgaagtcttcccaattgggaattatcagcaataaacagacgcataccagcgccatagtgaagccacagtctagctcctgttcctatatctgccagcactgcctcgtccaccttggagacattgctcgatacagaaaccagaccagccaggcagagtcctactataggcatgcagctcagcttgtcccctccaatggtcagccttataatcagttggctatcttagcttcttccaaaggagaccatctgaccacaattttctactactgcagaagcattgctgtgaagttccctttcccagctgcctccactaatctgcaaaaagcactttctaaagcactggaaagccgagatgaggtgaaaaccaagtggggtgtttctgacttcatcaaggcctttattaaattccacggtcatgtgtacctgagtaagagcttggaaaagttgagccctcttcgagagaaattggaagaacagtttaagaggctgctattccaaaaagctttcaactctcagcagttagttcatgtcactgtcattaacctgtttcaacttcatcaccttcgtgactttagcaatgaaaccgagcagcacacttatagccaagatgagcagctatgttggacacagttgctggccctctttatgtcttttcttggcatcctgtgcaagtgtcctctacagaatgagtctcaggaggagtcctacaatgcctatcctcttccagcagtcaaggtctccatggactggctaagactcagacccagggtctttcaggaggcagtggtggatgaaagacagtacatttggccctggttgatttctcttctgaatagtttccatccccatgaagaggacctctcaagtattagtgcgacaccacttccagaggagtttgaattacaaggatttttggcattgagaccttctttcaggaacttggatttttccaaaggtcaccagggtattacaggggacaaagaaggccagcaacgacgaatacgacagcaacgcttgatctctataggcaaatggattgctgataatcagccaaggctgattcagtgtgaaaatgaggtagggaaattgttgtttatcacagaaatcccagaattaatactggaagaccccagtgaagccaaagagaacctcattctgcaagaaacatctgtgatagagtcgctggctgcagatgggagcccagggctaaaatcagtgctatctacaagccgaaatttaagcaacaactgtgacacaggagagaagccagtggttaccttcaaagaaaacattaagacacgagaagtgaacagagaccaaggaagaagttttcctcccaaagaggtaaaatcccagacagaactaagaaagactccagtgtctgaagccagaaaaacacctgtaactcaaaccccaactcaagcaagtaactcccagttcatccccattcatcaccctggagccttccctcctcttcccagcaggccagggtttccgcccccaacatatgttatccccccgcctgtggcattttctatgggctcaggttacaccttcccagctggtgtttctgtcccaggaacctttcttcagcctacagctcactctccagcaggaaaccaggtgcaagctgggaaacagtcccacattccttacagccagcaacggccctctggaccagggccaatgaaccagggacctcaacaatcacagccaccttcccagcaaccccttacatctttaccagctcagccaacagcacagtctacaagccagctgcaggttcaagctctaactcagcaacaacaatcccctacaaaagctgtgccggctttggggaaaagcccgcctcaccactctggattccagcagtatcaacaggcagatgcctccaaacagctgtggaatccccctcaggttcaaggcccattagggaaaattatgcctgtgaaacagccctactaccttcagacccaagaccccataaaactgtttgagccgtcattgcaacctcctgtaatgcagcagcagcctctagaaaaaaaaatgaagccttttcccatggagccatataaccataatccctcagaagtcaaggtcccagaattctactgggattcttcctacagcatggctgataacagatctgtaatggcacagcaagcaaacatagaccgcaggggcaaacggtcaccaggagtcttccgtccagagcaggatcctgtacccagaatgccgtttgaggaccccaagagctcccctctgcttcctccggacctgttaaagagtctggctgccttggaggaagaggaagagctgattttttctaaccctcctgatctttacccggctctgctggggcctctcgcctctcttcctggacgaagcctttttaaatccttattggagaagccctcagagctcatgtcacattcatcctctttcctgtccctcaccggattctctctcaatcaggaaagatacccaaataatagtatgttcaatgaggtatatgggaaaaacctgacatccagctccaaagcagaactcagtccctcaatggccccccaggaaacatctctgtattccctttttgaagggactccgtggtctccatcacttcctgccagttcagatcattcaacaccagccagccagtctcctcattcctctaacccaagcagcctacccagctctcctccaacacacaaccataattctgttccattctccaattttggacccattgggactccagataacagggatagaaggactgcagatcggtggaaaactgataagccagccatgggtgggtttggcattgattatctctcagcaacgtcatcctctgagagcagttggcatcaggccagcactccgagtggcacctggacaggccatggcccttccatggaggattcctctgctgtcctcatggaaagcctaaagtctatctggtccagttccatgatgcatcctggaccttctgctctggagcagctgttaatgcagcagaagcagaaacagcaacggggacaaggcaccatgaaccctccacactgaggccaaagtggcaacctgggaatgaaggctccataaaccatggcatgttgggtttgcaggactggcccacacagtcccctgcaggtggcagccctcttttctgtttctcgctgtcaagagggtgtaagtattccaccagcccgctgagtgtgcacgaaatgttcgcagtgcaacaaaaagaaaaatccatcaggaactctccgtccccccggggccctccggagggagagagagaggaactgctgtttatctcactcagttacttggtatcaccgcctctcaccttctccatcgtgcatgtccccagccacatgggaagtgaaagctgagaagggaaggcagatgggagaagccaatgggaacttctcagtccttttttcctctttggggaataaaataggaatccattaatgattgctttgctgactgagaatgtagttgaaattattcttaaacatcttttattattattactctcagtagtaaaatatcacactgaattcttccatacacaggtgtgcttctagtcagtgtgtagcaaggaaagccccgttcactgctcctgtgagaggttggtggtgacaggatggggaaccgacctcttcagccagtggaaatgttccataagggagagttcaaggcctgtcagaaggctctggtaggccttcctctggccaggagactccagcagggaatgcccttcactctgtaggtgctcgagccccaatcgaggatacagtgtgggtggtggtgctgggctggactagcaggtagactgctgtaggatttcaaattacgtttttgattcctgtacattttacagtcgcacagcaagcagtctcacagaaggcaggctagtccattcacagcctgacacgttctaataggtagaagctttcagtgtggttattttttctttggttggtttttgtgcccccattctacttcccaccctcctgccccatctccatcccttcttttacccaatgctgtatgctagtaattgtttttattcctaatgtgtgcaacatcacatctccccaagaagcaacagcatggggtccagcagttggggcccaaaagacagtctgaagaggaaggaagcagcagtatctgcgtagcccacagagggcccaggcccctgcccagctgcagtctcccagcctccactttcagagtgaaattcaaggcagcacggacatgtgcccatcaggcacagaagaaaacacgacgtcgtccattttggaagagacgaaagaaaggaaaataaactctttgtatgatatttattaggaggaaagaggactgaaaatgttcttgtgtagaaacagaaggacagcatttctgttagtcatttcctggaaaagtaatattttaaggggaaattatggaaacaatctaattgttcaattgctgtgctagtggtagggtttattttctgggaggtctctcctttgtgtgtctgtatgtttgtgtacacacacgtgcccatctgctgtcccagaggggaggggttgtgtgtgcgagtgtatggagttagtgtggaacttaagagctggaagacagctgtagagcaaagcacatccaggagccccagttgtcactgcagtctgggcaaccccagcaatgaaaaggggtgagataacgctcattgctcttcagagagagtggttggagccccccccgccccgtatgcttacattattgctcttttagtttgacatggtgtttgggttttgtttttttgaaaggtctgaaaaggtgaagccccctacccaatggcaatatgaaaccttttgtgcttctcttcagccccttccctgtgtccacctttctctcctcttcccaagcctttttcctactacctttacccagtttgtgtgtttgagctctgcattcaggcagctgcaacattccagtgtttgaactgtcactgattcttgcgccctagacaagctaaccaggtttaccatctcactcccagtaatacccagctcctatctaaagccccattctgcatgagaatttggtgtttggaatgttttctgactcttggggcgggattcctcgccttatcatcctcactgtggagtaatgagggggaggagaatctttatcagaaactggttttgtgtagtaaactttcttttgtggttttttgttttgttttctgggttttgttttttgtttttgtctgtgcaagacctgcagctgctgaaaatcagctttgcctttaattaaaccatgttctctccaaccaga

SEQ ID NO: 28380 - DNA, 2483 bp, Homo sapiens
  source 1..2483: mol_type = unassigned DNA
gagccggaggagaggaagatggcggcggccgccagcacccgcggtgccgcggggccgctccgaggagcctgagagacccacggaggcttcgcgggaagacgcggcggcggcggcggaggatgagcctgcagagcgcgcagtacctccgattctaagctgggtccagctgaagtctggacatccaggcaggctctgcaggacctgtaccagaaaatgctagttaccgatttggaatacgctttagacaagaaagtagaacaggatctctggaatcacgcctttaagaatcagatcacaacactgcaaggccaggcaaagaatcgagcaaatccgaatcggagtgaagttcaggcaaacctttctctgttcctagaggcagctagtggcttctatactcagttattacaagaactgtgtacagtatttaatgtagatttaccatgccgtgtgaagtcttcccaattgggaattatcagcaataaacagacgcataccagcgccatagtgaagccacagtctagctcctgttcctatatctgccagcactgcctcgtccaccttggagacattgctcgatacagaaaccagaccagccaggcagagtcctactataggcatgcagctcagcttgtcccctccaatggtcagccttataatcagttggctatcttagcttcttccaaaggagaccatctgaccacaattttctactactgcagaagcattgctgtgaagttccctttcccagctgcctccactaatctgcaaaaagcactttctaaagcactggaaagccgagatgaggtgaaaaccaagtggggtgtttctgacttcatcaaggcctttattaaattccacggtcatgtgtacctgagtaagagcttggaaaagttgagccctcttcgagagaaattggaagaacagtttaagaggctgctattccaaaaagctttcaactctcagcagttagttcatgtcactgtcattaacctgtttcaacttcatcaccttcgtgactttagcaatgaaaccgagcagcacacttatagccaagatgagcagctatgttggacacagttgctggccctctttatgtcttttcttggcatcctgtgcaagtgtcctctacagaatgagtctcaggaggagtcctacaatgcctatcctcttccagcagtcaaggtctccatggactggctaagactcagacccagggtctttcaggaggcagtggtggatgaaagacagtacatttggccctggttgatttctcttctgaatagtttccatccccatgaagaggacctctcaagtattagtgcgacaccacttccagaggagtttgaattacaaggatttttggcattgagaccttctttcaggaacttggatttttccaaaggtcaccagggtattacaggggacaaagaaggccagcaacgacgaatacgacagcaacgcttgatctctataggcaaatggattgctgataatcagccaaggctgattcagtgtgaaaatgaggtagggaaattgttgtttatcacagaaatcccagaattaatactggaagaccccagtgaagccaaagagaacctcattctgcaagaaacatctgtgatagagtcgctggctgcagatgggagcccagggctaaaatcagtgctatctacaagccgaaatttaagcaacaactgtgacacaggagagaagccagtggttaccttcaaagaaaacattaagacacgagaagtgaacagagaccaaggaagaagttttcctcccaaagaggtaaaatcccagacagaactaagaaagactccagtgtctgaagccagaaaaacacctgtaactcaaaccccaactcaagcaagtaactcccagttcatccccattcatcaccctggagccttccctcctcttcccagcaggccagggtttccgcccccaacatatgttatccccccgcctgtggcattttctatgggctcaggttacaccttcccagctggtgtttctgtcccaggaacctttcttcagcctacagctcactctccagcaggaaaccaggtgcaagctgggaaacagtcccacattccttacagccagcaacggccctctggaccagggccaatgaaccagggacctcaacaatcacagccaccttcccagcaaccccttacatctttaccagctcagccaacagcacagtctacaagccagctgcaggttcaagctctaactcagcaacaacaatcccctacaaaagctgtgccggctttggggaaaagcccgcctcaccactctggattccagcagtatcaacaggcagatgcctccaaacagctgtggaatccccctcaggttcaaggcccattagggaaaattatgcctgtgaaacagccctactaccttcagacccaagaccccataaaactgtttgagccgtcattgcaacctcctgtaatgcagcagcagcctct

SEQ ID NO: 28381 - DNA, 3526 bp, Homo sapiens
  source 1..3526: mol_type = unassigned DNA
ccctcctccctccccctcccccccgggtcggagtgtccctgcgccccacgggccagagcagcagcgagagcagctttccccactccctccccctcgcctcattcacccccacccccctgccgagcgaggaggagccggaggagaggaagatggcggcggccgccagcacccgcggtgccgcggggccgctccgaggagcctgagagacccacggaggcttcgcgggaagacgcggcggcggcggcggaggatgagcctgcagagcgcgcagtacctccggcaggcagaagtcctgaaggctgacatgacagattctaagctgggtccagctgaagtctggacatccaggcaggctctgcaggacctgtaccagaaaatgctagttaccgatttggaatacgctttagacaagaaagtagaacaggatctctggaatcacgcctttaagaatcagatcacaacactgcaaggccaggcaaagaatcgagcaaatccgaatcggagtgaagttcaggcaaacctttctctgttcctagaggcagctagtggcttctatactcagttattacaagaactgtgtacagtatttaatgtagatttaccatgccgtgtgaagtcttcccaattgggaattatcagcaataaacagacgcataccagcgccatagtgaagccacagtctagctcctgttcctatatctgccagcactgcctcgtccaccttggagacattgctcgatacagaaaccagaccagccaggcagagtcctactataggcatgcagctcagcttgtcccctccaatggtcagccttataatcagttggctatcttagcttcttccaaaggagaccatctgaccacaattttctactactgcagaagcattgctgtgaagttccctttcccagctgcctccactaatctgcaaaaagcactttctaaagcactggaaagccgagatgaggtgaaaaccaagtggggtgtttctgacttcatcaaggcctttattaaattccacggtcatgtgtacctgagtaagagcttggaaaagttgagccctcttcgagagaaattggaagaacagtttaagaggctgctattccaaaaagctttcaactctcagcagttagttcatgtcactgtcattaacctgtttcaacttcatcaccttcgtgactttagcaatgaaaccgagcagcacacttatagccaagatgagcagctatgttggacacagttgctggccctctttatgtcttttcttggcatcctgtgcaagtgtcctctacagaatgagtctcaggaggagtcctacaatgcctatcctcttccagcagtcaaggtctccatggactggctaagactcagacccagggtctttcaggaggcagtggtggatgaaagacagtacatttggccctggttgatttctcttctgaatagtttccatccccatgaagaggacctctcaagtattagtgcgacaccacttccagaggagtttgaattacaaggatttttggcattgagaccttctttcaggaacttggatttttccaaaggtcaccagggtattacaggggacaaagaaggccagcaacgacgaatacgacagcaacgcttgatctctataggcaaatggattgctgataatcagccaaggctgattcagtgtgaaaatgaggtagggaaattgttgtttatcacagaaatcccagaattaatactggaagaccccagtgaagccaaagagaacctcattctgcaagaaacatctgtgatagagtcgctggctgcagatgggagcccagggctaaaatcagtgctatctacaagccgaaatttaagcaacaactgtgacacaggagagaagccagtggttaccttcaaagaaaacattaagacacgagaagtgaacagagaccaaggaagaagttttcctcccaaagaggtaaaatcccagacagaactaagaaagactccagtgtctgaagccagaaaaacacctgtaactcaaaccccaactcaagcaagtaactcccagttcatccccattcatcaccctggagccttccctcctcttcccagcaggccagggtttccgcccccaacatatgttatccccccgcctgtggcattttctatgggctcaggttacaccttcccagctggtgtttctgtcccaggaacctttcttcagcctacagctcactctccagcaggaaaccaggtgcaagctgggaaacagtcccacattccttacagccagcaacggccctctggaccagggccaatgaaccagggacctcaacaatcacagccaccttcccagcaaccccttacatctttaccagctcagccaacagcacagtctacaagccagctgcaggttcaagctctaactcagcaacaacaatcccctacaaaagctgtgccggctttggggaaaagcccgcctcaccactctggattccagcagtatcaacaggcagatgcctccaaacagctgtggaatccccctcaggttcaaggcccattagggaaaattatgcctgtgaaacagccctactaccttcagacccaagaccccataaaactgtttgagccgtcattgcaacctcctgtaatgcagcagcagcctctagaaaaaaaaatgaagccttttcccatggagccatataaccataatccctcagaagtcaaggtcccagaattctactgggattcttcctacagcatggctgataacagatctgtaatggcacagcaagcaaacatagaccgcaggggcaaacggtcaccaggagtcttccgtccagagcaggatcctgtacccagaatgccgtttgagaaatccttattggagaagccctcagagctcatgtcacattcatcctctttcctgtccctcaccggattctctctcaatcaggaaagatacccaaataatagtatgttcaatgaggtatatgggaaaaacctgacatccagctccaaagcagaactcagtccctcaatggccccccaggaaacatctctgtattccctttttgaagggactccgtggtctccatcacttcctgccagttcagatcattcaacaccagccagccagtctcctcattcctctaacccaagcagcctacccagctctcctccaacacacaaccataattctgttccattctccaattttggacccattgggactccagataacagggatagaaggactgcagatcggtggaaaactgataagccagccatgggtgggtttggcattgattatctctcagcaacgtcatcctctgagagcagttggcatcaggccagcactccgagtggcacctggacaggccatggcccttccatggaggattcctctgctgtcctcatggaaagcctaaagtctatctggtccagttccatgatgcatcctggaccttctgctctggagcagctgttaatgcagcagaagcagaaacagcaacggggacaaggcaccatgaaccctccacactga

SEQ ID NO: 28382 - DNA, 4642 bp, Homo sapiens
  source 1..4642: mol_type = unassigned DNA
agccggaggagaggaagatggcggcggccgccagcacccgcggtgccgcggggccgctccgaggagcctgagagacccacggaggcttcgcgggaagacgcggcggcggcggcggaggatgagcctgcagagcgcgcagtacctccggcaggcagaagtcctgaaggctgacatgacagattctaagctgggtccagctgaagtctggacatccaggcaggctctgcaggacctgtaccagaaaatgctagttaccgatttggaatacgctttagacaagaaagtagaacaggatctctggaatcacgcctttaagaatcagatcacaacactgcaaggccaggcaaagaatcgagcaaatccgaatcggagtgaagttcaggcaaacctttctctgttcctagaggcagctagtggcttctatactcagttattacaagaactgtgtacagtatttaatgtagatttaccatgccgtgtgaagtcttcccaattgggaattatcagcaataaacagacgcataccagcgccatagtgaagccacagtctagctcctgttcctatatctgccagcactgcctcgtccaccttggagacattgctcgatacagaaaccagaccagccaggcagagtcctactataggcatgcagctcagcttgtcccctccaatggtcagccttataatcagttggctatcttagcttcttccaaaggagaccatctgaccacaattttctactactgcagaagcattgctgtgaagttccctttcccagctgcctccactaatctgcaaaaagcactttctaaagcactggaaagccgagatgaggtgaaaaccaagtggggtgtttctgacttcatcaaggcctttattaaattccacggtcatgtgtacctgagtaagagcttggaaaagttgagccctcttcgagagaaattggaagaacagtttaagaggctgctattccaaaaagctttcaactctcagcagttagttcatgtcactgtcattaacctgtttcaacttcatcaccttcgtgactttagcaatgaaaccgagcagcacacttatagccaagatgagcagctatgttggacacagttgctggccctctttatgtcttttcttggcatcctgtgcaagtgtcctctacagaatgagtctcaggaggagtcctacaatgcctatcctcttccagcagtcaaggtctccatggactggctaagactcagacccagggtctttcaggaggcagtggtggatgaaagacagtacatttggccctggttgatttctcttctgaatagtttccatccccatgaagaggacctctcaagtattagtgcgacaccacttccagaggagtttgaattacaaggatttttggcattgagaccttctttcaggaacttggatttttccaaaggtcaccagggtattacaggggacaaagaaggccagcaacgacgaatacgacagcaacgcttgatctctataggcaaatggattgctgataatcagccaaggctgattcagtgtgaaaatgaggtagggaaattgttgtttatcacagaaatcccagaattaatactggaagaccccagtgaagccaaagagaacctcattctgcaagaaacatctgtgatagagtcgctggctgcagatgggagcccagggctaaaatcagtgctatctacaagccgaaatttaagcaacaactgtgacacaggagagaagccagtggttaccttcaaagaaaacattaagacacgagaagtgaacagagaccaaggaagaagttttcctcccaaagaggtaaaatcccagacagaactaagaaagactccagtgtctgaagccagaaaaacacctgtaactcaaaccccaactcaagcaagtaactcccagttcatccccattcatcaccctggagccttccctcctcttcccagcaggccagggtttccgcccccaacatatgttatccccccgcctgtggcattttctatgggctcaggttacaccttcccagctggtgtttctgtcccaggaacctttcttcagcctacagctcactctccagcaggaaaccaggtgcaagctgggaaacagtcccacattccttacagccagcaacggccctctggaccagggccaatgaaccagggacctcaacaatcacagccaccttcccagcaaccccttacatctttaccagctcagccaacagcacagtctacaagccagctgcaggttcaagctctaactcagcaacaacaatcccctacaaaagctgtgccggctttggggaaaagcccgcctcaccactctggattccagcagtatcaacaggcagatgcctccaaacagctgtggaatccccctcaggttcaaggcccattagggaaaattatgcctgtgaaacagccctactaccttcagacccaagaccccataaaactgtttgagccgtcattgcaacctcctgtaatgcagcagcagcctctagaaaaaaaaatgaagccttttcccatggagccatataaccataatccctcagaagtcaaggtcccagaattctactgggattcttcctacagcatggctgataacagatctgtaatggcacagcaagcaaacatagaccgcaggggcaaacggtcaccaggagtcttccgtccagagcaggatcctgtacccagaatgccgtttgaggaccccaagagctcccctctgcttcctccggacctgttaaagagtctggctgccttggaggaagaggaagagctgattttttctaaccctcctgatctttacccggctctgctggggcctctcgcctctcttcctggacgaagcctttttaaatccttattggagaagccctcagagctcatgtcacattcatcctctttcctgtccctcaccggattctctctcaatcaggaaagatacccaaataatagtatgttcaatgaggtatatgggaaaaacctgacatccagctccaaagcagaactcagtccctcaatggccccccaggaaacatctctgtattccctttttgaagggactccgtggtctccatcacttcctgccagttcagatcattcaacaccagccagccagtctcctcattcctctaacccaagcagcctacccagctctcctccaacacacaaccataattctgttccattctccaattttggacccattgggactccagataacagggatagaaggactgcagatcggtggaaaactgataagccagccatgggtgggtttggcattgattatctctcagcaacgtcatcctctgagagcagttggcatcaggccagcactccgagtggcacctggacaggccatggcccttccatggaggattcctctgctgtcctcatggaaagcctaaagaagcaacagcatggggtccagcagttggggcccaaaagacagtctgaagaggaaggaagcagcagtatctgcgtagcccacagagggcccaggcccctgcccagctgcagtctcccagcctccactttcagagtgaaattcaaggcagcacggacatgtgcccatcaggcacagaagaaaacacgacgtcgtccattttggaagagacgaaagaaaggaaaataaactctttgtatgatatttattaggaggaaagaggactgaaaatgttcttgtgtagaaacagaaggacagcatttctgttagtcatttcctggaaaagtaatattttaaggggaaattatggaaacaatctaattgttcaattgctgtgctagtggtagggtttattttctgggaggtctctcctttgtgtgtctgtatgtttgtgtacacacacgtgcccatctgctgtcccagaggggaggggttgtgtgtgcgagtgtatggagttagtgtggaacttaagagctggaagacagctgtagagcaaagcacatccaggagccccagttgtcactgcagtctgggcaaccccagcaatgaaaaggggtgagataacgctcattgctcttcagagagagtggttggagccccccccgccccgtatgcttacattattgctcttttagtttgacatggtgtttgggttttgtttttttgaaaggtctgaaaaggtgaagccccctacccaatggcaatatgaaaccttttgtgcttctcttcagccccttccctgtgtccacctttctctcctcttcccaagcctttttcctactacctttacccagtttgtgtgtttgagctctgcattcaggcagctgcaacattccagtgtttgaactgtcactgattcttgcgccctagacaagctaaccaggtttaccatctcactcccagtaatacccagctcctatctaaagccccattctgcatgagaatttggtgtttggaatgttttctgactcttggggcgggattcctcgccttatcatcctcactgtggagtaatgagggggaggagaatctttatcagaaactggttttgtgtagtaaactttcttttgtggttttttgttttgttttctgggttttgttttttgtttttgtctgtgcaagacctgcagctgctgaaaatcagctttgcctttaattaaaccatgttctctccaa

SEQ ID NO: 28383 - DNA, 5629 bp, Homo sapiens
  source 1..5629: mol_type = unassigned DNA
cggccgccagcacccgcggtgccgcggggccgctccgaggagcctgagagacccacggaggcttcgcgggaagacgcggcggcggcggcggaggatgagcctgcagagcgcgcagtacctccggcaggcagaagtcctgaaggctgacatgacagattctaagctgggtccagctgaagtctggacatccaggcaggctctgcaggacctgtaccagaaaatgctagttaccgatttggaatacgctttagacaagaaagtagaacaggatctctggaatcacgcctttaagaatcagatcacaacactgcaaggccaggcaaagaatcgagcaaatccgaatcggagtgaagttcaggcaaacctttctctgttcctagaggcagctagtggcttctatactcagttattacaagaactgtgtacagtatttaatgtagatttaccatgccgtgtgaagtcttcccaattgggaattatcagcaataaacagacgcataccagcgccatagtgaagccacagtctagctcctgttcctatatctgccagcactgcctcgtccaccttggagacattgctcgatacagaaaccagaccagccaggcagagtcctactataggcatgcagctcagcttgtcccctccaatggtcagccttataatcagttggctatcttagcttcttccaaaggagaccatctgaccacaattttctactactgcagaagcattgctgtgaagttccctttcccagctgcctccactaatctgcaaaaagcactttctaaagcactggaaagccgagatgaggtgaaaaccaagtggggtgtttctgacttcatcaaggcctttattaaattccacggtcatgtgtacctgagtaagagcttggaaaagttgagccctcttcgagagaaattggaagaacagtttaagaggctgctattccaaaaagctttcaactctcagcagttagttcatgtcactgtcattaacctgtttcaacttcatcaccttcgtgactttagcaatgaaaccgagcagcacacttatagccaagatgagcagctatgttggacacagttgctggccctctttatgtcttttcttggcatcctgtgcaagtgtcctctacagaatgagtctcaggaggagtcctacaatgcctatcctcttccagcagtcaaggtctccatggactggctaagactcagacccagggtctttcaggaggcagtggtggatgaaagacagtacatttggccctggttgatttctcttctgaatagtttccatccccatgaagaggacctctcaagtattagtgcgacaccacttccagaggagtttgaattacaaggatttttggcattgagaccttctttcaggaacttggatttttccaaaggtcaccagggtattacaggggacaaagaaggccagcaacgacgaatacgacagcaacgcttgatctctataggcaaatggattgctgataatcagccaaggctgattcagtgtgaaaatgaggtagggaaattgttgtttatcacagaaatcccagaattaatactggaagaccccagtgaagccaaagagaacctcattctgcaagaaacatctgtgatagagtcgctggctgcagatgggagcccagggctaaaatcagtgctatctacaagccgaaatttaagcaacaactgtgacacaggagagaagccagtggttaccttcaaagaaaacattaagacacgagaagtgaacagagaccaaggaagaagttttcctcccaaagaggtaaaatcccagacagaactaagaaagactccagtgtctgaagccagaaaaacacctgtaactcaaaccccaactcaagcaagtaactcccagttcatccccattcatcaccctggagccttccctcctcttcccagcaggccagggtttccgcccccaacatatgttatccccccgcctgtggcattttctatgggctcaggttacaccttcccagctggtgtttctgtcccaggaacctttcttcagcctacagctcactctccagcaggaaaccaggtgcaagctgggaaacagtcccacattccttacagccagcaacggccctctggaccagggccaatgaaccagggacctcaacaatcacagccaccttcccagcaaccccttacatctttaccagctcagccaacagcacagtctacaagccagctgcaggttcaagctctaactcagcaacaacaatcccctacaaaagctgtgccggctttggggaaaagcccgcctcaccactctggattccagcagtatcaacaggcagatgcctccaaacagctgtggaatccccctcaggttcaaggcccattagggaaaattatgcctgtgaaacagccctactaccttcagacccaagaccccataaaactgtttgagccgtcattgcaacctcctgtaatgcagcagcagcctctagaaaaaaaaatgaagccttttcccatggagccatataaccataatccctcagaagtcaaggtcccagaattctactgggattcttcctacagcatggctgataacagatctgtaatggcacagcaagcaaacatagaccgcaggggcaaacggtcaccaggagtcttccgtccagagcaggatcctgtacccagaatgccgtttgagaaatccttattggagaagccctcagagctcatgtcacattcatcctctttcctgtccctcaccggattctctctcaatcaggaaagatacccaaataatagtatgttcaatgaggtatatgggaaaaacctgacatccagctccaaagcagaactcagtccctcaatggccccccaggaaacatctctgtattccctttttgaagggactccgtggtctccatcacttcctgccagttcagatcattcaacaccagccagccagtctcctcattcctctaacccaagcagcctacccagctctcctccaacacacaaccataattctgttccattctccaattttggacccattgggactccagataacagggatagaaggactgcagatcggtggaaaactgataagccagccatgggtgggtttggcattgattatctctcagcaacgtcatcctctgagagcagttggcatcaggccagcactccgagtggcacctggacaggccatggcccttccatggaggattcctctgctgtcctcatggaaagcctaaagtctatctggtccagttccatgatgcatcctggaccttctgctctggagcagctgttaatgcagcagaagcagaaacagcaacggggacaaggcaccatgaaccctccacactgaggccaaagtggcaacctgggaatgaaggctccataaaccatggcatgttgggtttgcaggactggcccacacagtcccctgcaggtggcagccctcttttctgtttctcgctgtcaagagggtgtaagtattccaccagcccgctgagtgtgcacgaaatgttcgcagtgcaacaaaaagaaaaatccatcaggaactctccgtccccccggggccctccggagggagagagagaggaactgctgtttatctcactcagttacttggtatcaccgcctctcaccttctccatcgtgcatgtccccagccacatgggaagtgaaagctgagaagggaaggcagatgggagaagccaatgggaacttctcagtccttttttcctctttggggaataaaataggaatccattaatgattgctttgctgactgagaatgtagttgaaattattcttaaacatcttttattattattactctcagtagtaaaatatcacactgaattcttccatacacaggtgtgcttctagtcagtgtgtagcaaggaaagccccgttcactgctcctgtgagaggttggtggtgacaggatggggaaccgacctcttcagccagtggaaatgttccataagggagagttcaaggcctgtcagaaggctctggtaggccttcctctggccaggagactccagcagggaatgcccttcactctgtaggtgctcgagccccaatcgaggatacagtgtgggtggtggtgctgggctggactagcaggtagactgctgtaggatttcaaattacgtttttgattcctgtacattttacagtcgcacagcaagcagtctcacagaaggcaggctagtccattcacagcctgacacgttctaataggtagaagctttcagtgtggttattttttctttggttggtttttgtgcccccattctacttcccaccctcctgccccatctccatcccttcttttacccaatgctgtatgctagtaattgtttttattcctaatgtgtgcaacatcacatctccccaagaagcaacagcatggggtccagcagttggggcccaaaagacagtctgaagaggaaggaagcagcagtatctgcgtagcccacagagggcccaggcccctgcccagctgcagtctcccagcctccactttcagagtgaaattcaaggcagcacggacatgtgcccatcaggcacagaagaaaacacgacgtcgtccattttggaagagacgaaagaaaggaaaataaactctttgtatgatatttattaggaggaaagaggactgaaaatgttcttgtgtagaaacagaaggacagcatttctgttagtcatttcctggaaaagtaatattttaaggggaaattatggaaacaatctaattgttcaattgctgtgctagtggtagggtttattttctgggaggtctctcctttgtgtgtctgtatgtttgtgtacacacacgtgcccatctgctgtcccagaggggaggggttgtgtgtgcgagtgtatggagttagtgtggaacttaagagctggaagacagctgtagagcaaagcacatccaggagccccagttgtcactgcagtctgggcaaccccagcaatgaaaaggggtgagataacgctcattgctcttcagagagagtggttggagccccccccgccccgtatgcttacattattgctcttttagtttgacatggtgtttgggttttgtttttttgaaaggtctgaaaaggtgaagccccctacccaatggcaatatgaaaccttttgtgcttctcttcagccccttccctgtgtccacctttctctcctcttcccaagcctttttcctactacctttacccagtttgtgtgtttgagctctgcattcaggcagctgcaacattccagtgtttgaactgtcactgattcttgcgccctagacaagctaaccaggtttaccatctcactcccagtaatacccagctcctatctaaagccccattctgcatgagaatttggtgtttggaatgttttctgactcttggggcgggattcctcgccttatcatcctcactgtggagtaatgagggggaggagaatctttatcagaaactggttttgtgtagtaaactttcttttgtggttttttgttttgttttctgggttttgttttttgtttttgtctgtgcaagacctgcagctgctgaaaatcagctttgcctttaattaaaccatgttctctccaacc

SEQ ID NO: 28384 - DNA, 3263 bp, Homo sapiens
  source 1..3263: mol_type = unassigned DNA
tttactaacggaccggaaggactctagagaacgctctgcactatggctggtcccgtgagcttgcgagaccttctaatgggagcatcagcctggatgggctctgaaagtcccggagggtcccctactgagggcggagggagcgcggctggcggaccggagcctccatggcgggaggatgagatctgcgttgtgggaatcttcggcaagacggctctacgcctgaattccgagaagttctctcttgtgaatacggtgtgcgaccgacaggtctttcctctctttcgccaccaagatcctggggatccaggacctggaatcagaactgaggctggcgccgtgggtgaggccggtggagccgaggaccctggggctgcagccgggggttcagttcggggaagtggagctgtcgcggaaggtaaccgaactgaggcaggctcccaggactacagccttctgcaggcctactacagtcaggaaagcaaagttctgtatcttctcctcacctccatctgtgacaattcacagcttctccgggcttgtcgggctcttcagagcggggaagctggaggtggactctctttacctcatgcagaagcacacgagttctggaagcatcaagagaagctgcagtgcctcagtctcctttacctattctctgtctgtcatatcttgcttctggtccatcccacttgttcctttgatatcacttatgatcgagtattcagagccctggatgggctgagacagaaggtcctgccgctccttaaaacagccattaaggattgtccagttggcaaagactggaagctaaactgccgaccttgcccacctagactccttttcctctttcaactcaatggagccctcaaggtagaacctcctcggaaccaagacccagctcatccagacaagcccaagaaacattctcccaaaaggaggctgcagcatgccctggaggaccagatctatagaatcttccggaagagtcgtgtcttgactaatcagagcatcaactgcctctttactgtgcctgccaaccaagctttcgtgtacatagtaccgggaagccaggaggaggacccagtaggtatgttgctggaccaacttaggagtcattgtactgtgaaggacccggaatctttgctggtgcctgcacccctttctgggcctaggcgataccaggtgatgaggcagcacagccgacaacaactttcctttcacattgacagcagcagttccagttcttcaggccagctagtggatttcactcttcgggaattcctatggcagcatgtggagctagttctaagcaagaaaggtttcgatgacagtgtgggcaggaacccacagccttcccattttgaacttcctacttatcagaagtggatctcagcagcttcaaaactgtatgaggtggctattgatgggaaagaagaggacttggggtcacccactggagagctaacatctaagattttaagcagtattaaagtcttggaaggatttttggatattgacacaaaattctcagaaaaccgatgccaaaaagctttacccatggcccacagtgcctaccagtcaaatttgcctcataattacacaatgactgtccataagaatcagcttgcccaggctcttcgagtgtacagtcaacatgctagaggtccagcatttcacaaatacgccatgcagttacatgaggactgctacaaattttggagcaatggccatcagctctgtgaggagaggagtttaactgatcaacactgtgtgcacaaatttcactcattacctaaatcaggagaaaaaccagaggctgatagaaatccgcctgtgctatatcacaatagccgagctcgatctactggtgcttgcaactgtggaaggaaacaagcacctcgagatgatccctttgatatcaaagcagccaattatgacttctatcagcttctggaagaaaagtgttgtggaaaattggatcatatcaatttcccagtatttgaaccaagtactccagatcctgctcctgctaaaaatgaatcctctcctgctcctccagattcggatgctgataaacttaaagaaaaagaacctcaaacccaaggagagagcacgagcctgagtttagctttgagtttgggccaatccacagatagcttaggtacctatccagctgatccacaagcaggaggagataatccagaagttcatggtcaagtagaagtgaaaactgagaagaggccaaacttcgttgatcgacaggcatccacagttgagtatctcccaggcatgctacattcaaattgccctaaaggtctcctacccaaattctccagctggtctttggttaaactaggccctgctaagtcttataactttcatacaggtttggaccaacagggctttattccaggaacaaattatcttatgccttgggacattgtcatcaggactagagctgaagatgaaggagacttagacacaaactcttggcctgctccaaataaagctattcctggaaagagaagtgcggttgtaatgggaagaggaagacggcgagatgacatagctcgagcttttgtgggctttgaatatgaagactctcgaggtcggagattcatgtgctctgggcctgacaaagtaatgaaagtaatgggaagtgggccaaaggaatcagctttaaaagccctaaatagtgacatgcccttatatattctgtcatcctctcaaggtagagggctgaaacctcattatgctcaacttatgaggctttttgttgtggttcctgatgctcctttgcagataatactaatgcctcaggttcagccaggcccaccaccatgtccggtattctacccagaaaaacaagaaatcacccttccacctgatggcctttgggttttgagatttccttatgcatatgtgactgagagaggaccttgtttcccccctaaggaaaatgtgcagttaatgagctacaaggtgctccgtggggttcttaaggcagtaacacaataagtgttttccagccagttcaatcctatacttgagctggtttttgtttttggtatttgtggctgtgtttttggtatgtgtttactgtgttttcccaaatccaaaatgtgttttggttacaggagttcagtatttggaaactaatttgttctactttttcattatattgttgatatttattgtaaacgtgactacaactttctaataaagattggttgttctagaaaagaatataaaatacatggatg

SEQ ID NO: 28385 - DNA, 3232 bp, Homo sapiens
  source 1..3232: mol_type = unassigned DNA
agaacgctctgcactatggctggtcccgtgagcttgcgagaccttctaatgggagcatcagcctggatgggctctgaaagtcccggagggtcccctactgagggcggagggagcgcggctggcggaccggagcctccatggcgggaggatgagatctgcgttgtgggaatcttcggcaagacggctctacgcctgaattccgagaagttctctcttgtgaatacggtgtgcgaccgacaggtctttcctctctttcgccaccaagatcctggggatccaggacctggaatcagaactgaggctggcgccgtgggtgaggccggtggagccgaggaccctggggctgcagccgggggttcagttcggggaagtggagctgtcgcggaaggtaaccgaactgaggcaggctcccaggactacagccttctgcaggcctactacagtcaggaaagcaaagttctgtatcttctcctcacctccatctgtgacaattcacagcttctccgggcttgtcgggctcttcagagcggggaagctggaggtggactctctttacctcatgcagaagcacacgagttctggaagcatcaagagaagctgcagtgcctcagtctcctttacctattctctgtctgtcatatcttgcttctggtccatcccacttgttcctttgatatcacttatgatcgagtattcagagccctggatgggctgagacagaaggtcctgccgctccttaaaacagccattaaggattgtccagttggcaaagactggaagctaaactgccgaccttgcccacctagactccttttcctctttcaactcaatggagccctcaaggtagaacctcctcggaaccaagacccagctcatccagacaagcccaagaaacattctcccaaaaggaggctgcagcatgccctggaggaccagatctatagaatcttccggaagagtcgtgtcttgactaatcagagcatcaactgcctctttactgtgcctgccaaccaagctttcgtgtacatagtaccgggaagccaggaggaggacccagtaggtatgttgctggaccaacttaggagtcattgtactgtgaaggacccggaatctttgctggtgcctgcacccctttctgggcctaggcgataccaggtgatgaggcagcacagccgacaacaactttcctttcacattgacagcagcagttccagttcttcaggccagctagtggatttcactcttcgggaattcctatggcagcatgtggagctagttctaagcaagaaaggtttcgatgacagtgtgggcaggaacccacagccttcccattttgaacttcctacttatcagaagtggatctcagcagcttcaaaactgtatgaggtggctattgatgggaaagaagaggacttggggtcacccactggagagctaacatctaagattttaagcagtattaaagtcttggaaggatttttggatattgacacaaaattctcagaaaaccgatgccaaaaagctttacccatggcccacagtgcctaccagtcaaatttgcctcataattacacaatgactgtccataagaatcagcttgcccaggctcttcgagtgtacagtcaacatgctagaggtccagcatttcacaaatacgccatgcagttacatgaggactgctacaaattttggagcaatggccatcagctctgtgaggagaggagtttaactgatcaacactgtgtgcacaaatttcactcattacctaaatcaggagaaaaaccagaggctgatagaaatccgcctgtgctatatcacaatagccgagctcgatctactggtgcttgcaactgtggaaggaaacaagcacctcgagatgatccctttgatatcaaagcagccaattatgacttctatcagcttctggaagaaaagtgttgtggaaaattggatcatatcaatttcccagtatttgaaccaagtactccagatcctgctcctgctaaaaatgaatcctctcctgctcctccagattcggatgctgataaacttaaagaaaaagaacctcaaacccaaggagagagcacgagcctgagtttagctttgagtttgggccaatccacagatagcttaggtacctatccagctgatccacaagcaggaggagataatccagaagttcatggtcaagtagaagtgaaaactgagaagaggccaaacttcgttgatcgacaggcatccacagttgagtatctcccaggcatgctacattcaaattgccctaaaggtctcctacccaaattctccagctggtctttggttaaactaggccctgctaagtcttataactttcatacaggtttggaccaacagggctttattccaggaacaaattatcttatgccttgggacattgtcatcaggactagagctgaagatgaaggagacttagacacaaactcttggcctgctccaaataaagctattcctggaaagagaagtgcggttgtaatgggaagaggaagacggcgagatgacatagctcgagcttttgtgggctttgaatatgaagactctcgaggtcggagattcatgtgctctgggcctgacaaagtaatgaaagtaatgggaagtgggccaaaggaatcagctttaaaagccctaaatagtgacatgcccttatatattctgtcatcctctcaaggtagagggctgaaacctcattatgctcaacttatgaggctttttgttgtggttcctgatgctcctttgcagataatactaatgcctcaggttcagccaggcccaccaccatgtccggtattctacccagaaaaacaagaaatcacccttccacctgatggcctttgggttttgagatttccttatgcatatctgagagaggaccttgtttcccccctaaggaaaatgtgcagttaatgagctacaaggtgctccgtggggttcttaaggcagtaacacaataagtgttttccagccagttcaatcctatacttgagctggtttttgtttttggtatttgtggctgtgtttttggtatgtgtttactgtgttttcccaaatccaaaatgtgttttggttacaggagttcagtatttggaaactaatttgttctactttttcattatattgttgatatttattgtaaacgtgactacaactttctaataaagattggttgttctagaaaagaatataaaatacatggatg

SEQ ID NO: 28386 - DNA, 2353 bp, Homo sapiens
  source 1..2353: mol_type = unassigned DNA
atccacgcacgctcagcccggcgagcgcattcagttctcgagctccagccctcagcgcatgcgcaggacgagtcgcctgagggaactgatctcagctcgggcccgcgttacatcctcctcctcttcttccttcggcccagctttccttaggggctgcaacccggacgccgaggccggtttcggagtggggagtgcccattttctctccttcccacgttcctggcccccagacgccatttgcaggcgggtggcttgggtcagcctccccgcccccacccgactcccgtcacgggagagcgcacaccgcgccccgagaaccaatcagcagccgcgttaggtaaccatgtctgagtctggacacagtcagcctggactctatgggatagagcggcggcgacggtggaaggagcctggctctggtggcccccagaatctctctgggcctggtggtcgggagagggactacattgcaccatgggaaagagagagaagggatgccagcgaagagacaagcacttccgtcatgcagaaaacccccatcatcctctcaaaacctccagcagagcggtcaaaacagccaccacctccaacagcccctgctgccccgcctgctccagcccctctggagaagcccatcgttctcatgaagccacgggaggaggggaaggggcctgtggccgtgacaggtgcctctacccctgagggcaccgccccaccaccccctgcagcccctgcgccacccaagggggagaaggaggggcagagacccacacagcctgtgtaccagatccagaaccggggcatgggcactgccgcaccagcagccatggaccctgtcgtgggtcaggccaaactactgcccccagagcgcatgaagcacagcatcaagttggtggatgaccagatgaattggtgtgacagtgccatcgagtacctgttggatcagactgatgtgttggtggttggtgtcctgggcctccaggggacaggcaagtccatggtcatgtcattgttgtcagccaacactccagaggaggaccagaggacttatgttttccgggcccagagcgctgaaatgaaggaacgagggggcaaccagaccagtggcatcgacttctttattacccaagaacggattgttttcctggacacacagcccatcctgagcccttctatcctagaccatctcatcaataatgaccgcaaactgcctccagagtacaaccttccccacacttacgttgaaatgcagtcactccagattgctgccttccttttcacggtctgccatgtggtgattgttgtccaggactggttcacagacctcagtctctacaggttcctgcagacagcagagatggtgaagccctccaccccatcccccagccacgagtccagcagctcatcgggctccgatgaaggcaccgagtactacccccacctagtcttcttgcagaacaaagctcgccgagaggacttctgtcctcggaagctgcggcagatgcacctgatgattgaccagctcatggcccactcccacctgcgttacaagggaactctgtccatgttacaatgcaatgtcttcccggggcttccacctgacttcctggactctgaggtcaacttattcctggtacccttcatggacagtgaagcagagagtgaaaacccaccaagagcaggacctggttccagcccactcttctccctgctgcctgggtatcgtggccaccccagtttccagtccttggtgagcaagctccggagccaagtgatgtccatggcccggccacagctgtcacacacgatcctcaccgagaagaactggttccactacgctgcccggatctgggatggggtgagaaagtcctctgctctggcagagtacagccgcctgctggcctgaggccaaggagaggaatgtcatgcaggggacctcctgggtccgcagtgtactgcgagggagcacagatgtccatcccccgctggggtggagagcggcagcaggcctgatggatgagggatcgtggcttcccggcccagagacatgaggtgtccagggccaggccccccaccctcagttggggctgttccgggggtgactgtgagcgatcccaccccaaacctgagatggggtagcccgtcctgtgtcctccacagggacaagcagtgggaggagtctgaatggtcaccaggaagcccgggctccatcttgacctcctttttcagggacaggagcaacaggcccctcttccctgactctaagcccttccctgtaaggtgaggcagggtctggagagctctttattggaacagatctggtggttcaaataaacacagtcatgcaagcctg

SEQ ID NO: 28387 - DNA, 3288 bp, Homo sapiens
  source 1..3288: mol_type = unassigned DNA
cagaatccaggggacggttgctgagcgggcctgggacagcgggtcgcggcacctccggcctgcgcgtgtctaatccgtctgtcgggtcccgaaagagctaagccgagcctgcgccggacgggtgggctggactgagagaattctctgagctggtgacaggtgccacaggcactggggatctcaccagaaaggaaccgacggagctaggggccagcgagatggcggacgaggccttagctgggctggatgagggagcccttcggaagctgctggaggtcacagcagatctggcagagcggcggcgcatccgctcagccatccgggaactgcagcggcaggagctggagcgcgaggaggaggccctggcatccaagcgtttccgtgccgagcggcaggacaacaaggagaactggctgcactctcagcagcgggaagctgagcagcgggctgccctggcacggctggcagggcagctggagtccatgaacgatgtggaggaattgactgcactgttgcgaagcgctggtgagtatgaggagcgcaagctgatccgagctgccatccgccgtgtacgggctcaggagattgaggctgccaccttggctgggaggttgtacagcgggcgtcccaacagtggctcaagagaggacagcaaggggctagcggcacacaggctggaacagtgtgaggtgccagagcgagaggaacaggaacagcaggcagaggtttcaaagccaacccccacccctgaaggcaccagccaggatgtgaccacagtgacactcctgctgcgagccccacctgggagcacatccagctcacctgcctcacccagcagttcacccacccctgcctctcctgagcctccattggagcctgccgaggcccagtgccttacagctgaggttccaggcagcccagagccaccccccagcccacccaagaccaccagccctgagcctcaggagtctccaacgctccccagcactgagggccaggtggtcaacaagcttctgtctggccccaaagagacccctgctgcccagagccccaccagaggcccctctgacaccaagagagcagacgtggctggaccccgaccctgccaacgctccctgtcggtgctcagcccccgccaaccagcccagaaccgagagtccaccccccttgccagcggaccttcctcattccagcgggctggctctgtgcgggatcgtgtccacaagttcacatctgattctcctatggctgctaggctccaggatggcacaccccaggctgccctaagtcccctgccccgcaaggctcctgggcccctccctcaccagcaccacccctgcctcctcctccagcggctcctcctctcggggcccgatacctcctcccggttcagcaaggagcaacgaggagtagcccagcccctggcccagcttcgaagctgcccccaggaggagggccccagggggcggggcttggctgctaggccccttgaaaacagagcaggggggcctgtggcacgttcagaggagcctggtgccccgctgcccgtggccgtcggcactgccgagccagggggcagtatgaagaccacattcaccatcgagatcaaggacggccgtggccaggcctccacaggccgggtgctgctgcccacaggcaaccagagggcagaactgacactggggctgcgggcgcccccgaccctactcagcaccagtagtgggggcaagagcaccatcacccgtgtcaacagccctgggaccctggctcggctgggcagtgtcactcatgtcaccagcttcagccatgccccccccagtagccgaggaggctgcagcatcaagatggaagcagagccagcagagcctctcgctgcagcagtggaagcggccaatggggctgagcagacccgagtgaacaaagcaccagaagggcggagccctctgagcgctgaggagctgatgactattgaggatgaaggagtcttggacaagatgctggatcagagcacggactttgaagagcggaagctcatccgggctgcacttcgtgagctccgacaaaggaagagagaccagcgggacaaggagcgggaacggcggctgcaggaggcacggggccggccaggggaggggcgcggcaacacagccactgagaccaccacgaggcacagccagcgggcagctgatggctctgctgtcagcactgttaccaagactgagcggctcgtccactccaatgatggcacacggacggcccgcaccaccacagtggagtcgagtttcgtgaggcgctcggagaatggcagtggcagcaccatgatgcaaaccaagaccttctcctcttcctcctcatccaagaagatgggcagcatcttcgaccgcgaggaccaggccagcccacgggccggcagcctggcggcgctcgagaaacggcaggccgagaagaagaaagagctgatgaaggcgcagagtctgcccaagacctcagcctcccaggcgcgcaaggccatgattgagaagctggagaaggagggcgcggccggcagccctggcggaccccgcgcagccgtgcagcgatccaccagcttcggggtccccaacgccaacagcatcaagcagatgctgctggactggtgtcgagccaagactcgcggctacgagcacgtcgacatccagaacttctcctccagctggagtgatgggatggccttctgtgccctggtgcacaacttcttccctgaggccttcgactatgggcagcttagccctcagaaccgacgccagaacttcgaggtggccttctcatctgcggagacccatgcggactgcccgcagctcctggatacagaggacatggtgcggcttcgagagcctgactggaagtgcgtgtacacgtacatccaggaattctaccgctgtctggtccagaaggggctggtaaaaaccaaaaagtcctaacccctgctcggggccccacggatgctggtggactgtgtgcccctggtggaggtggacgacatgatgatcatgggcaagaagcctgaccccaagtgtgtcttcacctatgtgcagtcgctctacaaccacctgcgacgccacgaactgcgcctgcgcggcaagaatgtctagcctgcccgcccgcatggccagccagtggcaagctgccgcccccactctccgggcaccgtctcctgcctgtgcgtccgcccaccgctgccctgtctgttgcgacaccctcccccccacatacacacgcagcgttttgataaattattggttttcaacg

SEQ ID NO: 28388 - DNA, 3295 bp, Homo sapiens
  source 1..3295: mol_type = unassigned DNA
cagaatccaggggacggttgctgagcgggcctgggacagcgggtcgcggcacctccggcctgcgcgtgtctaatccgtctgtcgggtcccgaaagagctaagccgagcctgcgccggacgggtgggctggactgagagaattctctgagctggtgacaggtgccacaggcactggggatctcaccagaaaggaaccgacggagctaggggccagcgagatggcggacgaggccttagctgggctggatgagggagcccttcggaagctgctggaggtcacagcagatctggcagagcggcggcgcatccgctcagccatccgggaactgcagcggcaggagctggagcgcgaggaggaggccctggcatccaagcgtttccgtgccgagcggcaggacaacaaggagaactggctgcactctcagcagcgggaagctgagcagcgggctgccctggcacggctggcagggcagctggagtccatgaacgatgtggaggaattgactgcactgttgcgaagcgctggtgagtatgaggagcgcaagctgatccgagctgccatccgccgtgtacgggctcaggagattgaggctgccaccttggctgggaggttgtacagcgggcgtcccaacagtggctcaagagaggacagcaaggggctagcggcacacaggctggaacagtgtgaggtgccagagcgagaggaacaggaacagcaggcagaggtttcaaagccaacccccacccctgaaggcaccagccaggatgtgaccacagtgacactcctgctgcgagccccacctgggagcacatccagctcacctgcctcacccagcagttcacccacccctgcctctcctgagcctccattggagcctgccgaggcccagtgccttacagctgaggttccaggcagcccagagccaccccccagcccacccaagaccaccagccctgagcctcaggagtctccaacgctccccagcactgagggccaggtggtcaacaagcttctgtctggccccaaagagacccctgctgcccagagccccaccagaggcccctctgacaccaagagagcagacgtggctggaccccgaccctgccaacgctccctgtcggtgctcagcccccgccaaccagcccagaaccgagagtccaccccccttgccagcggaccttcctcattccagcgggctggctctgtgcgggatcgtgtccacaagttcacatctgattctcctatggctgctaggctccaggatggcacaccccaggctgccctaagtcccctgacccccgcaaggctcctgggcccctccctcaccagcaccacccctgcctcctcctccagcggctcctcctctcggggccccagtgatacctcctcccggttcagcaaggagcaacgaggagtagcccagcccctggcccagcttcgaagctgcccccaggaggagggccccagggggcggggcttggctgctaggccccttgaaaacagagcaggggggcctgtggcacgttcagaggagcctggtgccccgctgcccgtggccgtcggcactgccgagccagggggcagtatgaagaccacattcaccatcgagatcaaggacggccgtggccaggcctccacaggccgggtgctgctgcccacaggcaaccagagggcagaactgacactggggctgcgggcgcccccgaccctactcagcaccagtagtgggggcaagagcaccatcacccgtgtcaacagccctgggaccctggctcggctgggcagtgtcactcatgtcaccagcttcagccatgccccccccagtagccgaggaggctgcagcatcaagatggaagcagagccagcagagcctctcgctgcagcagtggaagcggccaatggggctgagcagacccgagtgaacaaagcaccagaagggcggagccctctgagcgctgaggagctgatgactattgaggatgaaggagtcttggacaagatgctggatcagagcacggactttgaagagcggaagctcatccgggctgcacttcgtgagctccgacaaaggaagagagaccagcgggacaaggagcgggaacggcggctgcaggaggcacggggccggccaggggaggggcgcggcaacacagccactgagaccaccacgaggcacagccagcgggcagctgatggctctgctgtcagcactgttaccaagactgagcggctcgtccactccaatgatggcacacggacggcccgcaccaccacagtggagtcgagtttcgtgaggcgctcggagaatggcagtggcagcaccatgatgcaaaccaagaccttctcctcttcctcctcatccaagaagatgggcagcatcttcgaccgcgaggaccaggccagcccacgggccggcagcctggcggcgctcgagaaacggcaggccgagaagaagaaagagctgatgaaggcgcagagtctgcccaagacctcagcctcccaggcgcgcaaggccatgattgagaagctggagaaggagggcgcggccggcagccctggcggaccccgcgcagccgtgcagcgatccaccagcttcggggtccccaacgccaacagcatcaagcagatgctgctggactggtgtcgagccaagactcgcggctacgagcacgtcgacatccagaacttctcctccagctggagtgatgggatggccttctgtgccctggtgcacaacttcttccctgaggccttcgactatgggcagcttagccctcagaaccgacgccagaacttcgaggtggccttctcatctgcggagacccatgcggactgcccgcagctcctggatacagaggacatggtgcggcttcgagagcctgactggaagtgcgtgtacacgtacatccaggaattctaccgctgtctggtccagaaggggctggtaaaaaccaaaaagtcctaacccctgctcggggccccacggatgctggtggactgtgtgcccctggtggaggtggacgacatgatgatcatgggcaagaagcctgaccccaagtgtgtcttcacctatgtgcagtcgctctacaaccacctgcgacgccacgaactgcgcctgcgcggcaagaatgtctagcctgcccgcccgcatggccagccagtggcaagctgccgcccccactctccgggcaccgtctcctgcctgtgcgtccgcccaccgctgccctgtctgttgcgacaccctcccccccacatacacacgcagcgttttgataaattattggttttcaacga

SEQ ID NO: 28389 - DNA, 3130 bp, Homo sapiens
  source 1..3130: mol_type = unassigned DNA
cagaatccaggggacggttgctgagcgggcctgggacagcgggtcgcggcacctccggcctgcgcgtgtctaatccgtctgtcgggtcccgaaagagctaagccgagcctgcgccggacgggtgggctggactgagagaattctctgagctggtgacaggtgccacaggcactggggatctcaccagaaaggaaccgacggagctaggggccagcgagatggcggacgaggccttagctgggctggatgagggagcccttcggaagctgctggaggtcacagcagatctggcagagcggcggcgcatccgctcagccatccgggaactgcagcggcaggagctggagcgcgaggaggaggccctggcatccaagcgtttccgtgccgagcggcaggacaacaaggagaactggctgcactctcagcagcgggaagctgagcagcgggctgccctggcacggctggcagggcagctggagtccatgaacgatgtggaggaattgactgcactgttgcgaagcgctggtgagtatgaggagcgcaagctgatccgagctgccatccgccgtgtacgggctcaggagattgaggctgccaccttggctgggaggttgtacagcgggcgtcccaacagtggctcaagagaggacagcaaggggctagcggcacacaggctggaacagtgtgaggtgccagagcgagaggaacaggaacagcaggcagaggtttcaaagccaacccccacccctgaaggcaccagccaggatgtgaccacagtgacactcctgctgcgagccccacctgggagcacatccagctcacctgcctcacccagcagttcacccacccctgcctctcctgagcctccattggagcctgccgaggcccagtgccttacagctgaggttccaggcagcccagagccaccccccagcccacccaagaccaccagccctgagcctcaggagtctccaacgctccccagcactgagggccaggtggtcaacaagcttctgtctggccccaaagagacccctgctgcccagagccccaccagaggcccctctgacaccaagagagcagacgtggctggaccccgaccctgccaacgctccctgtcggtgctcagcccccgccaaccagcccagaaccgagagtccaccccccttgccagcggaccttcctcattccagcgggctggctctgtgcgggatcgtgtccacaagttcacatctgattctcctatggctgctaggctccaggatggcacaccccaggctgccctaagtcccctgacccccgcaaggctcctgggcccctccctcaccagcaccacccctgcctcctcctccagcggctcctcctctcggggccccagtgatacctcctcccggttcagcaaggagcaacgaggagtagcccagcccctggcccagcttcgaagctgcccccaggaggagggccccagggggcggggcttggctgctaggccccttgaaaacagagcaggggggcctgtggcacgttcagaggagcctggtgccccgctgcccgtggccgtcggcactgccgagccagggggcagtatgaagaccacattcaccatcgagatcaaggacggccgtggccaggcctccacaggccgggtgctgctgcccacaggcaaccagagggcagaactgacactggggctgcgggcgcccccgaccctactcagcaccagtagtgggggcaagagcaccatcacccgtgtcaacagccctgggaccctggctcggctgggcagtgtcactcatgtcaccagcttcagccatgccccccccagtagccgaggaggctgcagcatcaagatggaagcagagccagcagagcctctcgctgcagcagtggaagcggccaatggggctgagcagacccgagtgaacaaagcaccagaagggcggagccctctgagcgctgaggagctgatgactattgaggatgaaggagtcttggacaagatgctggatcagagcacggactttgaagagcggaagctcatccgggctgcacttcgtgagctccgacaaaggaagagagaccagcgggacaaggagcgggaacggcggctgcaggaggcacggggccggccaggggaggggcgcggcaacacagccactgagaccaccacgaggcacagccagcgggcagctgatggctctgctgtcagcactgttaccaagactgagcggctcgtccactccaatgatggcacacggacggcccgcaccaccacagtggagtcgagtttcgtgaggcgctcggagaatggcagtggcagcaccatgatgcaaaccaagaccttctcctcttcctcctcatccaagaagatgggcagcatcttcgaccgcgaggaccaggccagcccacgggccggcagcctggcggcgctcgagaaacggcaggccgagaagaagaaagagctgatgaaggcgcagagtctgcccaagacctcagcctcccaggcgcgcaaggccatgattgagaagctggagaaggagggcgcggccggcagccctggcggaccccgcgcagccgtgcagcgatccaccagcttcggggtccccaacgccaacagcatcaagcagatgctgctggactggtgtcgagccaagactcgcggctacgagcacgtcgacatccagaacttctcctccagctggagtgatgggatggccttctgtgccctggtgcacaacttcttccctgaggccttcgactatgggcagcttagccctcagaaccgacgccagaacttcgaggtggccttctcatctgcggagatgctggtggactgtgtgcccctggtggaggtggacgacatgatgatcatgggcaagaagcctgaccccaagtgtgtcttcacctatgtgcagtcgctctacaaccacctgcgacgccacgaactgcgcctgcgcggcaagaatgtctagcctgcccgcccgcatggccagccagtggcaagctgccgcccccactctccgggcaccgtctcctgcctgtgcgtccgcccaccgctgccctgtctgttgcgacaccctcccccccacatacacacgcagcgttttgataaattattggttttcaacga

SEQ ID NO: 28390 - DNA, 1508 bp, Homo sapiens
  source 1..1508: mol_type = unassigned DNA
actcagccagagacagcagcccctgccactgccccaccattaccccccatagagtccccaccagcaccatgccgggggtaccagggcctgggcctgagctggccgcagcccttgaggagcagttgggccgggcactggaggagctgcgggcggtggctgaagcaggccgggtggcagtgacccaggcagccgaggtagctgtagccaccgtggagccggtggcccgggcagctgaagagctgcgggcagagagagccgctcctccaccggcaccacccgcagcactagtctcatggaagcagagccagcagagcctctcgctgcagcagtggaagcggccaatggggctgagcagacccgagtgaacaaagcaccagaagggcggagccctctgagcgctgaggagctgatgactattgaggatgaaggagtcttggacaagatgctggatcagagcacggactttgaagagcggaagctcatccgggctgcacttcgtgagctccgacaaaggaagagagatggcagtggcagcaccatgatgcaaaccaagaccttctcctcttcctcctcatccaagaagatgggcagcatcttcgaccgcgaggaccaggccagcccacgggccggcagcctggcggcgctcgagaaacggcaggccgagaagaagaaagagctgatgaaggcgcagagtctgcccaagacctcagcctcccaggcgcgcaaggccatgattgagaagctggagaaggagggcgcggccggcagccctggcggaccccgcgcagccgtgcagcgatccaccagcttcggggtccccaacgccaacagcatcaagcagatgctgctggactggtgtcgagccaagactcgcggctacgagcacgtcgacatccagaacttctcctccagctggagtgatgggatggccttctgtgccctggtgcacaacttcttccctgaggccttcgactatgggcagcttagccctcagaaccgacgccagaacttcgaggtggccttctcatctgcggagacccatgcggactgcccgcagctcctggatacagaggacatggtgcggcttcgagagcctgactggaagtgcgtgtacacgtacatccaggaattctaccgctgtctggtccagaaggggctggtaaaaaccaaaaagtcctaacccctgctcggggccccacggatgctggtggactgtgtgcccctggtggaggtggacgacatgatgatcatgggcaagaagcctgaccccaagtgtgtcttcacctatgtgcagtcgctctacaaccacctgcgacgccacgaactgcgcctgcgcggcaagaatgtctagcctgcccgcccgcatggccagccagtggcaagctgccgcccccactctccgggcaccgtctcctgcctgtgcgtccgcccaccgctgccctgtctgttgcgacaccctcccccccacatacacacgcagcgttttgataaattattggttttcaacg

SEQ ID NO: 28391 - DNA, 4951 bp, Homo sapiens
  source 1..4951: mol_type = unassigned DNA
agcgtctggccgatttggggacgcgggcagtcgcttccggccccggctcccgcacattcttgaggattgggccggggatgggaggaatggggacgcctggggacttgcacgccgcgtgcccctccaccacccgccgggacgccctctgcctcggtcccgagttcgagttcgacctccgccactcagctgggtgtcctggggaccttggtttcttccctttagatccggacactgaagcaggcggtagcgggtgtcttcctacctggctaccccttcggcgcctagcgcgaggcagggtgggcgaggcgagggcggcgccctgcgagggagggcggtcgcagaacctgcgggccttcagcgccccctggcgaggcttccctccaccgccgtctctctccctcctcctgactggctagaaccaagtatgggggtgatgcttattgcaactgcagctatgtacaggagaggccaagtcactgttcccaaccccacccactggcaaatgaaaaaaccaagacacagagagtttaagggatatgctcttgatcacccagccaggattggactagggctggaaccaactaagggctctggcctgagtttcagggggtcttctcataattcctcaggaatgtggagcctggagggctcttcccccaagactctccctgctctcttcagactaggacaagctggctcatggctgagttgggccagcccacactccctgctgaaaactatctccatcccatccccacccttgccacctggccttcccgctaagcagaaaggaatgacgggggggcgctaaaaagggagatgatagagggttctttggccctacccctgaatgatttggggggtggggacagaggaaatcaccccgcctttactggctcccgtctggttatcagacccacactggaggcttatctctgccactatcttccaggggaaccctgggccagtcctctctcccttgagccacggaggatctgtatgtagcaggtggctctacatggtggaggtgtgggggaggcaacaggattggctgactcactccagagaaggtgttctttcctgaacctggttagaccagtcacccccaatttcccgggaactgaggggttgagaaccggtagaagcagctgtcacccagggatgccctctataaggccctggggtggcccctagtgccagccaccttatatgtctgggggattggtcctcccactctgcaccctggcttcttccatggtggctaggtccaggccagtgcagtggggacaatagccctcagccaggcaggactcctgagcacctgtcctcagtttccccatctgtggatgaagcagtcaacccccagctgggctgtggtgtttggtgactagaccagggagcctcccttgctcagagggtggacttcatctgtcacctttccctctagggaccctgttagtgacccacagggtggcctccctcctcctcctacaatagctccctgacttttggggatctgggctctgagaggcaggaatcgagttgtagaaaggagtgcctggcttggcacctggcacaagtgggcagtttctggctgtccactcacagttgtgtgctctgtgaaccacaatgcaaagtggactacccaagatccctgaaacagtgggctgggtctacccccgggaccctgcgtgggcaggcaggcacgtgaagagcttgggacacagggagtggacacaggccacacattgtgccctaggcagagccgtgggcagctggtgccagccctccgcccctggcagccaaaatgacctgcctctcgcacccactgcagctggaggtcacagcagatctggcagagcggcggcgcatccgctcagccatccgggaactgcagcggcaggagctggagcgcgaggaggaggccctggcatccaagcgtttccgtgccgagcggcaggacaacaaggagaactggctgcactctcagcagcgggaagctgagcagcgggctgccctggcacggctggcagggcagctggagtccatgaacgatgtggaggaattgactgcactgttgcgaagcgctggtgagtatgaggagcgcaagctgatccgagctgccatccgccgtgtacgggctcaggagattgaggctgccaccttggctgggaggttgtacagcgggcgtcccaacagtggctcaagagaggacagcaaggggctagcggcacacaggctggaacagtgtgaggtgccagagcgagaggaacaggaacagcaggcagaggtttcaaagccaacccccacccctgaaggcaccagccaggatgtgaccacagtgacactcctgctgcgagccccacctgggagcacatccagctcacctgcctcacccagcagttcacccacccctgcctctcctgagcctccattggagcctgccgaggcccagtgccttacagctgaggttccaggcagcccagagccaccccccagcccacccaagaccaccagccctgagcctcaggagtctccaacgctccccagcactgagggccaggtggtcaacaagcttctgtctggccccaaagagacccctgctgcccagagccccaccagaggcccctctgacaccaagagagcagacgtggctggaccccgaccctgccaacgctccctgtcggtgctcagcccccgccaaccagcccagaaccgagagtccaccccccttgccagcggaccttcctcattccagcgggctggctctgtgcgggatcgtgtccacaagttcacatctgattctcctatggctgctaggctccaggatggcacaccccaggctgccctaagtcccctgacccccgcaaggctcctgggcccctccctcaccagcaccacccctgcctcctcctccagcggctcctcctctcggggccccagtgatacctcctcccggttcagcaaggagcaacgaggagtagcccagcccctggcccagcttcgaagctgcccccaggaggagggccccagggggcggggcttggctgctaggccccttgaaaacagagcaggggggcctgtggcacgttcagaggagcctggtgccccgctgcccgtggccgtcggcactgccgagccagggggcagtatgaagaccacattcaccatcgagatcaaggacggccgtggccaggcctccacaggccgggtgctgctgcccacaggcaaccagagggcagaactgacactggggctgcgggcgcccccgaccctactcagcaccagtagtgggggcaagagcaccatcacccgtgtcaacagccctgggaccctggctcggctgggcagtgtcactcatgtcaccagcttcagccatgccccccccagtagccgaggaggctgcagcatcaaggctgccgaggatgccgggacccccgtggcccacccacctgccttcagcacccgccgccgctcctccaccggcaccacccgcagcactagtctcatggaagcagagccagcagagcctctcgctgcagcagtggaagcggccaatggggctgagcagacccgagtgaacaaagcaccagaagggcggagccctctgagcgctgaggagctgatgactattgaggatgaaggagtcttggacaagatgctggatcagagcacggactttgaagagcggaagctcatccgggctgcacttcgtgagctccgacaaaggaagagagaccagcgggacaaggagcgggaacggcggctgcaggaggcacggggccggccaggggaggggcgcggcaacacagccactgagaccaccacgaggcacagccagcgggcagctgatggctctgctgtcagcactgttaccaagactgagcggctcgtccactccaatgatggcacacggacggcccgcaccaccacagtggagtcgagtttcgtgaggcgctcggagaatggcagtggcagcaccatgatgcaaaccaagaccttctcctcttcctcctcatccaagaagatgggcagcatcttcgaccgcgaggaccaggccagcccacgggccggcagcctggcggcgctcgagaaacggcaggccgagaagaagaaagagctgatgaaggcgcagagtctgcccaagacctcagcctcccaggcgcgcaaggccatgattgagaagctggagaaggagggcgcggccggcagccctggcggaccccgcgcagccgtgcagcgatccaccagcttcggggtccccaacgccaacagcatcaagcagatgctgctggactggtgtcgagccaagactcgcggctacgagcacgtcgacatccagaacttctcctccagctggagtgatgggatggccttctgtgccctggtgcacaacttcttccctgaggccttcgactatgggcagcttagccctcagaaccgacgccagaacttcgaggtggccttctcatctgcggagacccatgcggactgcccgcagctcctggatacagaggacatggtgcggcttcgagagcctgactggaagtgcgtgtacacgtacatccaggaattctaccgctgtctggtccagaaggggctggtaaaaaccaaaaagtcctaacccctgctcggggccccacggatgctggtggactgtgtgcccctggtggaggtggacgacatgatgatcatgggcaagaagcctgaccccaagtgtgtcttcacctatgtgcagtcgctctacaaccacctgcgacgccacgaactgcgcctgcgcggcaagaatgtctagcctgcccgcccgcatggccagccagtggcaagctgccgcccccactctccgggcaccgtctcctgcctgtgcgtccgcccaccgctgccctgtctgttgcgacaccctcccccccacatacacacgcagcgttttgataaattattggttttcaac

SEQ ID NO: 28392 - DNA, 566 bp, Homo sapiens
  source 1..566: mol_type = unassigned DNA
gtaacaacatggcagctcccatgagaacggcatggttggagtcagaagaggaagaagcagaactgggcaggactccagaccccatcctcccaactccacccactttagtctccatggagacccaagggcggctttagggcctctggcactgaagatggaatagctttgccttgtggatctgacctcctgggtaccctggctgattccttgtttggtcttggacatgtcagctctctctgggcctcaatttcccccttttgctgaatgacagcctggactccatattccctatttaggactccagcgctcctaaaggcagactctcagggcttggaaggtagaagcatgctacaagaaggcaatgtctgttcaaagaattctctgagctggtgacaggtgccacaggcactggggatctcaccagaaaggaaccgacggagctaggggccagcgagatggcggacgaggccttagctgggctggatgagggagcccttcggaagctgctggaggtcacagcagatctggcagagcggcggcgcatccgctcagccatccgggaactg

SEQ ID NO: 28393 - DNA, 3198 bp, Homo sapiens
  source 1..3198: mol_type = unassigned DNA
cagaatccaggggacggttgctgagcgggcctgggacagcgggtcgcggcacctccggcctgcgcgtgtctaatccgtctgtcgggtcccgaaagagctaagccgagcctgcgccggacgggtgggctggactgagagaattctctgagctggtgacaggtgccacaggcactggggatctcaccagaaaggaaccgacggagctaggggccagcgagatggcggacgaggccttagctgggctggatgagggagcccttcggaagctgctggaggtcacagcagatctggcagagcggcggcgcatccgctcagccatccgggaactgcagcggcaggagctggagcgcgaggaggaggccctggcatccaagcgtttccgtgccgagcggcaggacaacaaggagaactggctgcactctcagcagcgggaagctgagcagcgggctgccctggcacggctggcagggcagctggagtccatgaacgatgtggaggaattgactgcactgttgcgaagcgctggtgagtatgaggagcgcaagctgatccgagctgccatccgccgtgtacgggctcaggagattgaggctgccaccttggctgggaggttgtacagcgggcgtcccaacagtggctcaagagaggacagcaaggggctagcggcacacaggctggaacagtgtgaggtgccagagcgagaggaacaggaacagcaggcagaggtttcaaagccaacccccacccctgaaggcaccagccaggatgtgaccacagtgacactcctgctgcgagccccacctgggagcacatccagctcacctgcctcacccagcagttcacccacccctgcctctcctgagcctccattggagcctgccgaggcccagtgccttacagctgaggttccaggcagcccagagccaccccccagcccacccaagaccaccagccctgagcctcaggagtctccaacgctccccagcactgagggccaggtggtcaacaagcttctgtctggccccaaagagacccctgctgcccagagccccaccagaggcccctctgacaccaagagagcagacgtggctggaccccgaccctgccaacgctccctgtcggtgctcagcccccgccaaccagcccagaaccgagagtccaccccccttgccagcggaccttcctcattccagcgggctggctctgtgcgggatcgtgtccacaagttcacatctgattctcctatggctgctaggctccaggatggcacaccccaggctgccctaagtcccctgacccccgcaaggctcctgggcccctccctcaccagcaccacccctgcctcctcctccagcggctcctcctctcggggccccagtgatacctcctcccggttcagcaaggagcaacgaggagtagcccagcccctggcccagcttcgaagctgcccccaggaggagggccccagggggcggggcttggctgctaggccccttgaaaacagagcaggggggcctgtggcacgttcagaggagcctggtgccccgctgcccgtggccgtcggcactgccgagccagggggcagtatgaagaccacattcaccatcgagatcaaggacggccgtggccaggcctccacaggccgggtgctgctgcccacaggcaaccagagggcagaactgacactggggctgcgggcgcccccgaccctactcagcaccagtagtgggggcaagagcaccatcacccgtgtcaacagccctgggaccctggctcggctgggcagtgtcactcatgtcaccagcttcagccatgccccccccagtagccgaggaggctgcagcatcaagatggaagcagagccagcagagcctctcgctgcagcagtggaagcggccaatggggctgagcagacccgagtgaacaaagcaccagaagggcggagccctctgagcgctgaggagctgatgactattgaggatgaaggagtcttggacaagatgctggatcagagcacggactttgaagagcggaagctcatccgggctgcacttcgtgagctccgacaaaggaagagagaccagcgggacaaggagcgggaacggcggctgcaggaggcacggggccggccaggggaggggcgcggcaacacagccactgagaccaccacgaggcacagccagcgggcagctgatggctctgctgtcagcactgttaccaagactgagcggctcgtccactccaatgatggcacacggacggcccgcaccaccacagtggagtcgagtttcgtgaggcgctcggagaatggcagtggcagcaccatgatgcaaaccaagaccttctcctcttcctcctcatccaagaagatgggcagcatcttcgaccgcgaggaccaggccagcccacgggccggcagcctggcggcgctcgagaaacggcaggccgagaagaagaaagagctgatgaaggcgcagagtctgcccaagacctcagcctcccaggcgcgcaaggccatgattgagaagctggagaaggagggcgcggccggcagccctggcggaccccgcgcagccgtgcagcgatccaccagcttcggggtccccaacgccaacagcatcaagcagatgctgctggactggtgtcgagccaagactcgcggctacgagcacgtcgacatccagaacttctcctccagctggagtgatgggatggccttctgtgccctggtgcacaacttcttccctgaggccttcgactatgggcagcttagccctcagaaccgacgccagaacttcgaggtggccttctcatctgcggagacccatgcggactgcccgcagctcctggatacagaggacatggtgcggcttcgagagcctgactggaagatgctggtggactgtgtgcccctggtggaggtggacgacatgatgatcatgggcaagaagcctgaccccaagtgtgtcttcacctatgtgcagtcgctctacaaccacctgcgacgccacgaactgcgcctgcgcggcaagaatgtctagcctgcccgcccgcatggccagccagtggcaagctgccgcccccactctccgggcaccgtctcctgcctgtgcgtccgcccaccgctgccctgtctgttgcgacaccctcccccccacatacacacgcagcgttttgataaattattggttttcaacg

SEQ ID NO: 28394 - DNA, 1897 bp, Homo sapiens
  source 1..1897: mol_type = unassigned DNA
atggagcagaaggaagggaagctctctgaggatgggaccaccgtctccccagctgcggacaaccctgagatgtcaggaggtggagcccctgcagaggagaccaaaggcacagctggaaaggccatcaatgaggggcctcccactgagtcaggaaagcaggaaaaggcaccagccgaggacggcatgtcagcagaactccagggggaagcaaatggattagatgaggtcaaagtggaatctcagagggaggctggtgggaaagaggatgctgaggctgaacttaaaaaggaggatggtgagaaggaagagaccactgtgggttctcaggagatgactggcaggaaagaagagaccaaatctgaacccaaagaggctgaggaaaaggagagcacgctggcctctgagaagcagaaggctgaggagaaagaggccaaacctgaatctgggcagaaagccgatgccaatgacagagacaagcctgaacctaaggcaacagttgaggaggaggacgccaagacagcctctcaggaggagacagttgtggaggatgaggctaaggctgaacccaaggagcccgatgggaaagaggaggccaaacatggtgcaaaagaggaggctgatgagccaggcagtcccagcgaagagcaggagcaggacgtggaaaaagagccagagggaggggcaggggtgattcccagctccccagaggagtggcctgagagccccactggggaggggcacaacctcagcacagatgggctgggtccagactgtgtagcttccggacagaccagtccttcagccagtgagtcttcacccagcgacgtgccccagagtccccctgagtccccttcctcaggggagaagaaggagaaggcaccagagcgcagggtatcagcccctgctcggccccgggggccccgggcacagaaccgcaaagccatcgtggacaagtttggcggggcagcttccggccccacggccttgttccgcaacactaaggcagccggggcagccattggtggtgtcaagaacatgctcttggagtggtgccgagccatgacaaaaaaatacgagcatgtggacatccagaacttctcctccagctggagcagtggtatggccttctgtgccctcatccacaagttcttccctgacgcctttgactacgcagagctggatcccgcaaagcgccggcacaacttcaccctggccttctccacagcagagaaactggctgactgtgctcagctgctggacgtggatgacatggtgcggttggctgtgcccgactccaagtgcgtctacacatacatccaggaactgtaccgcagccttgtgcagaaaggactggtgaagaccaagaagaagtgaggaggtgactggctctgtgggcagagatgggcagggtgcccagctcagcagccacggcccgggggttcccttctgctccatggaggcaccagagccaggggcttaggcaagggtgtgtggcgttggttttaactgcattaaaagtacttttgtaaaatcctgtctggcccctcagtgctctctccatacttggcccaggaacctctgcactctgggataataaactctggccataggggattcctcacctgctgaggtctcaataactgcgcaaggtgtttgggaaaggacaatggcctggttcccaccactaaccagctgtgtgacacatacagttaacctctctgggccccagtttacagtctgaaaggggataatgagagttccaaccttatgaaggtgttgcaagagttaaacgagataatgaaatgggcaaaaagctttgcccagtcctgccactcaagtgttcagtaagtggtcgccaaaaataaaaaacttacattttgactctggtggcacttct

SEQ ID NO: 28395 - DNA, 2062 bp, Homo sapiens
  source 1..2062: mol_type = unassigned DNA
atgctcccgggggcagttggagagtcagattgctcagcagaggccagggagaagatggagcagaaggaagggaagctctctgaggatgggaccaccgtctccccagctgcggacaaccctgagatgtcaggaggtggagcccctgcagaggagaccaaaggcacagctggaaaggccatcaatgaggggcctcccactgagtcaggaaagcaggaaaaggcaccagccgaggacggcatgtcagcagaactccagggggaagcaaatggattagatgaggtcaaagtggaatctcagagggaggctggtgggaaagaggatgctgaggctgaacttaaaaaggaggatggtgagaaggaagagaccactgtgggttctcaggagatgactggcaggaaagaagagaccaaatctgaacccaaagaggctgaggaaaaggagagcacgctggcctctgagaagcagaaggctgaggagaaagaggccaaacctgaatctgggcagaaagccgatgccaatgacagagacaagcctgaacctaaggcaacagttgaggaggaggacgccaagacagcctctcaggaggagacaggccagaggaaagagtgcagcactgaacccaaggagaaggctactgatgaagaggccaaggctgaatcgcagaaggctgttgtggaggatgaggctaaggctgaacccaaggagcccgatgggaaagaggaggccaaacatggtgcaaaagaggaggctgatgcaaaagaggaggcggaggatgcagaggaggcagagccaggcagtcccagcgaagagcaggagcaggacgtggaaaaagagccagagggaggggcaggggtgattcccagctccccagaggagtggcctgagagccccactggggaggggcacaacctcagcacagatgggctgggtccagactgtgtagcttccggacagaccagtccttcagccagtgagtcttcacccagcgacgtgccccagagtccccctgagtccccttcctcaggggagaagaaggagaaggcaccagagcgcagggtatcagcccctgctcggccccgggggccccgggcacagaaccgcaaagccatcgtggacaagtttggcggggcagcttccggccccacggccttgttccgcaacactaaggcagccggggcagccattggtggtgtcaagaacatgctcttggagtggtgccgagccatgacaaaaaaatacgagcatgtggacatccagaacttctcctccagctggagcagtggtatggccttctgtgccctcatccacaagttcttccctgacgcctttgactacgcagagctggatcccgcaaagcgccggcacaacttcaccctggccttctccacagcagagaaactggctgactgtgctcagctgctggacgtggatgacatggtgcggttggctgtgcccgactccaagtgcgtctacacatacatccaggaactgtaccgcagccttgtgcagaaaggactggtgaagaccaagaagaagtgaggaggtgactggctctgtgggcagagatgggcagggtgcccagctcagcagccacggcccgggggttcccttctgctccatggaggcaccagagccaggggcttaggcaagggtgtgtggcgttggttttaactgcattaaaagtacttttgtaaaatcctgtctggcccctcagtgctctctccatacttggcccaggaacctctgcactctgggataataaactctggccataggggattcctcacctgctgaggtctcaataactgcgcaaggtgtttgggaaaggacaatggcctggttcccaccactaaccagctgtgtgacacatacagttaacctctctgggccccagtttacagtctgaaaggggataatgagagttccaaccttatgaaggtgttgcaagagttaaacgagataatgaaatgggcaaaaagctttgcccagtcctgccactcaagtgttcagtaagtggtcgccaaaaataaaaaacttacattttgactctggtggcacttct

SEQ ID NO: 28396 - DNA, 1649 bp, Homo sapiens
  source 1..1649: mol_type = unassigned DNA
agatggagcagaaggaagggaagctctctgaggatgggaccaccgtctccccagctgcggacaaccctgagatgtcaggaggtggagcccctgcagaggagaccaaaggcacagctggaaaggccatcaatgaggggcctcccactgagtcaggaaagcaggaaaaggcaccagccgaggacggcatgtcagcagaactccagggggaagcaaatggattagatgaggtcaaagtggaatctcagagggaggctggtgggaaagaggatgctgaggctgaacttaaaaaggaggatggtgagaaggaagagaccactgtgggttctcaggagatgactggcaggaaagaagagaccaaatctgaacccaaagaggctgaggaaaaggagagcacgctggcctctgagaagcagaaggctgaggagaaagaggccaaacctgaatctgggcagaaagccgatgccaatgacagagacaagcctgaacctaaggcaacagttgaggaggaggacgccaagacagcctctcaggaggagacaggccagaggaaagagtgcagcactgaacccaaggagaaggctactgatgaagaggccaaggctgaatcgcagaaggctgttgtggaggatgaggctaaggctgaacccaaggagcccgatgggaaagaggaggccaaacatggtgcaaaagaggaggctgatgcaaaagaggaggcggaggatgcagaggaggcagagccaggcagtcccagcgaagagcaggagcaggacgtggaaaaagagccagagggaggggcaggggtgattcccagctccccagaggagtggcctgagagccccactggggaggggcacaacctcagcacagatgggctgggtccagactgtgtagcttccggacagaccagtccttcagccagtgagtcttcacccagcgacgtgccccagagtccccctgagtccccttcctcaggggagaagaaggagaaggcaccagagcgcagggtatcagcccctgctcggccccgggggccccgggcacagaaccgcaaagccatcgtggacaagtttggcggggcagcttccggccccacggccttgttccgcaacactaaggcagccggggcagccattggtggtgtcaagaacatgctcttggagtggtgccgagccatgacaaaaaaatacgagcatgtggacatccagaacttctcctccagctggagcagtggtatggccttctgtgccctcatccacaagttcttccctgacgcctttgactacgcagagctggatcccgcaaagcgccggcacaacttcaccctggccttctccacagcagagaaactggctgactgtgctcagctgctggacgtggatgacatggtgcggttggctgtgcccgactccaagtgcgtctacacatacatccaggaactgtaccgcagccttgtgcagaaaggactggtgaagaccaagaagaagtgaggaggtgactggctctgtgggcagagatgggcagggtgcccagctcagcagccacggcccgggggttcccttctgctccatggaggcaccagagccaggggcttaggcaagggtgtgtggcgttggttttaactgcattaaaagtacttttgtaaaatcctg

SEQ ID NO: 28397 - DNA, 1807 bp, Homo sapiens
  source 1..1807: mol_type = unassigned DNA
agccacgtgacccccgtgccggccaacgggtgcgccgggatttgggggataaagcgcggccccgcgcacagttgcggcgggagagcggcggggccgagagcgtgactcgcccgctccgcgctgcttcccccgcgccgcctccccgcgccgctcgcgcagccatgtccgaggagaagcccaaggagggtgtgaagacagagaatgaccacatcaacctgaaggtggccgggcaggacggctccgtggtgcagttcaagatcaagaggcacacgccgctgagcaagctgatgaaggcctactgcgagaggcagggcttgtcaatgaggcagatcagattcaggttcgacgggcagccaatcaatgaaactgacactccagcacagctggagatggaggacgaggacaccatcgacgtgttccagcagcagacgggaggtgtgccggagagcagcctggcagggcacagtttctagagggcccgtccccagcccgggccgtccatcctcgcattgctgttgaatggtgagcacgtgaccatgccgaccacaaaggtgtctgcggaaactcgaggacattcaccacgatgattttcctctctttgatgtacttcaagtgcaactcaaaactatatctgcagggatgaatctgtaacttaaattgggccaatcagaattgttatctttgttcaggtaaaatgagttgcaagatattgtgggtacttttgtgtgctcatttgtgttttccccccctcctacaacatttttttaaccccaaaattatagcctgaatgttcgcttttagtctggccagggatctgactcctgagttggttgcctctcccctgctcactccagtcacatagagaattggtgtttcccgcagtggggatgcagctgttggacaggtattgggggcaaggttggtagggaggacagactgtcacttgctgttacaggcacaggtgattaaaatgctaaatattgcaaatttaagctttgtcagtatatggaaaagttgaagggaaaatactggaatgcttcttcaaaggttaaaaaataaccgagtcttttggtaatttgaccccacgtgctctctggccctcaagcatgtaacctcggggtctgaggcccaggacccacccccctgccacccctcccaccccactccctgctcagtacctggcgttggtacacaggcaaggattggcacaaccaaaattggcctttttctccctcttaatattgaagaaattcccacatttctcatttggtaatggtgttgtggcctcagatttcttctagtatttgcttctgatgaatgattatggtctatacataaaaaagtaagactaagtattgctgaatttgcagttatgttgtcgtgtataagagctacttccaagtgtggttacaaatgaacccatggaatgatgacttcatgttcttctcgtgggtttgtgccgtgctgctttccaaataggtattgaatttatgcattagtctggtgatttcagttctgtgaaatattttgggatctataccaattaaacattttcatagttctgcctattgtccttccctgaggctccattgctgcttggtggccattctctgcctttttacagtcacctgaacaatgacccatcatctcttgcttgcttgaaatcttgctgaaatgttctcatttcctgtttgctgtatgggctcgggtgggatgtttgttggctctgttgtgtttattcaccaatttgtacattatttgttgtcctttactactgtaaacagtaaatatagtttggtattctgtc

SEQ ID NO: 28398 - DNA, 831 bp, Homo sapiens
  source 1..831: mol_type = unassigned DNA
ataaagcgcggccccgcgcacagttgcggcgggagagcggcggggccgagagcgtgactcgcccgctccgcgctgcttcccccgcgccgcctccccgcgccgctcgcgcagccatgtccgaggagaagcccaaggagggtgtgaagacagagaatgaccacatcaacctgaaggtggccgggcaggacggctccgtggtgcagttcaagatcaagaggcacacgccgctgagcaagctgatgaaggcctactgcgagaggcaggtgcggcaccttgctcccccgcagagcctccccgtgtgcgcactggtcctgtgcgttccaggcatccccagagcacgagcgtctcggggctggacccagatgcagctgcccgagggcttgtcaatgaggcagatcagattcaggttcgacgggcagccaatcaatgaaactgacactccagcacagctggagatggaggacgaggacaccatcgacgtgttccagcagcagacgggaggtgtgccggagagcagcctggcagggcacagtttctagagggcccgtccccagcccgggccgtccatcctcgcattgctgttgaatggtgagcacgtgaccatgccgaccacaaaggtgtctgcggaaactcgaggacattcaccacgatgattttcctctctttgatgtacttcaagtgcaactcaaaactatatctgcagggatgaatctgtaacttaaattgggccaatcagaattgttatctttgttcaggtaaaatgagttgcaagatattgtgggtacttttgtgtgctcatttgtgttttccccccctcctacaacatttttt

SEQ ID NO: 28399 - DNA, 683 bp, Homo sapiens
  source 1..683: mol_type = unassigned DNA
gaagcagcagctgaggagactccggtgttcaccatggccaacgaaaagcccacagaagaagtcaagactgagaacaacaatcatattaatttgaaggtggcgggacaggatggttctgtggtgcagtttaagattaagaggcagacaccacttagtaaactaatgaaagcctattgtgaaccacggggattgtcagtgaagcagatcagattccgatttggtgggcaaccaatcagtggaacagacaaacctgcacagttggaaatggaagatgaagatacaattgatgtgtttcaacagcctacgggaggtgtctactgaaaagggaacctgcttctttactccagaacgctgttctttaaagaccaagattactgcattctcaattagaaaactgcaatttggttccaccacattctgactactacagtatagttttctctattcttttgtttcccccttccacattcttttattatacatgaagtaactggtatgtgtacacaagcatattgcttttttcttcaaaccaaacagccaatggtatgttttgattgacatcaagtggagacaggatgggaaaaaatactgattctgtgaaaataccccctttatccattagtggcatgttcattcaggtcttatctttatattctagtaagttattttgctctcactgtttt

SEQ ID NO: 28400 - DNA, 1030 bp, Homo sapiens
  source 1..1030: mol_type = unassigned DNA
cgggcgccccctcacggggcggggcagtgcggcgcggctccggttcccggcggccctcgcggcaggtttcgggcttcaggacaattcgtgatggcgggggctggttccgccgctgtatcgggggcagggaccccggtggcggggcccacaggccgcgaccttttcgccgaagggctgctggagttcctgcgacccgctgtgcagcagctcgactctcacgtacacgccgtcagagagagccaggtagagctccgggaacaaattgacaacctagccacagaactgtgccgcataaatgaggatcagaaggtggccctggatcttgacccctatgttaagaagctacttaatgcccggcgacgcgttgtcttggttaacaacattctacagaatgctcaggaacgactgagacggctaaaccacagtgttgccaaggaaacagcccgcaggagagcaatgctggattcgggaatttacccccctggctccccaggcaaataacagatgagcctatggactcagtagcacaagtactgttccccagctgccttgtttcaacagacatgcaaagatcctaggagacagtccccatagaccttcagacattaaaaagggagccgtacagtttgtttgaagcacttcgtcttacccatttatgtaggggccccaggaaacctacacacagccagaatgaggttcccaaaggacttacattaattatggctcttgcttcctttcacaaatgagctgaggcctctacttttttttttaagctgcatacgtgaggcttaccttcttcaggactagttaaccagaggggcttcctttgtatgttacatgcctggttacatgggcctggacagcatgtcctctacctgtgacttctcattttcctgtttacactggggatttggagggggcaggcaaagtcaaagtgaatgacctctgtccacccacttttttattgcactggcttgaatacagtagcagtgttgatagaatcattttattcaataaatacttaaaatga

SEQ ID NO: 28401 - DNA, 5183 bp, Homo sapiens
  source 1..5183: mol_type = unassigned DNA
agctacccggcaccccctccccgcggccggcagcccgctcggtattatgattagcgctgggtgcggggtttcggcggccgggagggagttgtcggcgccgcggccgctgcggacggacgctcgcctgccggctgaggaaaaagaagcaactaacaaaacactgtgataataaggattattcagtatgcagtttgcaggatatccatgacgacattgaaaatgaattttttgtattcaccagatattcttatatgagaagatctattttaaacagtctaaatattttttcttctgttggaccagcatggcaggatttaagcgagggtatgatggaaagattgctggattatatgatctggataaaaccttgggtcgaggccattttgccgtggttaaacttgccaggcatgtctttacgggtgaaaaggtggcagtaaaagttattgacaagacaaaactggacactctagctactggtcatcttttccaggaagtgagatgcatgaaactagtgcagcatcctaacatcgtccgcctttatgaagttattgacacccagaccaaactatatcttattctagaacttggggatggaggagatatgtttgattatataatgaaacatgaggagggtcttaatgaagacttggccaagaagtattttgctcagatagttcatgctatatcttattgccataaactccatgtggttcacagagacttaaaaccagagaatgtagtcttctttgaaaaacaaggtcttgtaaagttgacagactttgggttcagcaacaaatttcaaccagggaagaagctcactacaagctgtggatctcttgcatattccgctccagaaattctgcttggtgatgagtatgatgcacctgcagtagatatttggagtctgggagtgatccttttcatgttggtgtgtgggcagccgccctttcaagaagccaatgacagtgaaacactgacaatgatcatggattgcaaatatacagtaccatcccatgtgtctaaagagtgtaaagacctaatcacacggatgctacagagagatcccaagagaagggcttctttagaagagattgaaaatcatccttggcttcagggagtggacccttcaccagctacaaagtataacattccccttgtgtcatacaaaaatctctcggaagaggagcacaacagcatcattcagcgcatggtgcttggggacatagcggatcgagacgccattgtagaagccctggaaaccaacaggtataaccatatcacagccacatacttcctgctggctgaaaggatcctgagagaaaagcaagagaaagaaatacagaccagatctgcaagcccgagcaatatcaaggcccagtttaggcagtcatggccaaccaaaattgatgtaccccaggaccttgaggatgacctcacggccactcctttgtcccacgcgactgtccctcagtctcctgctcgggctgctgacagtgtcctcaatggccacaggagcaaaggcctgtgtgactcagctaagaaagatgacctccctgagttggctggaccagcactctctacggtgccacccgcaagcttaaaacccacagccagtgggcggaagtgtctgttcagggtggaagaagatgaagaggaagatgaggaggacaagaaacccatgtccctctcaacacaagtggttttgcgccggaagccatctgtaaccaaccgcctgacatccaggaagagtgcgcccgtcctcaaccagatctttgaggaaggggaatctgacgatgagtttgacatggatgagaatctgcctcccaagttgagcaggttaaagatgaatatagcttctccaggtacagttcacaaacgctaccaccggaggaaaagtcagggccggggctccagctgcagtagttcggagaccagtgatgatgattctgaaagccggcggcggctcgataaagatagcgggttcacctactcctggcaccgacgggatagcagcgaggggccccctggcagtgagggggatggcgggggccagagcaagccaagcaatgccagtggaggggtggacaaggccagccccagtgagaacaatgctggtgggggcagtccctccagcggctcgggtggcaaccccaccaatacatcgggtaccacacgccgctgtgccggccccagcaactccatgcagctggcctctcgcagtgctggggagctcgttgagagcctcaaactcatgagcctctgcctcggctcccagcttcatgggagcaccaagtacattattgatccacagaatggcttgtcattttccagtgtgaaagtccaagagaaatctacgtggaaaatgtgcattagctccacagggaatgcagggcaggtccctgcagtgggcggcataaagtttttctctgaccacatggcagataccaccactgaattggaacggataaagagcaagaacctgaaaaataacgtgctgcagctacctctgtgcgaaaagaccatctctgtgaacatccagcggaaccctaaggaggggctgctgtgcgcatccagcccagccagctgttgccatgtcatctgactgtggccccatctggccgctagcacgcttcctgctcagagcagtgaagaccggctcacttcactgttccatttggttttactattttaaagtgggcgttaggagcaattatttattacctttccatttgttcgcctgatgatgtgacaatgcatggtctttgtgcatgctgctagacacttttctttcccagccgaaaagcctattatgtaatttttacattcataattttaatgtggatgatcaggattaaatcaagatatatatctggaacctcttataaatggagcacttagaaatttgttgttctgcacttaacctagagagagaaaaaatgcttttctttgtgaaaaatctgaattcctgtcctgaccttctgtgatgtggaaaccctaggctctgagacacactctctggtgtctgagacagaaccaaagcaataacgttgtgatgcccacaggcctggagccagctagcgaccttgtgccgcccagctgtccatggcccgtgcagagcagaggacagtgagtgtctgcactgagaaccttaaaccacagttgaacatacccacacctgtttgtcttaagctatagtgtaaaaacaaagtttgggctctgaaaatttaactgaaaaagatttccttgtttttgtaataggtgagataaagtacttagatttataaggcagcttcccctgtagtgataaattacaagcagacaatcttattttgtaatgtgatgaagtgatgatgtcttaactctacttagagagtgtatgtctgtctaacagaacaaaaagatgctctgtgtaaattccttcctgtagggcacactgcaggatttccatgtagatagaagaactatagggcctagtacagaaggtgcacacaaatgttggcaaagtcaaaaccccatgaattaaaacctactggaatttggtttttaggagtttggtaattagattatctcttttgttattttcattcagttatatcctttggctcagctagctttgaaattggctgatgaaaaaatatacataaaagggtaaaattcacacatacagcaaacaaaaatgcacaaagcctgcttcgtaacttttttttctggaattgtttttcactttgcctttttctgccaaaacaataatcaaagaactcttgctttaacctattcctgtacaaagactgtttttgaccagataatcatctgttgtggcattctatcttgtaggacactgtatattgcaaattgctgattatggaaggggccagttgctgttttttcatgcagtgccctgggagtcttaaaagcagtgcttagcaacattggtgatagcatgtggctgggacccagggcccttccccactcttcagccccgagtcatgtgtctgaggtgacggactgagacgcatctggtcctgtaattcagagagtgggcacatcaccaaagaactgcattgctgtggtcactgtttcttcaagtacacactgactctgctactttaggataaatatattttactcagaactctgaatttcacagtatacttactaaactaagtaaaaatgatacttaaaatacttattttactttctagacctaggctagatgttttaagctacagctctagttcattgtgatatttataatttgaaagctatgagaatagatgtgtgggtgaagccatagaacatatttgcttgaaattcttgagcagggatcttataaagggccagaaataagatgtgtggttcacatagatagtgagcgtaacatctgtattaaacataggagagaagtttataaagggcattggcaataaactctttgttgcagctgttttccaagcagtgtaaatactttttcctgtgattatgtatagccttggaatggcaccttttaactaacccatatgtgtttggtttcaatggttttttatattcagatgtatatatggtgctcactttaggatcagcagtgttgaccatttatgctgcatagctgtattatagccttattagttgtgtggttgacccttggggtatacaaatgtcagtctgagtggtgtcttactcctttgtttataagtgaatgattgtgcatgttttgtatgtcatagtatgtcgtcacataaaagggagggagcgaaaaaccattacattaagataatattggaccaaactacttacttgctctaaacagttacttgtaccccttaacctgtcttcaaaagttgcatatagttacagtagtgtataaattaaatattgtggaaaaacagtcttgtatttttctgtatgtgtgtatatatatataattatgtacttctggcaattctatctgtatttaaagatgtgacaatcttgacaccaattttaagaatagctgtgagaccgaattaaagataatccctaccaagtgaaaattgatgtgtgttaagagggtacagaattatcaactgatttggtcagttgcttccaatgctggttgatttccctcattgtgtaaacattgacaggtatgtgacaaatgggaaaaaaaatccaaataataaagtgacatattggtgttcagcaat

SEQ ID NO: 28402 - DNA, 5128 bp, Homo sapiens
  source 1..5128: mol_type = unassigned DNA
gcagctacccggcaccccctccccgcggccggcagcccgctcggtattatgattagcgctgggtgcggggtttcggcggccgggagggagttgtcggcgccgcggccgctgcggacggacgctcgcctgccggctgagatatccatgacgacattgaaaatgaattttttgtattcaccagatattcttatatgagaagatctattttaaacagtctaaatattttttcttctgttggaccagcatggcaggatttaagcgagggtatgatggaaagattgctggattatatgatctggataaaaccttgggtcgaggccattttgccgtggttaaacttgccaggcatgtctttacgggtgaaaaggtggcagtaaaagttattgacaagacaaaactggacactctagctactggtcatcttttccaggaagtgagatgcatgaaactagtgcagcatcctaacatcgtccgcctttatgaagttattgacacccagaccaaactatatcttattctagaacttggggatggaggagatatgtttgattatataatgaaacatgaggagggtcttaatgaagacttggccaagaagtattttgctcagatagttcatgctatatcttattgccataaactccatgtggttcacagagacttaaaaccagagaatgtagtcttctttgaaaaacaaggtcttgtaaagttgacagactttgggttcagcaacaaatttcaaccagggaagaagctcactacaagctgtggatctcttgcatattccgctccagaaattctgcttggtgatgagtatgatgcacctgcagtagatatttggagtctgggagtgatccttttcatgttggtgtgtgggcagccgccctttcaagaagccaatgacagtgaaacactgacaatgatcatggattgcaaatatacagtaccatcccatgtgtctaaagagtgtaaagacctaatcacacggatgctacagagagatcccaagagaagggcttctttagaagagattgaaaatcatccttggcttcagggagtggacccttcaccagctacaaagtataacattccccttgtgtcatacaaaaatctctcggaagaggagcacaacagcatcattcagcgcatggtgcttggggacatagcggatcgagacgccattgtagaagccctggaaaccaacaggtataaccatatcacagccacatacttcctgctggctgaaaggatcctgagagaaaagcaagagaaagaaatacagaccagatctgcaagcccgagcaatatcaaggcccagtttaggcagtcatggccaaccaaaattgatgtaccccaggaccttgaggatgacctcacggccactcctttgtcccacgcgactgtccctcagtctcctgctcgggctgctgacagtgtcctcaatggccacaggagcaaaggcctgtgtgactcagctaagaaagatgacctccctgagttggctggaccagcactctctacggtgccacccgcaagcttaaaacccacagccagtgggcggaagtgtctgttcagggtggaagaagatgaagaggaagatgaggaggacaagaaacccatgtccctctcaacacaagtggttttgcgccggaagccatctgtaaccaaccgcctgacatccaggaagagtgcgcccgtcctcaaccagatctttgaggaaggggaatctgacgatgagtttgacatggatgagaatctgcctcccaagttgagcaggttaaagatgaatatagcttctccaggtacagttcacaaacgctaccaccggaggaaaagtcagggccggggctccagctgcagtagttcggagaccagtgatgatgattctgaaagccggcggcggctcgataaagatagcgggttcacctactcctggcaccgacgggatagcagcgaggggccccctggcagtgagggggatggcgggggccagagcaagccaagcaatgccagtggaggggtggacaaggccagccccagtgagaacaatgctggtgggggcagtccctccagcggctcgggtggcaaccccaccaatacatcgggtaccacacgccgctgtgccggccccagcaactccatgcagctggcctctcgcagtgctggggagctcgttgagagcctcaaactcatgagcctctgcctcggctcccagcttcatgggagcaccaagtacattattgatccacagaatggcttgtcattttccagtgtgaaagtccaagagaaatctacgtggaaaatgtgcattagctccacagggaatgcagggcaggtccctgcagtgggcggcataaagtttttctctgaccacatggcagataccaccactgaattggaacggataaagagcaagaacctgaaaaataacgtgctgcagctacctctgtgcgaaaagaccatctctgtgaacatccagcggaaccctaaggaggggctgctgtgcgcatccagcccagccagctgttgccatgtcatctgactgtggccccatctggccgctagcacgcttcctgctcagagcagtgaagaccggctcacttcactgttccatttggttttactattttaaagtgggcgttaggagcaattatttattacctttccatttgttcgcctgatgatgtgacaatgcatggtctttgtgcatgctgctagacacttttctttcccagccgaaaagcctattatgtaatttttacattcataattttaatgtggatgatcaggattaaatcaagatatatatctggaacctcttataaatggagcacttagaaatttgttgttctgcacttaacctagagagagaaaaaatgcttttctttgtgaaaaatctgaattcctgtcctgaccttctgtgatgtggaaaccctaggctctgagacacactctctggtgtctgagacagaaccaaagcaataacgttgtgatgcccacaggcctggagccagctagcgaccttgtgccgcccagctgtccatggcccgtgcagagcagaggacagtgagtgtctgcactgagaaccttaaaccacagttgaacatacccacacctgtttgtcttaagctatagtgtaaaaacaaagtttgggctctgaaaatttaactgaaaaagatttccttgtttttgtaataggtgagataaagtacttagatttataaggcagcttcccctgtagtgataaattacaagcagacaatcttattttgtaatgtgatgaagtgatgatgtcttaactctacttagagagtgtatgtctgtctaacagaacaaaaagatgctctgtgtaaattccttcctgtagggcacactgcaggatttccatgtagatagaagaactatagggcctagtacagaaggtgcacacaaatgttggcaaagtcaaaaccccatgaattaaaacctactggaatttggtttttaggagtttggtaattagattatctcttttgttattttcattcagttatatcctttggctcagctagctttgaaattggctgatgaaaaaatatacataaaagggtaaaattcacacatacagcaaacaaaaatgcacaaagcctgcttcgtaacttttttttctggaattgtttttcactttgcctttttctgccaaaacaataatcaaagaactcttgctttaacctattcctgtacaaagactgtttttgaccagataatcatctgttgtggcattctatcttgtaggacactgtatattgcaaattgctgattatggaaggggccagttgctgttttttcatgcagtgccctgggagtcttaaaagcagtgcttagcaacattggtgatagcatgtggctgggacccagggcccttccccactcttcagccccgagtcatgtgtctgaggtgacggactgagacgcatctggtcctgtaattcagagagtgggcacatcaccaaagaactgcattgctgtggtcactgtttcttcaagtacacactgactctgctactttaggataaatatattttactcagaactctgaatttcacagtatacttactaaactaagtaaaaatgatacttaaaatacttattttactttctagacctaggctagatgttttaagctacagctctagttcattgtgatatttataatttgaaagctatgagaatagatgtgtgggtgaagccatagaacatatttgcttgaaattcttgagcagggatcttataaagggccagaaataagatgtgtggttcacatagatagtgagcgtaacatctgtattaaacataggagagaagtttataaagggcattggcaataaactctttgttgcagctgttttccaagcagtgtaaatactttttcctgtgattatgtatagccttggaatggcaccttttaactaacccatatgtgtttggtttcaatggttttttatattcagatgtatatatggtgctcactttaggatcagcagtgttgaccatttatgctgcatagctgtattatagccttattagttgtgtggttgacccttggggtatacaaatgtcagtctgagtggtgtcttactcctttgtttataagtgaatgattgtgcatgttttgtatgtcatagtatgtcgtcacataaaagggagggagcgaaaaaccattacattaagataatattggaccaaactacttacttgctctaaacagttacttgtaccccttaacctgtcttcaaaagttgcatatagttacagtagtgtataaattaaatattgtggaaaaacagtcttgtatttttctgtatgtgtgtatatatatataattatgtacttctggcaattctatctgtatttaaagatgtgacaatcttgacaccaattttaagaatagctgtgagaccgaattaaagataatccctaccaagtgaaaattgatgtgtgttaagagggtacagaattatcaactgatttggtcagttgcttccaatgctggttgatttccctcattgtgtaaacattgacaggtatgtgacaaatgggaaaaaaaatccaaataataaagtgacatattggtgttcagcaatataaa

SEQ ID NO: 28403 - DNA, 2961 bp, Homo sapiens
  source 1..2961: mol_type = unassigned DNA
cacagtgacgcgcagcccgcgcaggcgcagctacccggcaccccctccccgcggccggcagcccgctcggtattatgattagcgctgggtgcggggtttcggcggccgggagggagttgtcggcgccgcggccgctgcggacggacgctcgcctgccggctgagagcctcctgagagtctgctttggcatccccagcatttggcctctgctcaggaaaaagaagcaactaacaaaacactgtgataataaggattattcagtatgcagtttgcaggatatccatgacgacattgaaaatgaattttttgtattcaccagatattcttatatgagaagatctattttaaacagtctaaatattttttcttctgttggaccagcatggcaggatttaagcgagggtatgatggaaagattgctggattatatgatctggataaaaccttgggtcgaggccattttgccgtggttaaacttgccaggcatgtctttacgggtgaaaaggtggcagtaaaagttattgacaagacaaaactggacactctagctactggtcatcttttccaggaagtgagatgcatgaaactagtgcagcatcctaacatcgtccgcctttatgaagttattgacacccagaccaaactatatcttattctagaacttggggatggaggagatatgtttgattatataatgaaacatgaggagggtcttaatgaagacttggccaagaagtattttgctcagatagttcatgctatatcttattgccataaactccatgtggttcacagagacttaaaaccagagaatgtagtcttctttgaaaaacaaggtcttgtaaagttgacagactttgggttcagcaacaaatttcaaccagggaagaagctcactacaagctgtggatctcttgcatattccgctccagaaattctgcttggtgatgagtatgatgcacctgcagtagatatttggagtctgggagtgatccttttcatgttggtgtgtgggcagccgccctttcaagaagccaatgacagtgaaacactgacaatgatcatggattgcaaatatacagtaccatcccatgtgtctaaagagtgtaaagacctaatcacacggatgctacagagagatcccaagagaagggcttctttagaagagattgaaaatcatccttggcttcagggagtggacccttcaccagctacaaagtataacattccccttgtgtcatacaaaaatctctcggaagaggagcacaacagcatcattcagcgcatggtgcttggggacatagcggatcgagacgccattgtagaagccctggaaaccaacaggtataaccatatcacagccacatacttcctgctggctgaaaggatcctgagagaaaagcaagagaaagaaatacagaccagatctgcaagcccgagcaatatcaaggcccagtttaggcagtcatggccaaccaaaattgatgtaccccaggaccttgaggatgacctcacggccactcctttgtcccacgcgactgtccctcagtctcctgctcgggctgctgacagtgtcctcaatggccacaggagcaaaggcctgtgtgactcagctaagaaagatgacctccctgagttggctggaccagcactctctacggtgccacccgcaagcttaaaacccacagccagtgggcggaagtgtctgttcagggtggaagaagatgaagaggaagatgaggaggacaagaaacccatgtccctctcaacacaagtggttttgcgccggaagccatctgtaaccaaccgcctgacatccaggaagagtgcgcccgtcctcaaccagatctttgaggaaggggaatctgacgatgagtttgacatggatgagaatctgcctcccaagttgagcaggttaaagatgaatatagcttctccaggtacagttcacaaacgctaccaccggaggaaaagtcagggccggggctccagctgcagtagttcggagaccagtgatgatgattctgaaagccggcggcggctcgataaagatagcgggttcacctactcctggcaccgacgggatagcagcgaggggccccctggcagtgagggggatggcgggggccagagcaagccaagcaatgccagtggaggggtggacaaggccagccccagtgagaacaatgctggtgggggcagtccctccagcggctcgggtggcaaccccaccaatacatcgggtaccacacgccgctgtgccggccccagcaactccatgcagctggcctctcgcagtgctggggagctcgttgagagcctcaaactcatgagcctctgcctcggctcccagcttcatgggagcaccaagtacattattgatccacagaatggcttgtcattttccagtgtgaaagtccaagagaaatctacgtggaaaatgtgcattagctccacagggaatgcagggcaggtccctgcagtgggcggcataaagtttttctctgaccacatggcagataccaccactgaattggaacggataaagagcaagaacctgaaaaataacgtgctgcagctacctctgtgcgaaaagaccatctctgtgaacatccagcggaaccctaaggaggggctgctgtgcgcatccagcccagccagctgttgccatgtcatctgactgtggccccatctggccgctagcacgcttcctgctcagagcagtgaagaccggctcacttcactgttccatttggttttactattttaaagtgggcgttaggagcaattatttattacctttccatttgttcgcctgatgatgtgacaatgcatggtctttgtgcatgctgctagacacttttctttcccagccgaaaagcctattatgtaatttttacattcataattttaatgtggatgatcaggattaaatcaagatatatatctggaacctcttat

SEQ ID NO: 28404 - DNA, 10474 bp, Homo sapiens
  source 1..10474: mol_type = unassigned DNA
aacttgggcagaggtcaggggtcacgcgaggtcagtccgtcgggagggctagggagatggtcacgaaacctgaagtcaagagttaaggcttgttggcttctggtgtgattcccttcagtacggcggcaccgtggaagtgcagactttcacagggggtgtggtctcagctcacacaggtgctccagaggctggtggacctgagcggaggctgggacgccctggtgggccccgggccctggaaggcgggtcccggtggccggtggcccagaatgaggccagctcccagcatgccctgcagccggacgccagcccctcggccagcagtactggtgataacaacccagtcattcttcaggcatccaagggggagcctgggagtgggaccatgcagagcagcccctcccctgctcaccctcagctcccagtcctacagacacagatggtgtcggacggcatgacaggcagcaatcctgtgtcccctgcctcatccagttccccagcctctagtggggcaggcggcatctccccgcagcacatagctcaagattcctcactggatggacctccaggccccccagatggtgccacagtgcccctggaggggttcagcttatcccaggctgctgacctggctaacaagggcccgaagtgggagaagagccatgccgaaattgcagaacaggccaagcatgaggccgagatcgagactcggattgctgagctgcggaaggagggtttctggtcactgaagaggctgcctaaggtgccagagccccctcgccccaaaggtcactgggactatttgtgcgaagagatgcagtggctctctgctgactttgctcaggagcgccgttggaaacggggtgtggcccggaaggtggtgcgcatggtgatccggcaccacgaggagcagcggcagaaagaggaacgggcccggagggaggagcaggccaagctgcgtcgaattgcttccaccatggccaaggatgtcaggcagttctggagcaatgtggagaaggtggtgcaattcaagcaacagtcccggcttgaggaaaagcgcaaaaaagccctggacctgcatttggacttcattgtggggcaaactgaaaagtactcggaccttctgtctcagagcctcaaccagccattaacctccagcaaagcaggctcttccccttgcctcggctcttcctcagctgcctccagtcctccaccccctgcttctcgcctggatgatgaagatggggactttcaaccccaagaggatgaggaagaggatgatgaggaaacgattgaagttgaagaacaacaggaaggcaatgatgcagaggcccagaggcgtgagattgagctgcttcgccgtgagggagaattgccactggaagagctgctccgttcccttccccctcagctgttggaagggccttccagcccctctcaaaccccctcatctcatgatagtgacacccgagatgggcctgaagaaggtgctgaagaagagccccctcaggtgttggagataaagcccccaccctctgctgtcacacagcgcaacaaacagccttggcatccagatgaagatgatgaagagtttactgccaacgaagaggaagcggaggatgaagaggatactatagcagctgaggaacagttggaaggggaggtggatcatgccatggagctgagcgagttggctcgagaaggtgagctttccatggaggagctattgcagcagtatgcaggagcctatgccccaggctctgggagcagtgaagatgaggatgaagatgaggttgatgctaatagctctgactgtgaaccagaggggcccgtggaagcggaagagcctcctcaggaggatagtagcagtcagtcagactctgtggaggaccggagtgaggatgaggaagatgaacattcagaggaggaagaaacaagtggaagttcagcatcagaggaatctgagtctgaagagtctgaggatgcccaatcacagagccaagcagatgaagaggaggaagatgatgattttggggtggagtacttgcttgccagggatgaagagcagagtgaggcagatgcaggcagtgggcctcctactccagggcccactactctaggtccaaagaaagaaattactgacattgctgcagcagctgaaagtctccagcccaagggttacacgctggccacgacccaggtaaagacgcccattcccctgcttctgcggggccagctccgggagtaccagcacattgggctagactggctggttaccatgtatgagaagaagcttaatggcattcttgctgatgagatggggcttgggaagaccatccagaccatctctctgcttgcccacttggcttgtgagaaaggtaactggggtccccatttaatcattgttcccaccagcgtgatgttgaactgggagatggagttgaaacggtggtgccccagctttaaaatcctcacttactatggagcccagaaagagaggaagctcaagcggcagggctggaccaagcccaatgcctttcatgtgtgtatcacatcttacaagctggtgctgcaggaccaccaggccttccgtcgcaagaactggcgctatctcattctggatgaggcgcagaacatcaagaacttcaagtcacagcgctggcagtcactcctcaacttcaacagccagagacgcctgctcctgacaggaactcccttgcagaacagcctcatggagctgtggtccttgatgcactttttgatgccccatgtcttccagtctcatcgcgagttcaaggagtggttctctaatcccctaactggcatgattgagggcagccaagagtataatgaaggtctagtcaaacgcctccacaaggttttgaggccttttttactgcgccgagttaaggtggatgttgagaagcagatgcccaaaaagtacgagcatgttatccgctgcaggctctccaagcgtcaacgctgtctctatgatgacttcatggcacagaccacaactaaggagacactagccacaggccatttcatgagcgtcatcaacattttgatgcagctgagaaaagtttgcaatcatccaaatctgttcgaccctcgaccggttacctcccctttcatcaccccaggcatctgcttcagcaccgcctctctggtgctaagggccacggatgtccatcccctccagcggatagacatgggtcgatttgaccttattggcctggaaggtcgtgtctctcgatatgaggcagacacatttctgccccggcaccgcctctctcgccgggtactgttagaagtggctactgctcctgaccccccaccccggcccaagccagtcaagatgaaggtcaacaggatgctgcagccagtacctaagcaagaaggccggacagtggtggtggtgaacaacccacgggcgcccctgggccctgtcccagttcgacctcctccaggtcctgagctctcagcccagcccacccctggcccagtcccccaagtgctgccagcatcactgatggtttcagcctcacctgccgggcccccgcttattcctgcatctcggcctcctggccctgtcctcttgcctccactgcagcccaacagtggttctctcccccaggtgttgccatcccccctgggggtcctgagtgggacctcacggcctcccacgccaaccttgtccctaaagccaacaccacctgccccagttcgcctgagcccagccccacctccaggctcctctagcctgttgaagcccctgacagtgccaccaggctacaccttccctcctgctgctgccaccaccacttctaccaccacggcaactgctaccaccacagcagtgccagctccgactcctgcaccacagcgcctcattctatctcccgatatgcaggctcgcctgccctcaggcgaagtggtcagcatcgggcagttagcctcactggcacaacgtccagtggctaatgcagggggaagcaaacctctcaccttccaaatccagggcaacaagctgactttgactggtgcccaggtgcgccagcttgctgtggggcagccccgcccgctgcaaaggaatgtggtgcacctcgtgtcagcaggggggcagcaccatctcatcagccagcctgcccatgtggccctcatccaggccgtggccccgacccctggccctacccctgtctctgtgctgccttcttcgacccccagcaccacccctgcccctactggcctcagccttccgcttgctgctaaccaggtgccaccaaccatggtgaataatacaggcgtggtgaagattgtagtgagacaagcccctcgggatggactgactcctgttcctccattggccccagcaccccggcctccgagctctgggcttccagctgtgttgaatccacgccccacgttaacccctggccggctacccacacctactctgggtactgctcgagcccccatgcccacacccactctggtgaggcctcttctcaagctggtccacagtccttcacctgaagtcagtgcttcagcccccggagctgcccccttgaccatctcttctcctctccacgtgccatcctccctccctgggccagcctcttctccaatgccaattcccaactcctctccccttgctagtcctgtgtcctctacagtctcagttccattgtcatcttcactccccatctctgtccccaccacacttcctgccccagcctcggctccactcaccatccccatctcagcccccttgactgtttctgcttcgggcccagctctgttgaccagtgtgactccaccattggcacctgttgtcccagcggctcctggacctccctccttggcaccatctggtgcttccccgtcagcatcagccttgactctaggtttggccacagctccatccctgtcttcatctcagacacctggtcaccctctgttgttggctcccacctcttcacatgttccagggttgaactcaaccgtggccccagcatgctcacctgtcctggtgccagcttcggctctggccagtccttttccgtcagcaccaaatccagctccagctcaggcttcccttctggctccagcatcttctgcatctcaggctctagccacccctctggctcctatggcggctccacagacagcaattctggctccttctccagctcctcctctggctcctcttccggtcctggcaccatcgccaggtgctgctcctgtcctggcttcatcacagactccggttccagttatggctccatcgtctactccaggaacctctttagcctcagcttcaccggtaccagctccaacccctgtgttggctccatcatcaactcaaactatgctaccagccccggttccgtcacctctcccgagcccggcttctacgcagacactggccctagccccagctttagcacccactcttggaggctcatctccatctcagacactctctttgggaacggggaacccccagggaccctttccaactcagacattgtcattaactccagcatcatccctggtaccaactccagcccagacactgtctttggcaccaggaccaccactgggtccaactcagacgctgtctctggctccagcaccccctctggctccagcttctccagtgggcccagccccagctcacacgctgactttggctccagcatcgtcatctgcttcactcctggccccagcttcagtgcagacactgaccttgagccctgccccagttcctaccctgggcccggccgcagctcagaccttggcgctggccccagcctccacacagtccccagcttcccaggcatcttcccttgtggtttcggcatctggtgccgctcccttgcctgtcaccatggtatcccggctgcctgtttccaaggatgagcctgacacactgacattgcgctctggtccccccagccctccctccactgctacctcgtttggtggcccccggcctcgacgccagccccccccaccacctcgttcccctttttatctggactccctggaggaaaagcggaagcggcagcggtctgaacgcctggaacggattttccaacttagtgaggctcatggggccctggcacctgtgtatgggactgaagtcctggatttctgtaccctgccccaacctgttgccagccccatcggccctcgttctcctggccccagccaccccaccttttggacttataccgaggctgcccaccgggctgtactgtttccccagcagcgactagaccagctgtcagaaatcattgagaggttcatctttgtcatgcctcctgtggaggcacctcccccttccctgcatgcctgccacccacctccttggctggccccacgtcaggcagccttccaggagcaattggcctctgagctctggccccgggctcgtcctttgcaccgtattgtgtgtaacatgcgcacccagttccctgacttaagactcatccagtatgattgcggaaagttgcagacgttggcagtgctgttgcggcagctcaaggcagagggccaccgagtgctcatcttcacccagatgacccgaatgctggatgtattggagcagtttctcacctaccatggccatctctacctgcgcctggatggatctactagagttgaacagagacaggccttgatggaacggttcaatgcagacaaacgcatattctgcttcatcctttcaactcggagtgggggtgtgggcgtgaacctgacaggagcagacactgttgttttttatgacagcgactggaatcccaccatggatgctcaggcccaggaccgctgtcaccgaattggccagacccgggatgtccacatatataggcttatcagtgaacggacagtggaggagaacatcctaaaaaaggcaaatcagaagagaatgttgggggacatggccattgagggaggcaacttcaccacagcctatttcaaacagcagaccatccgagagctgtttgatatgcccctggaggaaccttctagctcatccgtgccctctgcccctgaagaggaggaagagactgtggccagcaagcagactcatattctggagcaggcattgtgtcgggcagaagatgaagaggatatccgtgcagccacccaggccaaggctgaacaggtggctgagcttgcagaatttaatgagaacgatgggtttcctgctggtgagggagaggaagctggccggcctggggctgaggatgaggagatgtcccgggctgagcaggaaattgctgccctcgtagaacagctgacccccattgagcgctatgccatgaaattcctggaggcctcactggaggaggtgagccgagaggagctcaaacaggcagaagagcaagtggaagctgcccgcaaagacctggaccaagccaaggaggaggtgttccgcctaccccaagaggaggaggaggggccgggggctggggatgagagttcctgtgggactggtggaggcacccaccggcgcagtaaaaaggccaaagcccctgagaggccggggactcgtgtcagtgagcgtcttcgtggagcccgggctgagactcaaggggcaaaccacactcctgtcatatccgcccatcaaactcgcagcaccaccacaccaccccgctgcagtcctgccagggagcgagttcccaggccagcacctaggcctcgacccactccagcttcagctccggctgcaattcctgcccttgttcctgtcccagtttctgccccagtacccatttcagccccaaatccaataaccattctccctgtccatatcttgccttctcctccccctccttcacagattcctccttgttcttctcctgcctgcacccctcctcctgcctgtacccctccaccagctcatacaccgcctccagcccaaacctgtcttgtaactccttcctctcctctcttgcttggtccaccttctgtgcccatctctgcctcagtcactaatctccccttgggcttgaggcctgaggcagagctgtgtgcccaggcattggcatctccagagtccctggagctggcttctgtggccagttcagaaacctcctcactttctcttgtgccccctaaagatctgttgccagttgctgtggagatcctgcctgtgtcagagaagaacctttctctcaccccttctgcacccagcctgaccttggaggctggcagcatccccaatggtcaagagcaggaggcaccagattctgctgaggggaccacccttacagtgctgcctgaaggtgaggagttgcccctgtgtgtgagtgagagcaatggcctggagctcccaccctcagcagcatctgatgagccacttcaggagccactggaggctgacaggacctcggaagagctgacagaggccaagaccccaacctccagcccagagaagccacaggaactcgttacagctgaggttgcagctccatccacctcatcttcagccacttcctcgcctgagggtccttcacctgcccgacctcctcggcgtcgcaccagtgctgatgtggaaattaggggtcaagggactggtcggccaggacaaccaccaggccccaaagtgcttcgaaagctgccaggacggctggtaactgtggtagaggaaaaggaactggtgcggcggcggcggcagcagcggggagctgccagcaccctagtgcctggggtctctgagactagtgccagcccgggaagcccgtctgtccgcagcatgtcagggccagaatcctcccctcccattggtgggccctgtgaagctgctccttcatcctcactgcccactccaccccagcagcccttcattgctcgccgtcacattgagctgggggtgactggtggtggcagccccgagaatggagacggagcactgctcgccatcaccccacctgctgtgaaacgtcggagggggaggccccccaagaagaacaggtctccagcagatgctgggagaggtgtggatgaggcaccctcatccaccttgaagggaaaaaccaatggggctgacccagtccctgggcctgagaccctaattgttgcagatcctgtcctggaaccacagcttattcctgggccccagcctcttggaccccagccagttcacagacccaatcccctcctgtcacctgtggagaaaagaaggcgaggacgaccccctaaagcacgagatttgcccatccctgggaccatttcctctgcaggggatggcaactccgaaagtcggacacagccacccccacacccatcacccctaaccccactcccaccactgctagtttgtcccactgctactgttgccaacactgtcaccactgtcaccatttcaacgtccccacccaaacggaagaggggccgacctcccaagaatcctccatcacctcggcccagccagctccccgtcttggaccgtgacagcacttctgttctcgagagctgtggattggggaggcgacggcaaccccagggccaaggggagagtgagggtagttcctctgatgaggatggaagccgccccctcacccgcctggcccgccttcggcttgaagcagaaggaatgcgaggacggaagagtggagggtccatggtggtggctgtaattcaggatgacctggacttagcagatagcgggccaggcgggttggaattgacaccacctgtggtctcactaaccccaaaactgcgctcgacccggctgcgtccagggtctctagtccccccactagagactgagaagttgcctcgcaaacgagcaggggccccagttggtgggagtcctgggctggcaaagcggggccgcctacagcccccaagtcccctggggcctgagggttcagtagaggagtctgaggctgaagcctcaggtgaggaggaggaaggggatgggaccccacgccgacgtcctggcccccgccggcttgttgggaccaccaaccaaggggaccagcgcatcctgcgcagcagcgcccctccctccctggctggccctgctgttagtcacagaggccgcaaggccaagacgtgagtgggctgcccctccacctaggctttccaccgtggccactccctccatgaccaggcctgactctgttaaccactacttgaagtcttgagggggaaagcctccagggagacataggggccttctcccttcttcccaccaaagtagggggtaggcaactggttgtcatggaaatggggatcatcacagtccccttccccttcaccccacgtggctgggcagtgttaagggtggcaagatagtctctgtccccacccccttgtacttgattccccagctgtctttcacacagccccccacccttaggggaagggggaggggcttctctacaatgaggtttttttcttttttttttttttttaagaagaaaaaataataaacttagtttctgtatgagca

SEQ ID NO: 28405 - DNA, 9999 bp, Homo sapiens
  source 1..9999: mol_type = unassigned DNA
aacttgggcagaggtcaggggtcacgcgaggtcagtccgtcgggagggctagggagatggtcacgaaacctgaagtcaagagttaaggcttgttggcttctggtgtgattcccttcagtacggcggcaccgtggaagtgcagactttcacagggggtgtggtctcagctcacacaggtgctccagaggctggtggacctgagcggaggctgggacgccctggtgggccccgggccctggaaggcgggtcccggtggccggtggcccagaatgaggccagctcccagcatgccctgcagccggacgccagcccctcggccagcagtactggtgataacaacccagtcattcttcaggcatccaagggggagcctgggagtgggaccatgcagagcagcccctcccctgctcaccctcagctcccagtcctacagacacagatggtgtcggacggcatgacaggcagcaatcctgtgtcccctgcctcatccagttccccagcctctagtggggcaggcggcatctccccgcagcacatagctcaagattcctcactggatggacctccaggccccccagatggtgccacagtgcccctggaggggttcagcttatcccaggctgctgacctggctaacaagggcccgaagtgggagaagagccatgccgaaattgcagaacaggccaagcatgaggccgagatcgagactcggattgctgagctgcggaaggagggtttctggtcactgaagaggctgcctaaggtgccagagccccctcgccccaaaggtcactgggactatttgtgcgaagagatgcagtggctctctgctgactttgctcaggagcgccgttggaaacggggtgtggcccggaaggtggtgcgcatggtgatccggcaccacgaggagcagcggcagaaagaggaacgggcccggagggaggagcaggccaagctgcgtcgaattgcttccaccatggccaaggatgtcaggcagttctggagcaatgtggagaaggtggtgcaattcaagcaacagtcccggcttgaggaaaagcgcaaaaaagccctggacctgcatttggacttcattgtggggcaaactgaaaagtactcggaccttctgtctcagagcctcaaccagccattaacctccagcaaagcaggctcttccccttgcctcggctcttcctcagctgcctccagtcctccaccccctgcttctcgcctggatgatgaagatggggactttcaaccccaagaggatgaggaagaggatgatgaggaaacgattgaagttgaagaacaacaggaaggcaatgatgcagaggcccagaggcgtgagattgagctgcttcgccgtgagggagaattgccactggaagagctgctccgttcccttccccctcagctgttggaagggccttccagcccctctcaaaccccctcatctcatgatagtgacacccgagatgggcctgaagaaggtgctgaagaagagccccctcaggtgttggagataaagcccccaccctctgctgtcacacagcgcaacaaacagccttggcatccagatgaagatgatgaagagtttactgccaacgaagaggaagcggaggatgaagaggatactatagcagctgaggaacagttggaaggggaggtggatcatgccatggagctgagcgagttggctcgagaaggtgagctttccatggaggagctattgcagcagtatgcaggagcctatgccccaggctctgggagcagtgaagatgaggatgaagatgaggttgatgctaatagctctgactgtgaaccagaggggcccgtggaagcggaagagcctcctcaggaggatagtagcagtcagtcagactctgtggaggaccggagtgaggatgaggaagatgaacattcagaggaggaagaaacaagtggaagttcagcatcagaggaatctgagtctgaagagtctgaggatgcccaatcacagagccaagcagatgaagaggaggaagatgatgattttggggtggagtacttgcttgccagggatgaagagcagagtgaggcagatgcaggcagtgggcctcctactccagggcccactactctaggtccaaagaaagaaattactgacattgctgcagcagctgaaagtctccagcccaagggttacacgctggccacgacccaggtaaagacgcccattcccctgcttctgcggggccagctccgggagtaccagcacattgggctagactggctggttaccatgtatgagaagaagcttaatggcattcttgctgatgagatggggcttgggaagaccatccagaccatctctctgcttgcccacttggcttgtgagaaaggtaactggggtccccatttaatcattgttcccaccagcgtgatgttgaactgggagatggagttgaaacggtggtgccccagctttaaaatcctcacttactatggagcccagaaagagaggaagctcaagcggcagggctggaccaagcccaatgcctttcatgtgtgtatcacatcttacaagctggtgctgcaggaccaccaggccttccgtcgcaagaactggcgctatctcattctggatgaggcgcagaacatcaagaacttcaagtcacagcgctggcagtcactcctcaacttcaacagccagagacgcctgctcctgacaggaactcccttgcagaacagcctcatggagctgtggtccttgatgcactttttgatgccccatgtcttccagtctcatcgcgagttcaaggagtggttctctaatcccctaactggcatgattgagggcagccaagagtataatgaaggtctagtcaaacgcctccacaaggttttgaggccttttttactgcgccgagttaaggtggatgttgagaagcagatgcccaaaaagtacgagcatgttatccgctgcaggctctccaagcgtcaacgctgtctctatgatgacttcatggcacagaccacaactaaggagacactagccacaggccatttcatgagcgtcatcaacattttgatgcagctgagaaaagtttgcaatcatccaaatctgttcgaccctcgaccggttacctcccctttcatcaccccaggcatctgcttcagcaccgcctctctggtgctaagggccacggatgtccatcccctccagcggatagacatgggtcgatttgaccttattggcctggaaggtcgtgtctctcgatatgaggcagacacatttctgccccggcaccgcctctctcgccgggtactgttagaagtggctactgctcctgaccccccaccccggcccaagccagtcaagatgaaggtcaacaggatgctgcagccagtacctaagcaagaaggccggacagtggtggtggtgaacaacccacgggcgcccctgggccctgtcccagttcgacctcctccaggtcctgagctctcagcccagcccacccctggcccagtcccccaagtgctgccagcatcactgatggtttcagcctcacctgccgggcccccgcttattcctgcatctcggcctcctggccctgtcctcttgcctccactgcagcccaacagtggttctctcccccaggcaggcgaagtggtcagcatcgggcagttagcctcactggcacaacgtccagtggctaatgcagggggaagcaaacctctcaccttccaaatccagggcaacaagctgactttgactggtgcccaggtgcgccagcttgctgtggggcagccccgcccgctgcaaatgccaccaaccatggtgaataatacaggcgtggtgaagattgtagtgagacaagcccctcgggatggactgactcctgttcctccattggccccagcaccccggcctccgagctctgggcttccagctgtgttgaatccacgccccacgttaacccctggccggctacccacacctactctgggtactgctcgagcccccatgcccacacccactctggtgaggcctcttctcaagctggtccacagtccttcacctgaagtcagtgcttcagcccccggagctgcccccttgaccatctcttctcctctccacgtgccatcctccctccctgggccagcctcttctccaatgccaattcccaactcctctccccttgctagtcctgtgtcctctacagtctcagttccattgtcatcttcactccccatctctgtccccaccacacttcctgccccagcctcggctccactcaccatccccatctcagcccccttgactgtttctgcttcgggcccagctctgttgaccagtgtgactccaccattggcacctgttgtcccagcggctcctggacctccctccttggcaccatctggtgcttccccgtcagcatcagccttgactctaggtttggccacagctccatccctgtcttcatctcagacacctggtcaccctctgttgttggctcccacctcttcacatgttccagggttgaactcaaccgtggccccagcatgctcacctgtcctggtgccagcttcggctctggccagtccttttccgtcagcaccaaatccagctccagctcaggcttcccttctggctccagcatcttctgcatctcaggctctagccacccctctggctcctatggcggctccacagacagcaattctggctccttctccagctcctcctctggctcctcttccggtcctggcaccatcgccaggtgctgctcctgtcctggcttcatcacagactccggttccagttatggctccatcgtctactccaggaacctctttagcctcagcttcaccggtaccagctccaacccctgtgttggctccatcatcaactcaaactatgctaccagccccggttccgtcacctctcccgagcccggcttctacgcagacactggccctagccccagctttagcacccactcttggaggctcatctccatctcagacactctctttgggaacggggaacccccagggaccctttccaactcagacattgtcattaactccagcatcatccctggtaccaactccagcccagacactgtctttggcaccaggaccaccactgggtccaactcagacgctgtctctggctccagcaccccctctggctccagcttctccagtgggcccagccccagctcacacgctgactttggctccagcatcgtcatctgcttcactcctggccccagcttcagtgcagacactgaccttgagccctgccccagttcctaccctgggcccggccgcagctcagaccttggcgctggccccagcctccacacagtccccagcttcccaggcatcttcccttgtggtttcggcatctggtgccgctcccttgcctgtcaccatggtatcccggctgcctgtttccaaggatgagcctgacacactgacattgcgctctggtccccccagccctccctccactgctacctcgtttggtggcccccggcctcgacgccagccccccccaccacctcgttcccctttttatctggactccctggaggaaaagcggaagcggcagcggtctgaacgcctggaacggattttccaacttagtgaggctcatggggccctggcacctgtgtatgggactgaagtcctggatttctgtaccctgccccaacctgttgccagccccatcggccctcgttctcctggccccagccaccccaccttttggacttataccgaggctgcccaccgggctgtactgtttccccagcagcgactagaccagctgtcagaaatcattgagaggttcatctttgtcatgcctcctgtggaggcacctcccccttccctgcatgcctgccacccacctccttggctggccccacgtcaggcagccttccaggagcaattggcctctgagctctggccccgggctcgtcctttgcaccgtattgtgtgtaacatgcgcacccagttccctgacttaagactcatccagtatgattgcggaaagttgcagacgttggcagtgctgttgcggcagctcaaggcagagggccaccgagtgctcatcttcacccagatgacccgaatgctggatgtattggagcagtttctcacctaccatggccatctctacctgcgcctggatggatctactagagttgaacagagacaggccttgatggaacggttcaatgcagacaaacgcatattctgcttcatcctttcaactcggagtgggggtgtgggcgtgaacctgacaggagcagacactgttgttttttatgacagcgactggaatcccaccatggatgctcaggcccaggaccgctgtcaccgaattggccagacccgggatgtccacatatataggcttatcagtgaacggacagtggaggagaacatcctaaaaaaggcaaatcagaagagaatgttgggggacatggccattgagggaggcaacttcaccacagcctatttcaaacagcagaccatccgagagctgtttgatatgcccctggaggaaccttctagctcatccgtgccctctgcccctgaagaggaggaagagactgtggccagcaagcagactcatattctggagcaggcattgtgtcgggcagaagatgaagaggatatccgtgcagccacccaggccaaggctgaacaggtggctgagcttgcagaatttaatgagaacgatgggtttcctgctggtgagggagaggaagctggccggcctggggctgaggatgaggagatgtcccgggctgagcaggaaattgctgccctcgtagaacagctgacccccattgagcgctatgccatgaaattcctggaggcctcactggaggaggtgagccgagaggagctcaaacaggcagaagagcaagtggaagctgcccgcaaagacctggaccaagccaaggaggaggtgttccgcctaccccaagaggaggaggaggggccgggggctggggatgagagttcctgtgggactggtggaggcacccaccggcgcagtaaaaaggccaaagcccctgagaggccggggactcgtgtcagtgagcgtcttcgtggagcccgggctgagactcaaggggcaaaccacactcctgtcatatccgcccatcaaactcgcagcaccaccacaccaccccgctgcagtcctgccagggagcgagttcccaggccagcacctaggcctcgacccactccagcttcagctccggctgcaattcctgcccttgttcctgtcccagtttctgccccagtacccatttcagccccaaatccaataaccattctccctgtccatatcttgccttctcctccccctccttcacagattcctccttgttcttctcctgcctgcacccctcctcctgcctgtacccctccaccagctcatacaccgcctccagcccaaacctgtcttgtaactccttcctctcctctcttgcttggtccaccttctgtgcccatctctgcctcagtcactaatctccccttgggcttgaggcctgaggcagagctgtgtgcccaggcattggcatctccagagtccctggagctggcttctgtggccagttcagaaacctcctcactttctcttgtgccccctaaagatctgttgccagttgctgtggagatcctgcctgtgtcagagaagaacctttctctcaccccttctgcacccagcctgaccttggaggctggcagcatccccaatggtcaagagcaggaggcaccagattctgctgaggggaccacccttacagtgctgcctgaaggtgaggagttgcccctgtgtgtgagtgagagcaatggcctggagctcccaccctcagcagcatctgatgagccacttcaggagccactggaggctgacaggacctcggaagagctgacagaggccaagaccccaacctccagcccagagaagccacaggaactcgttacagctgaggttgcagctccatccacctcatcttcagccacttcctcgcctgagggtccttcacctgcccgacctcctcggcgtcgcaccagtgctgatgtggaaattaggggtcaagggactggtcggccaggacaaccaccaggccccaaagtgcttcgaaagctgccaggacggctggtaactgtggtagaggaaaaggaactggtgcggcggcggcggcagcagcggggagctgccagcaccctagtgcctggggtctctgagactagtgccagcccgggaagcccgtctgtccgcagcatgtcagggccagaatcctcccctcccattggtgggccctgtgaagctgctccttcatcctcactgcccactccaccccagcagcccttcattgctcgccgtcacattgagctgggggtgactggtggtggcagccccgagaatggagacggagcactgctcgccatcaccccacctgctgtgaaacgtcggagggggaggccccccaagaagaacaggtctccagcagatgctgggagaggtgtggatgaggcaccctcatccaccttgaagggaaaaaccaatggggctgacccagtccctgggcctgagaccctaattgttgcagatcctgtcctggaaccacagcttattcctgggccccagcctcttggaccccagccagttcacagacccaatcccctcctgtcacctgtggagaaaagaaggcgaggacgaccccctaaagcacgagatttgcccatccctgggaccatttcctctgcaggggatggcaactccgaaagtcggacacagccacccccacacccatcacccctaaccccactcccaccactgctagtttgtcccactgctactgttgccaacactgtcaccactgtcaccatttcaacgtccccacccaaacggaagaggggccgacctcccaagaatcctccatcacctcggcccagccagctccccgtcttggaccgtgacagcacttctgttctcgagagctgtggattggggaggcgacggcaaccccagggccaaggggagagtgagggtagttcctctgatgaggatggaagccgccccctcacccgcctggcccgccttcggcttgaagcagaaggaatgcgaggacggaagagtggagggtccatggtggtggctgtaattcaggatgacctggacttagcagatagcgggccaggcgggttggaattgacaccacctgtggtctcactaaccccaaaactgcgctcgacccggctgcgtccagggtctctagtccccccactagagactgagaagttgcctcgcaaacgagcaggggccccagttggtgggagtcctgggctggcaaagcggggccgcctacagcccccaagtcccctggggcctgagggttcagtagaggagtctgaggctgaagcctcaggtgaggaggaggaaggggatgggaccccacgccgacgtcctggcccccgccggcttgttgggaccaccaaccaaggggaccagcgcatcctgcgcagcagcgcccctccctccctggctggccctgctgttagtcacagaggccgcaaggccaagacgtgagtgggctgcccctccacctaggctttccaccgtggccactccctccatgaccaggcctgactctgttaaccactacttgaagtcttgagggggaaagcctccagggagacataggggccttctcccttcttcccaccaaagtagggggtaggcaactggttgtcatggaaatggggatcatcacagtccccttccccttcaccccacgtggctgggcagtgttaagggtggcaagatagtctctgtccccacccccttgtacttgattccccagctgtctttcacacagccccccacccttaggggaagggggaggggcttctctacaatgaggtttttttcttttttttttttttttaagaagaaaaaataataaacttagtttctgtatgagc

SEQ ID NO: 28406 - DNA, 10287 bp, Homo sapiens
  source 1..10287: mol_type = unassigned DNA
aacttgggcagaggtcaggggtcacgcgaggtcagtccgtcgggagggctagggagatggtcacgaaacctgaagtcaagagttaaggcttgttggcttctggtgtgattcccttcagtacggcggcaccgtggaagtgcagactttcacagggggtgtggtctcagctcacacaggtgctccagaggctggtggacctgagcggaggctgggacgccctggtgggccccgggccctggaaggcgggtcccggtggccggtggcccagaatgaggccagctcccagcatgccctgcagccggacgccagcccctcggccagcagtactggtgataacaacccagtcattcttcaggcatccaagggggagcctgggagtgggaccatgcagagcagcccctcccctgctcaccctcagctcccagtcctacagacacagatggtgtcggacggcatgacaggcagcaatcctgtgtcccctgcctcatccagttccccagcctctagtggggcaggcggcatctccccgcagcacatagctcaagattcctcactggatggacctccaggccccccagatggtgccacagtgcccctggaggggttcagcttatcccaggctgctgacctggctaacaagggcccgaagtgggagaagagccatgccgaaattgcagaacaggccaagcatgaggccgagatcgagactcggattgctgagctgcggaaggagggtttctggtcactgaagaggctgcctaaggtgccagagccccctcgccccaaaggtcactgggactatttgtgcgaagagatgcagtggctctctgctgactttgctcaggagcgccgttggaaacggggtgtggcccggaaggtggtgcgcatggtgatccggcaccacgaggagcagcggcagaaagaggaacgggcccggagggaggagcaggccaagctgcgtcgaattgcttccaccatggccaaggatgtcaggcagttctggagcaatgtggagaaggtggtgcaattcaagcaacagtcccggcttgaggaaaagcgcaaaaaagccctggacctgcatttggacttcattgtggggcaaactgaaaagtactcggaccttctgtctcagagcctcaaccagccattaacctccagcaaagcaggctcttccccttgcctcggctcttcctcagctgcctccagtcctccaccccctgcttctcgcctggatgatgaagatggggactttcaaccccaagaggatgaggaagaggatgatgaggaaacgattgaagttgaagaacaacaggaaggcaatgatgcagaggcccagaggcgtgagattgagctgcttcgccgtgagggagaattgccactggaagagctgctccgttcccttccccctcagctgttggaagggccttccagcccctctcaaaccccctcatctcatgatagtgacacccgagatgggcctgaagaaggtgctgaagaagagccccctcaggtgttggagataaagcccccaccctctgctgtcacacagcgcaacaaacagccttggcatccagatgaagatgatgaagagtttactgccaacgaagaggaagcggaggatgaagaggatactatagcagctgaggaacagttggaaggggaggtggatcatgccatggagctgagcgagttggctcgagaaggtgagctttccatggaggagctattgcagcagtatgcaggagcctatgccccaggctctgggagcagtgaagatgaggatgaagatgaggttgatgctaatagctctgactgtgaaccagaggggcccgtggaagcggaagagcctcctcaggaggatagtagcagtcagtcagactctgtggaggaccggagtgaggatgaggaagatgaacattcagaggaggaagaaacaagtggaagttcagcatcagaggaatctgagtctgaagagtctgaggatgcccaatcacagagccaagcagatgaagaggaggaagatgatgattttggggtggagtacttgcttgccagggatgaagagcagagtgaggcagatgcaggcagtgggcctcctactccagggcccactactctaggtccaaagaaagaaattactgacattgctgcagcagctgaaagtctccagcccaagggttacacgctggccacgacccaggtaaagacgcccattcccctgcttctgcggggccagctccgggagtaccagcacattgggctagactggctggttaccatgtatgagaagaagcttaatggcattcttgctgatgagatggggcttgggaagaccatccagaccatctctctgcttgcccacttggcttgtgagaaaggtaactggggtccccatttaatcattgttcccaccagcgtgatgttgaactgggagatggagttgaaacggtggtgccccagctttaaaatcctcacttactatggagcccagaaagagaggaagctcaagcggcagggctggaccaagcccaatgcctttcatgtgtgtatcacatcttacaagctggtgctgcaggaccaccaggccttccgtcgcaagaactggcgctatctcattctggatgaggcgcagaacatcaagaacttcaagtcacagcgctggcagtcactcctcaacttcaacagccagagacgcctgctcctgacaggaactcccttgcagaacagcctcatggagctgtggtccttgatgcactttttgatgccccatgtcttccagtctcatcgcgagttcaaggagtggttctctaatcccctaactggcatgattgagggcagccaagagtataatgaaggtctagtcaaacgcctccacaaggttttgaggccttttttactgcgccgagttaaggtggatgttgagaagcagatgcccaaaaagtacgagcatgttatccgctgcaggctctccaagcgtcaacgctgtctctatgatgacttcatggcacagaccacaactaaggagacactagccacaggccatttcatgagcgtcatcaacattttgatgcagctgagaaaagtttgcaatcatccaaatctgttcgaccctcgaccggttacctcccctttcatcaccccaggcatctgcttcagcaccgcctctctggtgctaagggccacggatgtccatcccctccagcggatagacatgggtcgatttgaccttattggcctggaaggtcgtgtctctcgatatgaggcagacacatttctgccccggcaccgcctctctcgccgggtactgttagaagtggctactgctcctgaccccccaccccggcccaagccagtcaagatgaaggtcaacaggatgctgcagccagtacctaagcaagaaggccggacagtggtggtggtgaacaacccacgggcgcccctgggccctgtcccagttcgacctcctccaggtcctgagctctcagcccagcccacccctggcccagtcccccaagtgctgccagcatcactgatggtttcagcctcacctgccgggcccccgcttattcctgcatctcggcctcctggccctgtcctcttgcctccactgcagcccaacagtggttctctcccccaggtgttgccatcccccctgggggtcctgagtgggacctcacggcctcccacgccaaccttgtccctaaagccaacaccacctgccccagttcgcctgagcccagccccacctccaggctcctctagcctgttgaagcccctgacagtgccaccaggctacaccttccctcctgctgctgccaccaccacttctaccaccacggcaactgctaccaccacagcagtgccagctccgactcctgcaccacagcgcctcattctatctcccgatatgcaggctcgcctgccctcaggcgaagtggtcagcatcgggcagttagcctcactggcacaacgtccagtggctaatgcagggggaagcaaacctctcaccttccaaatccagggcaacaagctgactttgactggtgcccaggtgcgccagcttgctgtggggcagccccgcccgctgcaaatgccaccaaccatggtgaataatacaggcgtggtgaagattgtagtgagacaagcccctcgggatggactgactcctgttcctccattggccccagcaccccggcctccgagctctgggcttccagctgtgttgaatccacgccccacgttaacccctggccggctacccacacctactctgggtactgctcgagcccccatgcccacacccactctggtgaggcctcttctcaagctggtccacagtccttcacctgaagtcagtgcttcagcccccggagctgcccccttgaccatctcttctcctctccacgtgccatcctccctccctgggccagcctcttctccaatgccaattcccaactcctctccccttgctagtcctgtgtcctctacagtctcagttccattgtcatcttcactccccatctctgtccccaccacacttcctgccccagcctcggctccactcaccatccccatctcagcccccttgactgtttctgcttcgggcccagctctgttgaccagtgtgactccaccattggcacctgttgtcccagcggctcctggacctccctccttggcaccatctggtgcttccccgtcagcatcagccttgactctaggtttggccacagctccatccctgtcttcatctcagacacctggtcaccctctgttgttggctcccacctcttcacatgttccagggttgaactcaaccgtggccccagcatgctcacctgtcctggtgccagcttcggctctggccagtccttttccgtcagcaccaaatccagctccagctcaggcttcccttctggctccagcatcttctgcatctcaggctctagccacccctctggctcctatggcggctccacagacagcaattctggctccttctccagctcctcctctggctcctcttccggtcctggcaccatcgccaggtgctgctcctgtcctggcttcatcacagactccggttccagttatggctccatcgtctactccaggaacctctttagcctcagcttcaccggtaccagctccaacccctgtgttggctccatcatcaactcaaactatgctaccagccccggttccgtcacctctcccgagcccggcttctacgcagacactggccctagccccagctttagcacccactcttggaggctcatctccatctcagacactctctttgggaacggggaacccccagggaccctttccaactcagacattgtcattaactccagcatcatccctggtaccaactccagcccagacactgtctttggcaccaggaccaccactgggtccaactcagacgctgtctctggctccagcaccccctctggctccagcttctccagtgggcccagccccagctcacacgctgactttggctccagcatcgtcatctgcttcactcctggccccagcttcagtgcagacactgaccttgagccctgccccagttcctaccctgggcccggccgcagctcagaccttggcgctggccccagcctccacacagtccccagcttcccaggcatcttcccttgtggtttcggcatctggtgccgctcccttgcctgtcaccatggtatcccggctgcctgtttccaaggatgagcctgacacactgacattgcgctctggtccccccagccctccctccactgctacctcgtttggtggcccccggcctcgacgccagccccccccaccacctcgttcccctttttatctggactccctggaggaaaagcggaagcggcagcggtctgaacgcctggaacggattttccaacttagtgaggctcatggggccctggcacctgtgtatgggactgaagtcctggatttctgtaccctgccccaacctgttgccagccccatcggccctcgttctcctggccccagccaccccaccttttggacttataccgaggctgcccaccgggctgtactgtttccccagcagcgactagaccagctgtcagaaatcattgagaggttcatctttgtcatgcctcctgtggaggcacctcccccttccctgcatgcctgccacccacctccttggctggccccacgtcaggcagccttccaggagcaattggcctctgagctctggccccgggctcgtcctttgcaccgtattgtgtgtaacatgcgcacccagttccctgacttaagactcatccagtatgattgcggaaagttgcagacgttggcagtgctgttgcggcagctcaaggcagagggccaccgagtgctcatcttcacccagatgacccgaatgctggatgtattggagcagtttctcacctaccatggccatctctacctgcgcctggatggatctactagagttgaacagagacaggccttgatggaacggttcaatgcagacaaacgcatattctgcttcatcctttcaactcggagtgggggtgtgggcgtgaacctgacaggagcagacactgttgttttttatgacagcgactggaatcccaccatggatgctcaggcccaggaccgctgtcaccgaattggccagacccgggatgtccacatatataggcttatcagtgaacggacagtggaggagaacatcctaaaaaaggcaaatcagaagagaatgttgggggacatggccattgagggaggcaacttcaccacagcctatttcaaacagcagaccatccgagagctgtttgatatgcccctggaggaaccttctagctcatccgtgccctctgcccctgaagaggaggaagagactgtggccagcaagcagactcatattctggagcaggcattgtgtcgggcagaagatgaagaggatatccgtgcagccacccaggccaaggctgaacaggtggctgagcttgcagaatttaatgagaacgatgggtttcctgctggtgagggagaggaagctggccggcctggggctgaggatgaggagatgtcccgggctgagcaggaaattgctgccctcgtagaacagctgacccccattgagcgctatgccatgaaattcctggaggcctcactggaggaggtgagccgagaggagctcaaacaggcagaagagcaagtggaagctgcccgcaaagacctggaccaagccaaggaggaggtgttccgcctaccccaagaggaggaggaggggccgggggctggggatgagagttcctgtgggactggtggaggcacccaccggcgcagtaaaaaggccaaagcccctgagaggccggggactcgtgtcagtgagcgtcttcgtggagcccgggctgagactcaaggggcaaaccacactcctgtcatatccgcccatcaaactcgcagcaccaccacaccaccccgctgcagtcctgccagggagcgagttcccaggccagcacctaggcctcgacccactccagcttcagctccggctgcaattcctgcccttgttcctgtcccagtttctgccccagtacccatttcagccccaaatccaataaccattctccctgtccatatcttgccttctcctccccctccttcacagattcctccttgttcttctcctgcctgcacccctcctcctgcctgtacccctccaccagctcatacaccgcctccagcccaaacctgtcttgtaactccttcctctcctctcttgcttggtccaccttctgtgcccatctctgcctcagtcactaatctccccttgggcttgaggcctgaggcagagctgtgtgcccaggcattggcatctccagagtccctggagctggcttctgtggccagttcagaaacctcctcactttctcttgtgccccctaaagatctgttgccagttgctgtggagatcctgcctgtgtcagagaagaacctttctctcaccccttctgcacccagcctgaccttggaggctggcagcatccccaatggtcaagagcaggaggcaccagattctgctgaggggaccacccttacagtgctgcctgaaggtgaggagttgcccctgtgtgtgagtgagagcaatggcctggagctcccaccctcagcagcatctgatgagccacttcaggagccactggaggctgacaggacctcggaagagctgacagaggccaagaccccaacctccagcccagagaagccacaggaactcgttacagctgaggttgcagctccatccacctcatcttcagccacttcctcgcctgagggtccttcacctgcccgacctcctcggcgtcgcaccagtgctgatgtggaaattaggggtcaagggactggtcggccaggacaaccaccaggccccaaagtgcttcgaaagctgccaggacggctggtaactgtggtagaggaaaaggaactggtgcggcggcggcggcagcagcggggagctgccagcaccctagtgcctggggtctctgagactagtgccagcccgggaagcccgtctgtccgcagcatgtcagggccagaatcctcccctcccattggtgggccctgtgaagctgctccttcatcctcactgcccactccaccccagcagcccttcattgctcgccgtcacattgagctgggggtgactggtggtggcagccccgagaatggagacggagcactgctcgccatcaccccacctgctgtgaaacgtcggagggggaggccccccaagaagaacaggtctccagcagatgctgggagaggtgtggatgaggcaccctcatccaccttgaagggaaaaaccaatggggctgacccagtccctgggcctgagaccctaattgttgcagatcctgtcctggaaccacagcttattcctgggccccagcctcttggaccccagccagttcacagacccaatcccctcctgtcacctgtggagaaaagaaggcgaggacgaccccctaaagcacgagatttgcccatccctgggaccatttcctctgcaggggatggcaactccgaaagtcggacacagccacccccacacccatcacccctaaccccactcccaccactgctagtttgtcccactgctactgttgccaacactgtcaccactgtcaccatttcaacgtccccacccaaacggaagaggggccgacctcccaagaatcctccatcacctcggcccagccagctccccgtcttggaccgtgacagcacttctgttctcgagagctgtggattggggaggcgacggcaaccccagggccaaggggagagtgagggtagttcctctgatgaggatggaagccgccccctcacccgcctggcccgccttcggcttgaagcagaaggaatgcgaggacggaagagtggagggtccatggtggtggctgtaattcaggatgacctggacttagcagatagcgggccaggcgggttggaattgacaccacctgtggtctcactaaccccaaaactgcgctcgacccggctgcgtccagggtctctagtccccccactagagactgagaagttgcctcgcaaacgagcaggggccccagttggtgggagtcctgggctggcaaagcggggccgcctacagcccccaagtcccctggggcctgagggttcagtagaggagtctgaggctgaagcctcaggtgaggaggaggaaggggatgggaccccacgccgacgtcctggcccccgccggcttgttgggaccaccaaccaaggggaccagcgcatcctgcgcagcagcgcccctccctccctggctggccctgctgttagtcacagaggccgcaaggccaagacgtgagtgggctgcccctccacctaggctttccaccgtggccactccctccatgaccaggcctgactctgttaaccactacttgaagtcttgagggggaaagcctccagggagacataggggccttctcccttcttcccaccaaagtagggggtaggcaactggttgtcatggaaatggggatcatcacagtccccttccccttcaccccacgtggctgggcagtgttaagggtggcaagatagtctctgtccccacccccttgtacttgattccccagctgtctttcacacagccccccacccttaggggaagggggaggggcttctctacaatgaggtttttttcttttttttttttttttaagaagaaaaaataataaacttagtttctgtatgagc

SEQ ID NO: 28407 - DNA, 714 bp, Homo sapiens
  source 1..714: mol_type = unassigned DNA
gcggccgagacggcggcggccattttggtgaggcctcgggagcggcagcggcggttcgctgggagtagcgtctgccctttttcccacccaccgtccgcatctgtgtgctgcgcgaagaggcagtggaggcaaggcggtggcagtagccgcagtctccaggggagtttaaaggccgcgaaggcggtggccaagagggggccctcccccctcctaggcgggagggggggtggtgcgcacgcccccgaggacgcaggtgtgattcccttcagtacggcggcaccgtggaagtgcagactttcacagggggtgtggtctcagctcacacaggtgctccagaggctggtggacctgagcggaggctgggacgccctggtgggccccgggccctggaaggcgggtcccggtggccggtggcccagaatgaggccagctcccagcatgccctgcagccggacgccagcccctcggccagcagtactggtgataacaacccagtcattcttcaggcatccaagggggagcctgggagtgggaccatgcagagcagcccctcccctgctcaccctcagctcccagtcctacagacacagatggtgtcggacggcatgacaggcagcaatcctgtgtcccctgcctcatccagttccccagcctctagtggggcaggcggcatctccccgcagcacatagctcaagattcctcactggatggac

SEQ ID NO: 28408 - DNA, 951 bp, Homo sapiens
  source 1..951: mol_type = unassigned DNA
gggagccggcggcggagtccgggacgtggagacccggggtcccggcagccgggcggcccgcgggcccagggtggggatgcaccgccgcggggtgggagctggcgccatcgccaagaagaaacttgcagaggccaagtataaggagcgagggacggtcttggctgaggaccagctagcccagatgtcaaagcagttggacatgttcaagaccaacctggaggaatttgccagcaaacacaagcaggagatccggaagaatcctgagttccgtgtgcagttccaggacatgtgtgcaaccattggcgtggatccgctggcctctggaaaaggattttggtctgagatgctgggcgtgggggacttctattacgaactaggtgtccaaattatcgaagtgtgcctggcgctgaagcatcggaatggaggtctgataactttggaggaactacatcaacaggtgttgaagggaaggggcaagttcgcccaggatgtcagtcaagatgacctgatcagagccatcaagaaactaaaggcacttggcactggcttcggcatcatccctgtgggcggcacttacctcattcagtctgttccagctgagctcaatatggatcacaccgtggtgctgcagctggcagagaatggctacgtgactgtcagtgagatcaaagccagtcttaaatgggagaccgagcgagcgcggcaagtgctggaacacctgctgaaggaagggttggcgtggctggacttacaggccccaggggaggcccactactggctgccagctctcttcactgacctctactcccaggagattacagctgaggaggccagagaagccctcccctgactgcatgtggaagggcacacagcagcaggcagggaggaggcggaggtggcaaataaacctgggcaattttgtttatacaaaaaatagaaaaaaagttccaa

SEQ ID NO: 28409 - DNA, 2319 bp, Homo sapiens
  source 1..2319: mol_type = unassigned DNA
atttgatgacctccaggcagtggagaggcagtcgaggaagaccagggccccaggcgcctacgtgggtggaatgcacaaggttggccttggctgccggggctccatgtcccagcactagccaaggagggcctcagccgcgcttgaatactcgtgctttcctcgccgcgaggctttgcgaatcttggccactagctaaaggcggggtcgccgggccggtaggaactggagacactcagcctcgcggcaggaaatgcggctcgtggcttccggcgcgtgcagatgacgcgcggctcgggcttccgccttggggagccggcggcggagtccgggacgtggagacccggggtcccggcagccgggcggcccgcgggcccagggtggggatgcaccgccgcggggtgggagctggcgccatcgccaagaagaaacttgcagaggccaagtataaggagcgagggacggtcttggctgaggaccagctagcccagatgtcaaagcagttggacatgttcaagaccaacctggaggaatttgccagcaaacacaagcaggagatccggaagaatcctgagttccgtgtgcagttccaggacatgtgtgcaaccattggcgtggatccgctggcctctggaaaaggattttggtctgagatgctgggcgtgggggacttctattacgaactaggtgtccaaattatcgaagtgtgcctggcgctgaagcatcggaatggaggtctgataactttggaggaactacatcaacaggtgttgaagggaaggggcaagttcgcccaggatgtcagtcaagatgacctgatcagagccatcaagaaactaaaggcacttggcactggcttcggcatcatccctgtgggcggcacttacctcattcagtctgttccagctgagctcaatatggatcacaccgtggtgctgcagctggcagagaagaatggctacgtgactgtcagtgagatcaaagccagtcttaaatgggagaccgagcgagcgcggcaagtgctggaacacctgctgaaggaagggttggcgtggctggacttacaggccccaggggaggcccactactggctgccagctctcttcactgacctctactcccaggagattacagctgaggaggccagagaagccctcccctgactgcatgtggaagggcacacagcagcaggcagggaggaggcggaggtggcaaataaacctgggcaattttgtttatacaaaaaatagaaaaaaagttccaagtttttctttcttccctcattcttttatttttgaaaagtgccttcacgttgcatttttattggaggaaaacctcgctcgttcagtaagcataatctgattaacacagagaacggcaagcacatataaaatgatttttgtaggtcatctgcaagttcatggaagagctgggcctagaatgtgggttgtttcctggcctgtctagtctttgtagctgtgagacatagattacagcctatgctaattcaaaccttttaaataaaatgttccttatctcaaactagctggtcctaatggaccagtaaataatattcactttcagtctcttctggcttcctctgtagaggctctaggttatgacagagttagctgtgagtatgaaggaaatagaagtcaatgtccaatcgtggctaaattggaggaaagaaaacaatggaatctgaggggaatcaaacaatagttagggaatgttctattttcttaaattccctactagctttctcaccctcctgtagtgattgccaggtccctctagcctcagtagtgggaaagggagtcatttactgaacacctaccctgtgccattttacatacagctcacttaaatttcaccaagtaggcagccttcaacatcacaggtgattcaatcaaagtaatttgccaggggccgccagcttcagccgagctaaagctggtgcctaggcctattaacccgagcccatgccttcatgtatcactgcatagtacagaatggcagcacatactgtgtgtagacatttttctacacacgtggtcagccaagagtaaaagcctctgcatcagaaagcaagaatctcctatagcaagtagaagtggtgatgagggaagaggccagagttgtttaaggctcccaaagtccttatggtctaaaggctaagatcctaaaagtgctagtttagtactggaaatctgaaaactcaatggtttttccatactgagacccttcctttagcaggatatagcctgggcccatctcttcctctgcctatccttgtaggacatgctcactccaagctctgga

SEQ ID NO: 28410 - DNA, 3806 bp, Homo sapiens
  source 1..3806: mol_type = unassigned DNA
gagtgggggaggggcgggcggggggcggcggttgggcagcgtcgcttcttaggaggaggaggaagaggaggaaggagggcgagcgaggaggatggcggagtcggggctcctgacggaactctaatgaatcattgattgaccagcactattttaccagttggaatgaatgatcagaaatgggcatagtgcttttagatccaacatgtaacagatggatgttactccatgctgattacttcttcaagccagtacttttttgattgtgtaggatctttgtctcttcatctttgaattcaattactggaaaataaaaggagttcatgtagtttttgtccaggcttgagtcaccatgagtagtagtttaggaaaagaaaaagactctaaagaaaaagatcccaaagtaccatcagccaaggaaagagaaaaggaggcaaaagcctctggaggttttgggaaagagagcaaagaaaaagaacctaagaccaaagggaaagatgccaaagatggaaagaaggactccagtgctgcccaaccaggggtggcattttcagttgacaatacgatcaaacggccaaacccagcacctgggactagaaaaaaatccagcaatgcagaggtgattaaagagctcaacaaatgccgggaagagaattcaatgcgtttggacttatccaagagatctatacacatattgccatcatcaatcaaagagttgactcaattaacagaactttatttatacagtaacaaattgcagtccctcccagcagaggtgggatgtttagtaaatctcatgacactggctctaagtgaaaattcacttaccagtttgcctgactctcttgataacttgaagaagctgcggatgcttgatttacggcataataaactgagagaaattccttcagtggtgtataggctggattctctcaccactctttaccttcgctttaatcgtataactactgtggaaaaggacatcaaaaacttgtcaaaactcagcatgcttagcattcgagagaacaaaattaaacaactacctgctgaaattggaaacctgtccagtttaagtcgtcttggtctgagatataacagactgtcagcaatacccagatcattagcaaaatgcagtgcacttgaagaattaaatttagagaacaataacatttctactttaccagagagtcttttatcaagtcttgtgaaactgaatagtttgaccttagctagaaattgcttccagttgtatccagtgggtggtccatctcagttttctaccatctattccctcaacatggaacacaatcgaatcaacaaaattccatttggaattttctccagagcaaaagtattaagtaagctgaatatgaaggacaatcagttaacatcacttcccttggattttggaacttggaccagtatggtagaattgaatttagccactaatcagctcacaaagatccctgaggatgtgtctggtctcgtttctcttgaggttcttatcttatcaaacaatcttctaaagaagcttccccatggtcttggaaaccttaggaagttaagagagttggatctagaagagaacaaattggaatccttgccaaatgaaattgcatatcttaaggatttacagaaattagtcttgacaaacaaccagttgaccactcttcccagaggcattggtcaccttactaatctcacacatctgggccttggagagaacctacttactcaccttcctgaagaaattggtacactggagaacctagaagaactgtatttgaatgacaaccccaacctgcatagccttccctttgagctggcactctgcagcaagctttcaatcatgagtattgagaactgtccactcagtcaccttccacctcagattgttgctggggggccttctttcatcattcagttcttaaagatgcagggtccatatcgtgccatggtctgatataaatctgctggtcccacacactgttcaaaaatagactgccattaatgtttcttatctatatctgtatctatttatgtagatattggtatatggcagatttataaaaattgcattatgtgtttctgctaatagaggaatcatagccatttagaattttttttaaattctgtacaaaaggcttatataagttttctttgctgaatttgatggatgtttttctgttgtgtaatctgatatgccagtttgcttaaaacatttgccaacacattatgaagttattaaatttaagggacagaggtagtatagttagatatactttctcttaggaaaaataatgggcaaaaatttttgttgcaacttttcatatatattttccccttaccaattgttttatccttatagtattgtaggccctgaaagtagaatttttctttaacttattttgagatttgagatttaaattttatgtattgtttacagtcagagtaaatcactggatttcttttgtttgttttgatttgctctgttttattcagtcaaatctagagtttgaatcctctgctaaagaatttgcatccactggtgtaaacagtgaaaggtatttgcttgttgaaaaaaaaaactggcaaagtgaaaagatacagtcaaaaatctagaatttctttaattttgcttctctgacgagttgtgaagcaaaatacctgaagtgagtctttgggtaggggaagggtattgagaccttttctagtatgaatattttttaagtttgggggaagagaaacttgcagtgaaaaggagttttttcattcctgaaagttgcagatccacaaaactaacaggataattgggcaaataaattacatataaacacacacaatctatatatgtatatacaatgctatatagatatgtatttattatatcataaactacagtaggtaactttaaggatttcttcctatccttgtacaatgacatgaatgtctttctttgaaaactgcaatgtatgtatgtttcaaggttatttaacagtgtactatggttttatatcttgacttgccttgtacatctttcaattctggaatatctgtgtctaagcacaatatcttcacactgtgctgtattgctgctgaactaaatgcacttttccccacatatggggcactggcttcaaacaattcagttcagtatcattacttttaatctcatctttcctttcttggtagttgttaatacagttatggaaaagaggcacattgcatagaagccattggggagttcagtggaagttctgtaagatgtgcatgtactatttgatgcgttttctttgcttcactgcttttaatacttagcagtattgttggtctaagtcaatttgattattgaggagtctcagagcaaggtgcgttctagatgtcatcctaaaaaacacttcatatataattaatcactattttgtataattacatattgctgcttgtgtgtttttttttttttccatttagttgggcgttgtgttttacacaaaaccatttttgaattaaggctatgatattaagatagaaatttggactgttgttctgcttttcctggcactcaaattcatgactagttttgaggtcaaacctatgttcgtaatgagagattttataaggatcaactaagaaatggaaggcaggtgaagatataaaaccctagaatgcttaaatgtgctgtaaaactattgtagatgtcactggattttaccaagtaatatcctttcttttttttttccccccatctgctgtggcttttcagttaaaattttgtttataaaaggaatttgtttattacagctctacct

SEQ ID NO: 28411 - DNA, 3943 bp, Homo sapiens
  source 1..3943: mol_type = unassigned DNA
gggggaggggcgggcggggggcggcggttgggcagcgtcgcttcttaggaggaggaggaagaggaggaaggagggcgagcgaggaggatggcggagtcggggctcctgacggaactctaatgaatcattgattgaccagcactattttaccagttggaatgaatgatcagaaatgggcatagtgcttttagatccaacatgtaacagatggatgttactccatgctgattacttcttcaagccagtacttttttgattgtgtaggatctttgtctcttcatctttgaattcaattactggaaaataaaaggagttcatgtagtttttgtccaggcttgagtcaccatgagtagtagtttaggaaaagaaaaagactctaaagaaaaagatcccaaagtaccatcagccaaggaaagagaaaaggaggcaaaagcctctggaggttttgggaaagagagcaaagaaaaagaacctaagaccaaagggaaagatgccaaagatggaaagaaggactccagtgctgcccaaccaggggtggcattttcagttgacaatacgatcaaacggccaaacccagcacctgggactagaaaaaaatccagcaatgcagaggtgattaaagagctcaacaaatgccgggaagagaattcaatgcgtttggacttatccaagagatctatacacatattgccatcatcaatcaaagagttgactcaattaacagaactttatttatacagtaacaaattgcagtccctcccagcagaggtgggatgtttagtaaatctcatgacactggctctaagtgaaaattcacttaccagtttgcctgactctcttgataacttgaagaagctgcggatgcttgatttacggcataataaactgagagaaattccttcagtggtgtataggctggattctctcaccactctttaccttcgctttaatcgtataactactgtggaaaaggacatcaaaaacttgtcaaaactcagcatgcttagcattcgagagaacaaaattaaacaactacctgctgaaattggtgaattatgtaacctcattacgctggatgtagctcacaatcaacttgaacaccttccaaaggagattggaaactgtacacagataaccaaccttgacttgcagcacaatgaactgctagacctcccagatactataggaaacctgtccagtttaagtcgtcttggtctgagatataacagactgtcagcaatacccagatcattagcaaaatgcagtgcacttgaagaattaaatttagagaacaataacatttctactttaccagagagtcttttatcaagtcttgtgaaactgaatagtttgaccttagctagaaattgcttccagttgtatccagtgggtggtccatctcagttttctaccatctattccctcaacatggaacacaatcgaatcaacaaaattccatttggaattttctccagagcaaaagtattaagtaagctgaatatgaaggacaatcagttaacatcacttcccttggattttggaacttggaccagtatggtagaattgaatttagccactaatcagctcacaaagatccctgaggatgtgtctggtctcgtttctcttgaggttcttatcttatcaaacaatcttctaaagaagcttccccatggtcttggaaaccttaggaagttaagagagttggatctagaagagaacaaattggaatccttgccaaatgaaattgcatatcttaaggatttacagaaattagtcttgacaaacaaccagttgaccactcttcccagaggcattggtcaccttactaatctcacacatctgggccttggagagaacctacttactcaccttcctgaagaaattggtacactggagaacctagaagaactgtatttgaatgacaaccccaacctgcatagccttccctttgagctggcactctgcagcaagctttcaatcatgagtattgagaactgtccactcagtcaccttccacctcagattgttgctggggggccttctttcatcattcagttcttaaagatgcagggtccatatcgtgccatggtctgatataaatctgctggtcccacacactgttcaaaaatagactgccattaatgtttcttatctatatctgtatctatttatgtagatattggtatatggcagatttataaaaattgcattatgtgtttctgctaatagaggaatcatagccatttagaattttttttaaattctgtacaaaaggcttatataagttttctttgctgaatttgatggatgtttttctgttgtgtaatctgatatgccagtttgcttaaaacatttgccaacacattatgaagttattaaatttaagggacagaggtagtatagttagatatactttctcttaggaaaaataatgggcaaaaatttttgttgcaacttttcatatatattttccccttaccaattgttttatccttatagtattgtaggccctgaaagtagaatttttctttaacttattttgagatttgagatttaaattttatgtattgtttacagtcagagtaaatcactggatttcttttgtttgttttgatttgctctgttttattcagtcaaatctagagtttgaatcctctgctaaagaatttgcatccactggtgtaaacagtgaaaggtatttgcttgttgaaaaaaaaaactggcaaagtgaaaagatacagtcaaaaatctagaatttctttaattttgcttctctgacgagttgtgaagcaaaatacctgaagtgagtctttgggtaggggaagggtattgagaccttttctagtatgaatattttttaagtttgggggaagagaaacttgcagtgaaaaggagttttttcattcctgaaagttgcagatccacaaaactaacaggataattgggcaaataaattacatataaacacacacaatctatatatgtatatacaatgctatatagatatgtatttattatatcataaactacagtaggtaactttaaggatttcttcctatccttgtacaatgacatgaatgtctttctttgaaaactgcaatgtatgtatgtttcaaggttatttaacagtgtactatggttttatatcttgacttgccttgtacatctttcaattctggaatatctgtgtctaagcacaatatcttcacactgtgctgtattgctgctgaactaaatgcacttttccccacatatggggcactggcttcaaacaattcagttcagtatcattacttttaatctcatctttcctttcttggtagttgttaatacagttatggaaaagaggcacattgcatagaagccattggggagttcagtggaagttctgtaagatgtgcatgtactatttgatgcgttttctttgcttcactgcttttaatacttagcagtattgttggtctaagtcaatttgattattgaggagtctcagagcaaggtgcgttctagatgtcatcctaaaaaacacttcatatataattaatcactattttgtataattacatattgctgcttgtgtgtttttttttttttccatttagttgggcgttgtgttttacacaaaaccatttttgaattaaggctatgatattaagatagaaatttggactgttgttctgcttttcctggcactcaaattcatgactagttttgaggtcaaacctatgttcgtaatgagagattttataaggatcaactaagaaatggaaggcaggtgaagatataaaaccctagaatgcttaaatgtgctgtaaaactattgtagatgtcactggattttaccaagtaatatcctttcttttttttttccccccatctgctgtggcttttcagttaaaattttgtttataaaaggaatttgtttattacagctctacctaga

SEQ ID NO: 28412 - DNA, 2967 bp, Homo sapiens
  source 1..2967: mol_type = unassigned DNA
cttgataacttgaagaagctgcggatgcttgatttacggcataataaactgagagaaattccttcagtggtgtataggctggattctctcaccactctttaccttcgctttaatcgtataactactgtggaaaaggacatcaaaaacttgtcaaaactcagcatgcttagcattcgagagaacaaaattaaacaactacctgctgaaattggaaacctgtccagtttaagtcgtcttggtctgagatataacagactgtcagcaatacccagatcattagcaaaatgcagtgcacttgaagaattaaatttagagaacaataacatttctactttaccagagagtcttttatcaagtcttgtgaaactgaatagtttgaccttagctagaaattgcttccagttgtatccagtgggtggtccatctcagttttctaccatctattccctcaacatggaacacaatcgaatcaacaaaattccatttggaattttctccagagcaaaagtattaagtaagctgaatatgaaggacaatcagttaacatcacttcccttggattttggaacttggaccagtatggtagaattgaatttagccactaatcagctcacaaagatccctgaggatgtgtctggtctcgtttctcttgaggttcttatcttatcaaacaatcttctaaagaagcttccccatggtcttggaaaccttaggaagttaagagagttggatctagaagagaacaaattggaatccttgccaaatgaaattgcatatcttaaggatttacagaaattagtcttgacaaacaaccagttgaccactcttcccagaggcattggtcaccttactaatctcacacatctgggccttggagagaacctacttactcaccttcctgaagaaattggtacactggagaacctagaagaactgtatttgaatgacaaccccaacctgcatagccttccctttgagctggcactctgcagcaagctttcaatcatgagtattgagaactgtccactcagtcaccttccacctcagattgttgctggggggccttctttcatcattcagttcttaaagatgcagggtccatatcgtgccatggtctgatataaatctgctggtcccacacactgttcaaaaatagactgccattaatgtttcttatctatatctgtatctatttatgtagatattggtatatggcagatttataaaaattgcattatgtgtttctgctaatagaggaatcatagccatttagaattttttttaaattctgtacaaaaggcttatataagttttctttgctgaatttgatggatgtttttctgttgtgtaatctgatatgccagtttgcttaaaacatttgccaacacattatgaagttattaaatttaagggacagaggtagtatagttagatatactttctcttaggaaaaataatgggcaaaaatttttgttgcaacttttcatatatattttccccttaccaattgttttatccttatagtattgtaggccctgaaagtagaatttttctttaacttattttgagatttgagatttaaattttatgtattgtttacagtcagagtaaatcactggatttcttttgtttgttttgatttgctctgttttattcagtcaaatctagagtttgaatcctctgctaaagaatttgcatccactggtgtaaacagtgaaaggtatttgcttgttgaaaaaaaaaactggcaaagtgaaaagatacagtcaaaaatctagaatttctttaattttgcttctctgacgagttgtgaagcaaaatacctgaagtgagtctttgggtaggggaagggtattgagaccttttctagtatgaatattttttaagtttgggggaagagaaacttgcagtgaaaaggagttttttcattcctgaaagttgcagatccacaaaactaacaggataattgggcaaataaattacatataaacacacacaatctatatatgtatatacaatgctatatagatatgtatttattatatcataaactacagtaggtaactttaaggatttcttcctatccttgtacaatgacatgaatgtctttctttgaaaactgcaatgtatgtatgtttcaaggttatttaacagtgtactatggttttatatcttgacttgccttgtacatctttcaattctggaatatctgtgtctaagcacaatatcttcacactgtgctgtattgctgctgaactaaatgcacttttccccacatatggggcactggcttcaaacaattcagttcagtatcattacttttaatctcatctttcctttcttggtagttgttaatacagttatggaaaagaggcacattgcatagaagccattggggagttcagtggaagttctgtaagatgtgcatgtactatttgatgcgttttctttgcttcactgcttttaatacttagcagtattgttggtctaagtcaatttgattattgaggagtctcagagcaaggtgcgttctagatgtcatcctaaaaaacacttcatatataattaatcactattttgtataattacatattgctgcttgtgtgtttttttttttttccatttagttgggcgttgtgttttacacaaaaccatttttgaattaaggctatgatattaagatagaaatttggactgttgttctgcttttcctggcactcaaattcatgactagttttgaggtcaaacctatgttcgtaatgagagattttataaggatcaactaagaaatggaaggcaggtgaagatataaaaccctagaatgcttaaatgtgctgtaaaactattgtagatgtcactggattttaccaagtaatatcctttcttttttttttccccccatctgctgtggcttttcagttaaaattttgtttataaaaggaatttgtttattacagctctacctag

SEQ ID NO: 28413 - DNA, 869 bp, Homo sapiens
  source 1..869: mol_type = unassigned DNA
ctcttgctacggtggcctggaggagtggcgaaaccggaacagagaatttatcacttctgggactcacagtcgtgatgtctttcaagagggaaggagacgattggagtcaactcaatgtgctcaaagtaagcgtgagcggagaggatctggagccgcttcagtcgctccctgaagaaaagaagagtcggggacctcctagccagttacattccagaggatgaggcgctgatgcttcgggatggacgctttgcttgtgccatctgcccccatcgaccggtactggacaccctggccatgctgactgcccaccgtgcaggcaagaaacatctgtccagcttgcagcttttctatggcaagaagcagccgggaaaggaaagaaagcagaatccaaaacatcagaatgaattgagaagggaagaaaccaaagctgaggctcctctgctaactcagacacgacttatcacccagagtgctctgcacagagctccccactataacagttgctgccgccggaagtacagaccagaagcccctggtccctctgtctccctttcccctatgccaccctcagaggtcaaactccaaagtgggaagatcagtagggaacctgaacctgcggctggcccacaggccgaggagtcagcaactgtctcagcccctgcacccatgagccccacaagaagacgagccctggaccattatctcacccttcgaagctctggatggatcccagatggacgaggtcgatgggtaaaagatgaaaatgttgagtttgactctgatgaggaggaaccacctgatctccccttggactgatacccttttcccattcattcacaaataaattacaatgggtgctgagaacttaa

SEQ ID NO: 28414 - DNA, 2016 bp, Homo sapiens
  source 1..2016: mol_type = unassigned DNA
acaggaagagaaggaaaaaagagaaggcgctgtcccgctcttgctacggtggcctggaggagtggcgaaaccggaacagagaatttatcacttctgggactcacagtcgtgatgtctttcaagagggaaggagacgattggagtcaactcaatgtgctcaaaaaaagaagagtcggggacctcctagccagttacattccagaggatgaggcgctgatgcttcgggatggacgctttgcttgtgccatctgcccccatcgaccggtactggacaccctggccatgctgactgcccaccgtgcaggcaagaaacatctgtccagcttgcagcttttctatggcaagaagcagccgggaaaggaaagaaagcagaatccaaaacatcagaatgaattgagaagggaagaaaccaaagctgaggctcctctgctaactcagacacgacttatcacccagagtgctctgcacagagctccccactataacagttgctgccgccggaagtacagaccagaagcccctggtccctctgtctccctttcccctatgccaccctcagaggtcaaactccaaagtgggaagatcagtagggaacctgaacctgcggctggcccacaggccgaggagtcagcaactgtctcagcccctgcacccatgagccccacaagaagacgagccctggaccattatctcacccttcgaagctctggatggatcccagatggacgaggtcgatgggtaaaagatgaaaatgttgagtttgactctgatgaggaggaaccacctgatctccccttggactgatacccttttcccattcattcacaaataaattacaatgggtgctgagaacttaactttccttaagtctggttccttgttggatctcaggatttcagatctgttcattctcattccaactactccttgcctgcaaggtacacagctctccacactccttttttttttttttttttttttgaggcagagtctcgctctatcgcccaggctggagtgcagtggcacgatctcggctcactgcaagctctgcctcccaggttcacgcctttctcctgcctcagcctcctgagtagctgggactacaggcgcccgccaccatgcccagctaattttttgtatttttagtagagacggggtttcactgtgttagccaggatggtctcgatctcctgacctcgtgatccgcccacctcggcctcccaaagtgctgggattacaggcatgagccaccgcacccagccacggctatccatacttctaacccctcccccacctcctaccaaagccatgccaagcgtcagctgcatcagcctggtgccctattaataagactgtcaaaaagaggtctttgcccttcatgttgtctgcctgcttctccactaccactcaaagtcctttcccccttcaaatcacataaggactgcaggtaggcactagggggacctggccacatctggaaacagggctgtggctaagttccctgtgaaagtagaagagtcaaaaggcattggcagggttatggggaacaccaagggagggaacacccccacctcctcctagtaacctgaacctccctgcctgctgatccccagagtataaataatcccctggtgaactggcagtaacccttgggggttagcgccaagattctcaccccaaagcccaaggaaggaggcaggcaaaatggatagaagggcttttatttacaggaaaggaggacagatgaggatttaagtgtccagtgctcccagcgctagttggtaaagggaaatgcagtgttatctcttcttttgctggcgacctgtaaaggagcaatattaaacataagtgtttgttccagctcctgctttctgcaaaggcactcttctcctttccagtcccttagccaaactcataaattggtagtgtcttaggccaccttacaggcccatcccacattaacaaaacaaaacaagaaaccacaccacaaataaaattacgatacctctaaacaag

SEQ ID NO: 28415 - DNA, 3135 bp, Homo sapiens
  source 1..3135: mol_type = unassigned DNA
ccggccagcgggcgggctccccagccaggccgctgcacctgtcaggggaacaagctggaggagcaggaccctagacctctgcagcccataccaggtctcatggaggggaacaagctggaggagcaggactctagccctccacagtccactccagggctcatgaaggggaacaagcgtgaggagcaggggctgggccccgaacctgcggcgccccagcagcccacggcggaggaggaggccctgatcgagttccaccgctcctaccgagagctcttcgagttcttctgcaacaacaccaccatccacggcgccatccgcctggtgtgctcccagcacaaccgcatgaagacggccttctgggcagtgctgtggctctgcacctttggcatgatgtactggcaattcggcctgcttttcggagagtacttcagctaccccgtcagcctcaacatcaacctcaactcggacaagctcgtcttccccgcagtgaccatctgcaccctcaatccctacaggtacccggaaattaaagaggagctggaggagctggaccgcatcacagagcagacgctctttgacctgtacaaatacagctccttcaccactctcgtggccggctcccgcagccgtcgcgacctgcgggggactctgccgcaccccttgcagcgcctgagggtcccgcccccgcctcacggggcccgtcgagcccgtagcgtggcctccagcttgcgggacaacaacccccaggtggactggaaggactggaagatcggcttccagctgtgcaaccagaacaaatcggactgcttctaccagacatactcatcaggggtggatgcggtgagggagtggtaccgcttccactacatcaacatcctgtcgaggctgccagagactctgccatccctggaggaggacacgctgggcaacttcatcttcgcctgccgcttcaaccaggtctcctgcaaccaggcgaattactctcacttccaccacccgatgtatggaaactgctatactttcaatgacaagaacaactccaacctctggatgtcttccatgcctggaatcaacaacggtctgtccctgatgctgcgcgcagagcagaatgacttcattcccctgctgtccacagtgactggggcccgggtaatggtgcacgggcaggatgaacctgcctttatggatgatggtggctttaacttgcggcctggcgtggagacctccatcagcatgaggaaggaaaccctggacagacttgggggcgattatggcgactgcaccaagaatggcagtgatgttcctgttgagaacctttacccttcaaagtacacacagcaggtgtgtattcactcctgcttccaggagagcatgatcaaggagtgtggctgtgcctacatcttctatccgcggccccagaacgtggagtactgtgactacagaaagcacagttcctgggggtactgctactataagctccaggttgacttctcctcagaccacctgggctgtttcaccaagtgccggaagccatgcagcgtgaccagctaccagctctctgctggttactcacgatggccctcggtgacatcccaggaatgggtcttccagatgctatcgcgacagaacaattacaccgtcaacaacaagagaaatggagtggccaaagtcaacatcttcttcaaggagctgaactacaaaaccaattctgagtctccctctgtcacgatggtcaccctcctgtccaacctgggcagccagtggagcctgtggttcggctcctcggtgttgtctgtggtggagatggctgagctcgtctttgacctgctggtcatcatgttcctcatgctgctccgaaggttccgaagccgatactggtctccaggccgagggggcaggggtgctcaggaggtagcctccaccctggcatcctcccctccttcccacttctgcccccaccccatgtctctgtccttgtcccagccaggccctgctccctctccagccttgacagcccctccccctgcctatgccaccctgggcccccgcccatctccagggggctctgcaggggccagttcctccacctgtcctctgggggggccctgagagggaaggagaggtttctcacaccaaggcagatgctcctctggtgggagggtgctggccctggcaagattgaaggatgtgcagggcttcctctcagagccgcccaaactgccgttgatgtgtggaggggaagcaagatgggtaagggctcaggaagttgctccaagaacagtagctgatgaagctgcccagaagtgccttggctccagccctgtaccccttggtactgcctctgaacactctggtttccccacccaactgcggctaagtctctttttcccttggatcagccaagcgaaacttggagctttgacaaggaactttcctaagaaaccgctgataaccaggacaaaacacaaccaagggtacacgcaggcatgcacgggtttcctgcccagcgacggcttaagccagcccccgactggcctggccacactgctctccagtagcacagatgtctgctcctcctcttgaacttgggtgggaaaccccacccaaaagccccctttgttacttaggcaattccccttccctgactcccgagggctagggctagagcagacccgggtaagtaaaggcagacccagggctcctctagcctcatacccgtgccctcacagagccatgccccggcacctctgccctgtgtctttcatacctctacatgtctgcttgagatatttcctcagcctgaaagtttccccaaccatctgccagagaactcctatgcatcccttagaaccctgctcagacaccattacttttgtgaacgcttctgccacatcttgtcttccccaaaattgatcactccgccttctcctgggctcccgtagcacactataacatctgctggagtgttgctgttgcaccatactttcttgtacatttgtgtctcccttcccaactagactgtaagtgccttgcggtcagggactgaatcttgcccgtttatgtatgctccatgtctagcccatcatcctgcttggagcaagtaggcaggagctcaataaatgtttgttgcatgaa

SEQ ID NO: 28416 - DNA, 3545 bp, Homo sapiens
  source 1..3545: mol_type = unassigned DNA
aaacagaaggcagatagagagggagtgagaggcaggagctgagacacagatcctggaggaagaagaccaaaggaagggggcagagacagaaagggaggtgctaggacaaaactcgaaaggtggccctatcagggaagcagaggagaggccgttctagggaagcccagctccggcacttttggccccaactcccgcaggtctgctggctccaggaaaggtggaggagggagggaggagtgggagaatgtgggcgcagggtgggacatgggcatggccaggggcagcctcactcgggttccaggggtgatgggagagggcactcagggcccagagctcagccttgaccctgacccttgctctccccaatccactccggggctcatgaaggggaacaagctggaggagcaggaccctagacctctgcagcccataccaggtctcatggaggggaacaagctggaggagcaggactctagccctccacagtccactccagggctcatgaaggggaacaagcgtgaggagcaggggctgggccccgaacctgcggcgccccagcagcccacggcggaggaggaggccctgatcgagttccaccgctcctaccgagagctcttcgagttcttctgcaacaacaccaccatccacggcgccatccgcctggtgtgctcccagcacaaccgcatgaagacggccttctgggcagtgctgtggctctgcacctttggcatgatgtactggcaattcggcctgcttttcggagagtacttcagctaccccgtcagcctcaacatcaacctcaactcggacaagctcgtcttccccgcagtgaccatctgcaccctcaatccctacaggtacccggaaattaaagaggagctggaggagctggaccgcatcacagagcagacgctctttgacctgtacaaatacagctccttcaccactctcgtggccggctcccgcagccgtcgcgacctgcgggggactctgccgcaccccttgcagcgcctgagggtcccgcccccgcctcacggggcccgtcgagcccgtagcgtggcctccagcttgcgggacaacaacccccaggtggactggaaggactggaagatcggcttccagctgtgcaaccagaacaaatcggactgcttctaccagacatactcatcaggggtggatgcggtgagggagtggtaccgcttccactacatcaacatcctgtcgaggctgccagagactctgccatccctggaggaggacacgctgggcaacttcatcttcgcctgccgcttcaaccaggtctcctgcaaccaggcgaattactctcacttccaccacccgatgtatggaaactgctatactttcaatgacaagaacaactccaacctctggatgtcttccatgcctggaatcaacaacggtctgtccctgatgctgcgcgcagagcagaatgacttcattcccctgctgtccacagtgactggggcccgggtaatggtgcacgggcaggatgaacctgcctttatggatgatggtggctttaacttgcggcctggcgtggagacctccatcagcatgaggaaggaaaccctggacagacttgggggcgattatggcgactgcaccaagaatggcagtgatgttcctgttgagaacctttacccttcaaagtacacacagcaggtgtgtattcactcctgcttccaggagagcatgatcaaggagtgtggctgtgcctacatcttctatccgcggccccagaacgtggagtactgtgactacagaaagcacagttcctggggccaggtgcggtcgctcacacctgtaatcccagcactttgggaggccgaggcgggcagatcacgagggtactgctactataagctccaggttgacttctcctcagaccacctgggctgtttcaccaagtgccggaagccatgcagcgtgaccagctaccagctctctgctggttactcacgatggccctcggtgacatcccaggaatgggtcttccagatgctatcgcgacagaacaattacaccgtcaacaacaagagaaatggagtggccaaagtcaacatcttcttcaaggagctgaactacaaaaccaattctgagtctccctctgtcacgatggtcaccctcctgtccaacctgggcagccagtggagcctgtggttcggctcctcggtgttgtctgtggtggagatggctgagctcgtctttgacctgctggtcatcatgttcctcatgctgctccgaaggttccgaagccgatactggtctccaggccgagggggcaggggtgctcaggaggtagcctccaccctggcatcctcccctccttcccacttctgcccccaccccatgtctctgtccttgtcccagccaggccctgctccctctccagccttgacagcccctccccctgcctatgccaccctgggcccccgcccatctccagggggctctgcaggggccagttcctccacctgtcctctgggggggccctgagagggaaggagaggtttctcacaccaaggcagatgctcctctggtgggagggtgctggccctggcaagattgaaggatgtgcagggcttcctctcagagccgcccaaactgccgttgatgtgtggaggggaagcaagatgggtaagggctcaggaagttgctccaagaacagtagctgatgaagctgcccagaagtgccttggctccagccctgtaccccttggtactgcctctgaacactctggtttccccacccaactgcggctaagtctctttttcccttggatcagccaagcgaaacttggagctttgacaaggaactttcctaagaaaccgctgataaccaggacaaaacacaaccaagggtacacgcaggcatgcacgggtttcctgcccagcgacggcttaagccagcccccgactggcctggccacactgctctccagtagcacagatgtctgctcctcctcttgaacttgggtgggaaaccccacccaaaagccccctttgttacttaggcaattccccttccctgactcccgagggctagggctagagcagacccgggtaagtaaaggcagacccagggctcctctagcctcatacccgtgccctcacagagccatgccccggcacctctgccctgtgtctttcatacctctacatgtctgcttgagatatttcctcagcctgaaagtttccccaaccatctgccagagaactcctatgcatcccttagaaccctgctcagacaccattacttttgtgaacgcttctgccacatcttgtcttccccaaaattgatcactccgccttctcctgggctcccgtagcacactataacatctgctggagtgttgctgttgcaccatactttcttgtacatttgtgtctcccttcccaactagactgtaagtgccttgcggtcagggactgaatcttgcccgtttatgtatgctccatgtctagcccatcatcctgcttggagcaagtaggcaggagctcaataaatgtttgttgcatgaagg

SEQ ID NO: 28417 - DNA, 2556 bp, Homo sapiens
  source 1..2556: mol_type = unassigned DNA
atgctgctgcatataaacccagcttatttatttaaactgctgcatggattcccgccgtggataatgcctaccgatgggaatttaggtgacaaaaattttcagatggggaaaccagggcacagagagggtgccactatgcacgtgaagaagtacctgctgaagggcctgcatcggctgcagaagggccccggctacacgtacaaggagctgctggtgtggtactgcgacaacaccaacacccacggccccaagcgcatcatctgtgaggggcccaagaagaaagccatgtggttcctgctcaccctgctcttcgccgccctcgtctgctggcagtggggcatcttcatcaggacctacttgagctgggaggtcagcgtctccctctccgtaggcttcaagaccatggacttccctgccgtcaccatctgcaatgctagccccttcaagtattccaaaatcaagcatttgctgaaggacctggatgagctgatggaagctgtcctggagagaatcctggctcctgagctaagccatgccaatgccaccaggaacctgaacttctccatctggaaccacacacccctggtccttattgatgaacggaacccccaccaccccatggtccttgatctctttggagacaaccacaatggcttaacaagcagctcagcatcagaaaagatctgtaatgcccacgggtgcaaaatggccatgagactatgtagcctcaacaggacccagtgtaccttccggaacttcaccagtgctacccaggcattgacagagtggtacatcctgcaggccaccaacatctttgcacaggtgccacagcaggagctagtagagatgagctaccccggcgagcagatgatcctggcctgcctattcggagctgagccctgcaactaccggaacttcacgtccatcttctaccctcactatggcaactgttacatcttcaactggggcatgacagagaaggcacttccttcggccaaccctggaactgaattcggcctgaagttgatcctggacataggccaggaagactacgtccccttccttgcgtccacggccggggtcaggctgatgcttcacgagcagaggtcataccccttcatcagagatgagggcatctacgccatgtcggggacagagacgtccatcggggtactcgtggacaagcttcagcgcatgggggagccctacagcccgtgcaccgtgaatggttctgaggtccccgtccaaaacttctacagtgactacaacacgacctactccatccaggcctgtcttcgctcctgcttccaagaccacatgatccgtaactgcaactgtggccactacctgtacccactgccccgtggggagaaatactgcaacaaccgggacttcccagactgggcccattgctactcagatctacagatgagcgtggcgcagagagagacctgcattggcatgtgcaaggagtcctgcaatgacacccagtacaagatgaccatctccatggctgactggccttctgaggcctccgaggactggattttccacgtcttgtctcaggagcgggaccaaagcaccaatatcaccctgagcaggaagggaattgtcaagctcaacatctacttccaagaatttaactatcgcaccattgaagaatcagcagccaataacatcgtctggctgctctcgaatctgggtggccagtttggcttctggatggggggctctgtgctgtgcctcatcgagtttggggagatcatcatcgactttgtgtggatcaccatcatcaagctggtggccttggccaagagcctacggcagcggcgagcccaagccagctacgctggcccaccgcccaccgtggccgagctggtggaggcccacaccaactttggcttccagcctgacacggccccccgcagccccaacactgggccctaccccagtgagcaggccctgcccatcccaggcaccccgccccccaactatgactccctgcgtctgcagccgctggacgtcatcgagtctgacagtgagggtgatgccatctaaccctgcccctgcccaccccgggcggctgaaactcactgagcagccaagactgttgcccgaggcctcactgtatggtgccctctccaaagggtcgggagggtagctctccaggccagagcttgtgtccttcaacagagaggccagcggcaactggtccgttactggccaagggctctgtagaatcacggtgctggtacaggatgcaggaataaattgtatcttcacctggttcctaccctcgtccctacctgtcctgatcctggtcctgaagacccctcggaacaccctctcctggtggcaggccacttccctcccagtgccagtctccatccaccccagagaggaacaggcgggtgggccatgtggttttctccttcctggccttggctggcctctggggcaggggtggtggagagatggaagggcatcaggtgtagggaccctgccaagtggcacctgatttactctagaaaataaaagtagaaaatactgagtcca

SEQ ID NO: 28418 - DNA, 2597 bp, Homo sapiens
  source 1..2597: mol_type = unassigned DNA
gtgcttccccgcccctgaacctgctccctcccagtcggtctcgccgcgctcgccgggtgtcccagtgtcaccaacactcggccgccgccgccagcttggcgcgcaccgccgcctccgccaccgccgacagcgcgcatcctccgtgtccccgctccgccgcccgagcaggtgccactatgcacgtgaagaagtacctgctgaagggcctgcatcggctgcagaagggccccggctacacgtacaaggagctgctggtgtggtactgcgacaacaccaacacccacggccccaagcgcatcatctgtgaggggcccaagaagaaagccatgtggttcctgctcaccctgctcttcgccgccctcgtctgctggcagtggggcatcttcatcaggacctacttgagctgggaggtcagcgtctccctctccgtaggcttcaagaccatggacttccctgccgtcaccatctgcaatgctagccccttcaagtattccaaaatcaagcatttgctgaaggacctggatgagctgatggaagctgtcctggagagaatcctggctcctgagctaagccatgccaatgccaccaggaacctgaacttctccatctggaaccacacacccctggtccttattgatgaacggaacccccaccaccccatggtccttgatctctttggagacaaccacaatggcttaacaagcagctcagcatcagaaaagatctgtaatgcccacgggtgcaaaatggccatgagactatgtagcctcaacaggacccagtgtaccttccggaacttcaccagtgctacccaggcattgacagagtggtacatcctgcaggccaccaacatctttgcacaggtgccacagcaggagctagtagagatgagctaccccggcgagcagatgatcctggcctgcctattcggagctgagccctgcaactaccggaacttcacgtccatcttctaccctcactatggcaactgttacatcttcaactggggcatgacagagaaggcacttccttcggccaaccctggaactgaattcggcctgaagttgatcctggacataggccaggaagactacgtccccttccttgcgtccacggccggggtcaggctgatgcttcacgagcagaggtcataccccttcatcagagatgagggcatctacgccatgtcggggacagagacgtccatcggggtactcgtggacaagcttcagcgcatgggggagccctacagcccgtgcaccgtgaatggttctgaggtccccgtccaaaacttctacagtgactacaacacgacctactccatccaggcctgtcttcgctcctgcttccaagaccacatgatccgtaactgcaactgtggccactacctgtacccactgccccgtggggagaaatactgcaacaaccgggacttcccagactgggcccattgctactcagatctacagatgagcgtggcgcagagagagacctgcattggcatgtgcaaggagtcctgcaatgacacccagtacaagatgaccatctccatggctgactggccttctgaggcctccgaggactggattttccacgtcttgtctcaggagcgggaccaaagcaccaatatcaccctgagcaggaagggaattgtcaagctcaacatctacttccaagaatttaactatcgcaccattgaagaatcagcagccaataacatcgtctggctgctctcgaatctgggtggccagtttggcttctggatggggggctctgtgctgtgcctcatcgagtttggggagatcatcatcgactttgtgtggatcaccatcatcaagctggtggccttggccaagagcctacggcagcggcgagcccaagccagctacgctggcccaccgcccaccgtggccgagctggtggaggcccacaccaactttggcttccagcctgacacggccccccgcagccccaacactgggccctaccccagtgagcaggccctgcccatcccaggcaccccgccccccaactatgactccctgcgtctgcagccgctggacgtcatcgagtctgacagtgagggtgatgccatctaaccctgcccctgcccaccccgggcggctgaaactcactgagcagccaagactgttgcccgaggcctcactgtatggtgccctctccaaagggtcgggagggtagctctccaggccagagcttgtgtccttcaacagagaggccagcggcaactggtccgttactggccaagggctctgtagaatcacggtgctggtacaggatgcaggaataaattgtatcttcacctggttcctaccctcgtccctacctgtcctgatcctggtcctgaagacccctcggaacaccctctcctggtggcaggccacttccctcccagtgccagtctccatccaccccagagaggaacaggcgggtgggccatgtggttttctccttcctggccttggctggcctctggggcaggggtggtggagagatggaagggcatcaggtgtagggaccctgccaagtggcacctgatttactctagaaaataaaagtagaaaatactgagtcca

SEQ ID NO: 28419 - DNA, 2679 bp, Homo sapiens
  source 1..2679: mol_type = unassigned DNA
gacatcagcaagccccctgccgcgagcttggagaggcaccccagccccatctggcactcaaggaaatcagctcagagaggttgagtaactcgggaaggccacacagccagtgacgaagctgtgattcacacaggcctgggtgactccagcatggctttcctctccaggacgtcaccggtggcagctgcttccttccagagccggcaggaggccagaggctccatcctgcttcagagctgccagctgcccccgcaatggctgagcaccgaagcatggacgggagaatggaagcagccacacgggggggctctcacctccagatcgcctgggcctgtggctccccagaggccctgccacctgaagggatggcagcacagacccactcagcacaacgctgcctgcaaacagggccaggctgcagcccagacgccccccaggccggggccaccatcagcaccaccaccaccacccaaggaggggcaccaggaggggctggtggagctgcccgcctcgttccgggagctgctcaccttcttctgcaccaatgccaccatccacggcgccatccgcctggtctgctcccgcgggaaccgcctcaagacgacgtcctgggggctgctgtccctgggagccctggtcgcgctctgctggcagctggggctcctctttgagcgtcactggcaccgcccggtcctcatggccgtctctgtgcactcggagcgcaagctgctcccgctggtcaccctgtgtgacgggaacccacgtcggccgagtccggtcctccgccatctggagctgctggacgagtttgccagggagaacattgactccctgtacaacgtcaacctcagcaaaggcagagccgccctctccgccactgtcccccgccacgagccccccttccacctggaccgggagatccgtctgcagaggctgagccactcgggcagccgggtcagagtggggttcagactgtgcaacagcacgggcggcgactgcttttaccgaggctacacgtcaggcgtggcggctgtccaggactggtaccacttccactatgtggatatcctggccctgctgcccgcggcatgggaggacagccacgggagccaggacggccacttcgtcctctcctgcagttacgatggcctggactgccaggcccgacagttccggaccttccaccaccccacctacggcagctgctacacggtcgatggcgtctggacagctcagcgccccggcatcacccacggagtcggcctggtcctcagggttgagcagcagcctcacctccctctgctgtccacgctggccggcatcagggtcatggttcacggccgtaaccacacgcccttcctggggcaccacagcttcagcgtccggccagggacggaggccaccatcagcatccgagaggacgaggtgcaccggctcgggagcccctacggccactgcaccgccggcggggaaggcgtggaggtggagctgctacacaacacctcctacaccaggcaggcctgcctggtgtcctgcttccagcagctgatggtggagacctgctcctgtggctactacctccaccctctgccggcgggggctgagtactgcagctctgcccggcaccctgcctggggacactgcttctaccgcctctaccaggacctggagacccaccggctcccctgtacctcccgctgccccaggccctgcagggagtctgcattcaagctctccactgggacctccaggtggccttccgccaagtcagctggatggactctggccacgctaggtgaacaggggctgccgcatcagagccacagacagaggagcagcctggccaaaatcaacatcgtctaccaggagctcaactaccgctcagtggaggaggcgcccgtgtactcggtgccgcagctgctctcggccatgggcagcctctgcagcctgtggtttggggcctccgtcctctccctcctggagctcctggagctgctgctcgatgcttctgccctcaccctggtgctaggcggccgccggctccgcagggcgtggttctcctggcccagagccagccctgcctcaggggcgtccagcatcaagccagaggccagtcagatgcccccgcctgcaggcggcacgtcagatgacccggagcccagcgggcctcatctcccacgggtgatgcttccaggggttctggcgggagtctcagccgaagagagctgggctgggccccagccccttgagactctggacacctgaaccagacctgccagggctgtgcgatctcttggcctggtccttgcagctgtggcagcagcaggctccccagcggcccagggtgggccagaccagcagcccaggaagcagcacacgcggccgtggggaggcaggcaccgggcatgtcggcgcctctggtcaaaccacctacactgcctggggtgggtctcaaggaggcccggggcggaggggggttcccgcgtgcacacgagtgcggctggacgtgccgacacgcggtgatgtacccatgctccgtgtgtctgtgtctgcatgtccacacgtctgatgcacctgtgtacgtgtgtcaagcctagccacctcagctgcagggaggcagaaggcaaggcaggccccacggacacacttgggctgctctgaaataaagctgttgactcc

SEQ ID NO: 28420 - DNA, 3475 bp, Homo sapiens
  source 1..3475: mol_type = unassigned DNA
tataaatgcttctcatcagactcaaggcctgaggtgatgctgatgctgtgcctgaattccagcagggaggaggcatgaggtgcgtccgactcccttcccatcacagctgagctagtttttcaggttaactttggaatgcccatggctaagaccaggggtccatccagacagttcagggcttataattttatttttggtttatgagggaacctagaaggcagcccacacgcaccttactcctcccagcaggggacaccggccagaccccaagctccacactcccaccctcagcacccacccaggccagcagccgggggcaccttggtgccaccttagtgcctgttctgcggaggctccactggacagtgcagttgatgcccggggccgagggggctctgcctgggaggctgttcacctgcctgggtgcaggaccccagagggaccccaggccacccctggcctgcccatgcccacgggaatcccgaccttgggctgcctgtctattgcaccagaaccgtcccagggctgactcagagtgaccctgagtgggggacgctcaccccaggggaggaaacggggctctgggataggaggtcctggctggggtcccacagatgccaggcgcctgccatctccagggcagtgctgtcacagaagacaacaccgctccctcgttacctgtggcccggccacctcagcggcccaaggaggtgagctcacagccatgctcggtcaatggggcctggccgtctttcctgggagagagcagaggcatgggcccaaagggagccagggatgcctgcccgtcccttctctcattcaggctcacctggtcatggtgcagtgaccacaggacccccacatgccgggagctgggttcgccccaccccaccccctgcaccgggccagcgaggggatggcccagaagagggggaggaccatgtggattcaccagtgctggacatgtgctctgtggctaccccctctgcctactctctggcccgatacaggggtgtgggacaggcctgggtgactccagcatggctttcctctccaggacgtcaccggtggcagctgcttccttccagagccggcaggaggccagaggctccatcctgcttcagagctgccagctgcccccgcaatggctgagcaccgaagcatggacgggagaatggaagcagccacacgggggggctctcacctccaggctgcagcccagacgccccccaggccggggccaccatcagcaccaccaccaccacccaaggaggggcaccaggaggggctggtggagctgcccgcctcgttccgggagctgctcaccttcttctgcaccaatgccaccatccacggcgccatccgcctggtctgctcccgcgggaaccgcctcaagacgacgtcctgggggctgctgtccctgggagccctggtcgcgctctgctggcagctggggctcctctttgagcgtcactggcaccgcccggtcctcatggccgtctctgtgcactcggagcgcaagctgctcccgctggtcaccctgtgtgacgggaacccacgtcggccgagtccggtcctccgccatctggagctgctggacgagtttgccagggagaacattgactccctgtacaacgtcaacctcagcaaaggcagagccgccctctccgccactgtcccccgccacgagccccccttccacctggaccgggagatccgtctgcagaggctgagccactcgggcagccgggtcagagtggggttcagactgtgcaacagcacgggcggcgactgcttttaccgaggctacacgtcaggcgtggcggctgtccaggactggtaccacttccactatgtggatatcctggccctgctgcccgcggcatgggaggacagccacgggagccaggacggccacttcgtcctctcctgcagttacgatggcctggactgccaggcccgacagttccggaccttccaccaccccacctacggcagctgctacacggtcgatggcgtctggacagctcagcgccccggcatcacccacggagtcggcctggtcctcagggttgagcagcagcctcacctccctctgctgtccacgctggccggcatcagggtcatggttcacggccgtaaccacacgcccttcctggggcaccacagcttcagcgtccggccagggacggaggccaccatcagcatccgagaggacgaggtgcaccggctcgggagcccctacggccactgcaccgccggcggggaaggcgtggaggtggagctgctacacaacacctcctacaccaggcaggcctgcctggtgtcctgcttccagcagctgatggtggagacctgctcctgtggctactacctccaccctctgccggcgggggctgagtactgcagctctgcccggcaccctgcctggggacactgcttctaccgcctctaccaggacctggagacccaccggctcccctgtacctcccgctgccccaggccctgcagggagtctgcattcaagctctccactgggacctccaggtggccttccgccaagtcagctggatggactctggccacgctaggtgaacaggggctgccgcatcagagccacagacagaggagcagcctggccaaaatcaacatcgtctaccaggagctcaactaccgctcagtggaggaggcgcccgtgtactcggtgccgcagctgctctcggccatgggcagcctctgcagcctgtggtttggggcctccgtcctctccctcctggagctcctggagctgctgctcgatgcttctgccctcaccctggtgctaggcggccgccggctccgcagggcgtggttctcctggcccagagccagccctgcctcaggggcgtccagcatcaagccagaggccagtcagatgcccccgcctgcaggcggcacgtcagatgacccggagcccagcgggcctcatctcccacgggtgatgcttccaggggttctggcgggagtctcagccgaagagagctgggctgggccccagccccttgagactctggacacctgaaccagacctgccagggctgtgcgatctcttggcctggtccttgcagctgtggcagcagcaggctccccagcggcccagggtgggccagaccagcagcccaggaagcagcacacgcggccgtggggaggcaggcaccgggcatgtcggcgcctctggtcaaaccacctacactgcctggggtgggtctcaaggaggcccggggcggaggggggttcccgcgtgcacacgagtgcggctggacgtgccgacacgcggtgatgtacccatgctccgtgtgtctgtgtctgcatgtccacacgtctgatgcacctgtgtacgtgtgtcaagcctagccacctcagctgcagggaggcagaaggcaaggcaggccccacggacacacttgggctgctctgaaataaagctgttgactcc

SEQ ID NO: 28421 - DNA, 923 bp, Homo sapiens
  source 1..923: mol_type = unassigned DNA
tgcaacagcacgggcggcgactgcttttaccgaggctacacgtcaggcgtggcggctgtccaggactggtaccacttccactatgtggatatcctggccctgctgcccgcggcatgggaggacagccacgggagccaggacggccacttcgtcctctcctgcagttacgatggcctggactgccaggcccgacagttccggaccttccaccaccccacctacggcagctgctacacggtcgatggcgtctggacagctcagcgccccggcatcacccacggtgggtgccagcccctggccggtgcgggggcaggggtgcaggtcaggtggcctcacaccagcccttggcctcccaggagtcggcctggtcctcagggttgagcagcagcctcacctccctctgctgtccacgctggccggcatcagggtcatggttcacggccgtaaccacacgcccttcctggggcaccacagcttcagcgtccggccagggacggaggccaccatcagcatccgagaggacgaggtgcaccggctcgggagcccctacggccactgcaccgccggcggggaaggcgtggaggtggagctgctacacaacacctcctacaccaggcaggcctgcctggtgtcctgcttccagcagctgatggtggagacctgctcctgtggctactacctccaccctctgccggcgggggctgagtactgcagctctgcccggcaccctgcctggggacactgcttctaccgcctctaccaggacctggagacccaccggctcccctgtacctcccgctgccccaggccctgcagggagtctgcattcaagctctccactgggacctccaggtggccttccgccaagtcagctggatggactctggccacgctaggtgaacaggggctgccgcatcagagcc

SEQ ID NO: 28422 - DNA, 3365 bp, Homo sapiens
  source 1..3365: mol_type = unassigned DNA
ggaaccgagctgtggcctggggttccatggagcaggtggggcgcggaggaactgagctgtggcctggggttccgtggagcaggttgagtatggaggaactggggttccgtggagcaggtggggcgcagaggaaccgagctgtggaatggggttccgtggagcaggttgagtgtgccggtcgtggacgggtcgtgggcgggactccccagtgtgtcaccactgaggcatcttcgccctcttacgtgtctctgtttctctctctagaagtccaacacctccgagaggactcaaaacacagagtgaccagctcctatgtgcatttcctgggcgacagcgagactccatctcaataaataaaaaaaaaaaagagttgttatcagtagaagggaatgtctggttacagtatggcgttgtgcagatgaaggtcttatcgcagatgaagccaccaggtcacaagcctcagagagaatcaactataaatgcttctcatcagactcaaggcctgaggtgatgctgatgctgtgcctgaattccagcagggaggaggcatgagggcagtgctgtcacagaagacaacaccgctccctcgttacctgtggcccggccacctcagcggcccaaggaggctcacctggtcatggtgcagtgaccacaggacccccacatgccgggagctgggttcgccccaccccaccccctgcaccgggccagcgaggggatggcccagaagagggggaggaccatgtggattcaccagtgctggacatgtgctctgtggctaccccctctgcctactctctggcccgatacaggggtgtgggacaggcctgggtgactccagcatggctttcctctccaggacgtcaccggtggcagctgcttccttccagagccggcaggaggccagaggctccatcctgcttcagagctgccagctgcccccgcaatggctgagcaccgaagcatggacgggagaatggaagcagccacacgggggggctctcacctccagatcgcctgggcctgtggctccccagaggccctgccacctgaagggatggcagcacagacccactcagcacaacgctgcctgcaaacagggccaggctgcagcccagacgccccccagccggggccaccatcagcaccaccaccaccacccaaggaggggcaccaggaggggctggtggagctgcccgcctcgttccgggagctgctcaccttcttctgcaccaatgccaccatccacggcgccatccgcctggtctgctcccgcgggaaccgcctcaagacgacgtcctgggggctgctgtccctgggagccctggtcgcgctctgctggcagctggggctcctctttgagcgtcactggcaccgcccggtcctcatggccgtctctgtgcactcggagcgcaagctgctcccgctggtcaccctgtgtgacgggaacccacgtcggccgagtccggtcctccgccatctggagctgctggacgagtttgccagggagaacattgactccctgtacaacgtcaacctcagcaaaggcagagccgccctctccgccactgtcccccgccacgagccccccttccacctggaccgggagatccgtctgcagaggctgagccactcgggcagccgggtcagagtggggttcagactgtgcaacagcacgggcggcgactgcttttaccgaggctacacgtcaggcgtggcggctgtccaggactggtaccacttccactatgtggatatcctggccctgctgcccgcggcatgggaggacagccacgggagccaggacggccacttcgtcctctcctgcagttacgatggcctggactgccaggcccgacagttccggaccttccaccaccccacctacggcagctgctacacggtcgatggcgtctggacagctcagcgccccggcatcacccacggagtcggcctggtcctcagggttgagcagcagcctcacctccctctgctgtccacgctggccggcatcagggtcatggttcacggccgtaaccacacgcccttcctggggcaccacagcttcagcgtccggccagggacggaggccaccatcagcatccgagaggacgaggtgcaccggctcgggagcccctacggccactgcaccgccggcggggaaggcgtggaggtggagctgctacacaacacctcctacaccaggcaggcctgcctggtgtcctgcttccagcagctgatggtggagacctgctcctgtggctactacctccaccctctgccggcgggggctgagtactgcagctctgcccggcaccctgcctggggacactgcttctaccgcctctaccaggacctggagacccaccggctcccctgtacctcccgctgccccaggccctgcagggagtctgcattcaagctctccactgggacctccaggtggccttccgccaagtcagctggatggactctggccacgctaggtgaacaggggctgccgcatcagagccacagacagaggagcagcctggccaaaatcaacatcgtctaccaggagctcaactaccgctcagtggaggaggcgcccgtgtactcggtgccgcagctgctctcggccatgggcagcctctgcagcctgtggtttggggcctccgtcctctccctcctggagctcctggagctgctgctcgatgcttctgccctcaccctggtgctaggcggccgccggctccgcagggcgtggttctcctggcccagagccagccctgcctcaggggcgtccagcatcaagccagaggccagtcagatgcccccgcctgcaggcggcacgtcagatgacccggagcccagcgggcctcatctcccacgggtgatgcttccaggggttctggcgggagtctcagccgaagagagctgggctgggccccagccccttgagactctggacacctgaaccagacctgccagggctgtgcgatctcttggcctggtccttgcagctgtggcagcagcaggctccccagcggcccagggtgggccagaccagcagcccaggaagcagcacacgcggccgtggggaggcaggcaccgggcatgtcggcgcctctggtcaaaccacctacactgcctggggtgggtctcaaggaggcccggggcggaggggggttcccgcgtgcacacgagtgcggctggacgtgccgacacgcggtgatgtacccatgctccgtgtgtctgtgtctgcatgtccacacgtctgatgcacctgtgtacgtgtgtcaagcctagccacctcagctgcagggaggcagaaggcaaggcaggccccacggacacacttgggctgctctgaaataaagctgttg

SEQ ID NO: 28423 - DNA, 3044 bp, Homo sapiens
  source 1..3044: mol_type = unassigned DNA
cctgggcgacagcgagactccatctcaataaataaaaaaaaaaaagagttgttatcagtagaagggaatgtctggttacagtatggcgttgtgcagatgaaggtcttatcgcagatgaagccaccaggtcacaagcctcagagagaatcaactataaatgcttctcatcagactcaaggcctgaggtgatgctgatgctgtgcctgaattccagcagggaggaggcatgagggcagtgctgtcacagaagacaacaccgctccctcgttacctgtggcccggccacctcagcggcccaaggaggctcacctggtcatggtgcagtgaccacaggacccccacatgccgggagctgggttcgccccaccccaccccctgcaccgggccagcgaggggatggcccagaagagggggaggaccatgtggattcaccagtgctggacatgtgctctgtggctaccccctctgcctactctctggcccgatacaggggtgtgggacaggcctgggtgactccagcatggctttcctctccaggacgtcaccggtggcagctgcttccttccagagccggcaggaggccagaggctccatcctgcttcagagctgccagctgcccccgcaatggctgagcaccgaagcatggacgggagaatggaagcagccacacgggggggctctcacctccagatcgcctgggcctgtggctccccagaggccctgccacctgaagggatggcagcacagacccactcagcacaacgctgcctgcaaacagggccaggctgcagcccagacgccccccaggccggggccaccatcagcaccaccaccaccacccaaggaggggcaccaggaggggctggtggagctgcccgcctcgttccgggagctgctcaccttcttctgcaccaatgccaccatccacggcgccatccgcctggtctgctcccgcgggaaccgcctcaagacgacgtcctgggggctgctgtccctgggagccctggtcgcgctctgctggcagctggggctcctctttgagcgtcactggcaccgcccggtcctcatggccgtctctgtgcactcggagcgcaagctgctcccgctggtcaccctgtgtgacgggaacccacgtcggccgagtccggtcctccgccatctggagctgctggacgagtttgccagggagaacattgactccctgtacaacgtcaacctcagcaaaggcagagccgccctctccgccactgtcccccgccacgagccccccttccacctggaccgggagatccgtctgcagaggctgagccactcgggcagccgggtcagagtggggttcagactgtgcaacagcacgggcggcgactgcttttaccgaggctacacgtcaggcgtggcggctgtccaggactggtaccacttccactatgtggatatcctggccctgctgcccgcggcatgggaggacagccacgggagccaggacggccacttcgtcctctcctgcagttacgatggcctggactgccaggcccgacagttccggaccttccaccaccccacctacggcagctgctacacggtcgatggcgtctggacagctcagcgccccggcatcacccacggagtcggcctggtcctcagggttgagcagcagcctcacctccctctgctgtccacgctggccggcatcagggtcatggttcacggccgtaaccacacgcccttcctggggcaccacagcttcagcgtccggccagggacggaggccaccatcagcatccgagaggacgaggtgcaccggctcgggagcccctacggccactgcaccgccggcggggaaggcgtggaggtggagctgctacacaacacctcctacaccaggcaggcctgcctggtgtcctgcttccagcagctgatggtggagacctgctcctgtggctactacctccaccctctgccggcgggggctgagtactgcagctctgcccggcaccctgcctggggacactgcttctaccgcctctaccaggacctggagacccaccggctcccctgtacctcccgctgccccaggccctgcagggagtctgcattcaagctctccactgggacctccaggtggccttccgccaagtcagctggatggactctggccacgctaggtgaacaggggctgccgcatcagagccacagacagaggagcagcctggccaaaatcaacatcgtctaccaggagctcaactaccgctcagtggaggaggcgcccgtgtactcggtgccgcagctgctctcggccatgggcagcctctgcagcctgtggtttggggcctccgtcctctccctcctggagctcctggagctgctgctcgatgcttctgccctcaccctggtgctaggcggccgccggctccgcagggcgtggttctcctggcccagagccagccctgcctcaggggcgtccagcatcaagccagaggccagtcagatgcccccgcctgcaggcggcacgtcagatgacccggagcccagcgggcctcatctcccacgggtgatgcttccaggggttctggcgggagtctcagccgaagagagctgggctgggccccagccccttgagactctggacacctgaaccagacctgccagggctgtgcgatctcttggcctggtccttgcagctgtggcagcagcaggctccccagcggcccagggtgggccagaccagcagcccaggaagcagcacacgcggccgtggggaggcaggcaccgggcatgtcggcgcctctggtcaaaccacctacactgcctggggtgggtctcaaggaggcccggggcggaggggggttcccgcgtgcacacgagtgcggctggacgtgccgacacgcggtgatgtacccatgctccgtgtgtctgtgtctgcatgtccacacgtctgatgcacctgtgtacgtgtgtcaagcctagccacctcagctgcagggaggcagaaggcaaggcaggccccacggacacacttgggctgctctgaaataaagctgttg

SEQ ID NO: 28424 - DNA, 2503 bp, Homo sapiens
  source 1..2503: mol_type = unassigned DNA
actcgggaaggccacacagccagtgacgaagctgtgattcacacaggcctgggtgactccagcatggctttcctctccaggacgtcaccggtggcagctgcttccttccagagccggcaggaggccagaggctccatcctgcttcagagctgccagctgcccccgcaatggctgagcaccgaagcatggacgggagaatggaagcagccacacgggggggctctcacctccaggctgcagcccagacgccccccaggccggggccaccatcagcaccaccaccaccacccaaggaggggcaccaggaggggctggtggagctgcccgcctcgttccgggagctgctcaccttcttctgcaccaatgccaccatccacggcgccatccgcctggtctgctcccgcgggaaccgcctcaagacgacgtcctgggggctgctgtccctgggagccctggtcgcgctctgctggcagctggggctcctctttgagcgtcactggcaccgcccggtcctcatggccgtctctgtgcactcggagcgcaagctgctcccgctggtcaccctgtgtgacgggaacccacgtcggccgagtccggtcctccgccatctggagctgctggacgagtttgccagggagaacattgactccctgtacaacgtcaacctcagcaaaggcagagccgccctctccgccactgtcccccgccacgagccccccttccacctggaccgggagatccgtctgcagaggctgagccactcgggcagccgggtcagagtggggttcagactgtgcaacagcacgggcggcgactgcttttaccgaggctacacgtcaggcgtggcggctgtccaggactggtaccacttccactatgtggatatcctggccctgctgcccgcggcatgggaggacagccacgggagccaggacggccacttcgtcctctcctgcagttacgatggcctggactgccaggcccgacagttccggaccttccaccaccccacctacggcagctgctacacggtcgatggcgtctggacagctcagcgccccggcatcacccacggagtcggcctggtcctcagggttgagcagcagcctcacctccctctgctgtccacgctggccggcatcagggtcatggttcacggccgtaaccacacgcccttcctggggcaccacagcttcagcgtccggccagggacggaggccaccatcagcatccgagaggacgaggtgcaccggctcgggagcccctacggccactgcaccgccggcggggaaggcgtggaggtggagctgctacacaacacctcctacaccaggcaggcctgcctggtgtcctgcttccagcagctgatggtggagacctgctcctgtggctactacctccaccctctgccggcgggggctgagtactgcagctctgcccggcaccctgcctggggacactgcttctaccgcctctaccaggacctggagacccaccggctcccctgtacctcccgctgccccaggccctgcagggagtctgcattcaagctctccactgggacctccaggtggccttccgccaagtcagctggatggactctggccacgctaggtgaacaggggctgccgcatcagagccacagacagaggagcagcctggccaaaatcaacatcgtctaccaggagctcaactaccgctcagtggaggaggcgcccgtgtactcggtgccgcagctgctctcggccatgggcagcctctgcagcctgtggtttggggcctccgtcctctccctcctggagctcctggagctgctgctcgatgcttctgccctcaccctggtgctaggcggccgccggctccgcagggcgtggttctcctggcccagagccagccctgcctcaggggcgtccagcatcaagccagaggccagtcagatgcccccgcctgcaggcggcacgtcagatgacccggagcccagcgggcctcatctcccacgggtgatgcttccaggggttctggcgggagtctcagccgaagagagctgggctgggccccagccccttgagactctggacacctgaaccagacctgccagggctgtgcgatctcttggcctggtccttgcagctgtggcagcagcaggctccccagcggcccagggtgggccagaccagcagcccaggaagcagcacacgcggccgtggggaggcaggcaccgggcatgtcggcgcctctggtcaaaccacctacactgcctggggtgggtctcaaggaggcccggggcggaggggggttcccgcgtgcacacgagtgcggctggacgtgccgacacgcggtgatgtacccatgctccgtgtgtctgtgtctgcatgtccacacgtctgatgcacctgtgtacgtgtgtcaagcctagccacctcagctgcagggaggcagaaggcaaggcaggccccacggacacacttgggctgctctgaaataaagctgttgactccacctg

SEQ ID NO: 28425 - DNA, 3507 bp, Homo sapiens
  source 1..3507: mol_type = unassigned DNA
ccacaagagcccgcggtggcgctgccaggggatgctagcccgagagcgagcagaggagcagcgcacccgcacgagccttggaccctttggaaccgaaagcacgcccgtcctcagagtcccgtcctcaaagtcccatcctcgccatggcacccggagagaagatcaaagccaaaatcaagaagaatctgcccgtgacgggccctcaggcgccgaccattaaagagctgatgcggtggtactgcctcaacaccaacacccatggctgtcgccgcatcgtggtgtcccgcggccgtctgcgccgcctcctctggatcgggttcacactgactgccgtggccctcatcctctggcagtgcgccctcctcgtcttctccttctatactgtctcagtttccatcaaagtccacttccggaagctggattttcctgcagtcaccatctgcaacatcaacccctacaagtacagcaccgttcgccaccttctagctgacttggaacaggagaccagagaggccctgaagtccctgtatggctttccagagtcccggaagcgccgagaggcggagtcctggaactccgtctcagagggaaagcagcctagattctcccaccggattccgctgctgatctttgatcaggatgagaagggcaaggccagggacttcttcacagggaggaagcggaaagtcggcggtagcatcattcacaaggcttcaaatgtcatgcacatcgagtccaagcaagtggtgggattccaactgtgctcaaatgacacctccgactgtgccacctacaccttcagctcgggaatcaatgccattcaggagtggtataagctacactacatgaacatcatggcacaggtgcctctggagaagaaaatcaacatgagctattctgctgaggagctgctggtgacctgcttctttgatggagtgtcctgtgatgccaggaatttcacgcttttccaccacccgatgcatgggaattgctatactttcaacaacagagaaaatgagaccattctcagcacctccatggggggcagcgaatatgggctgcaagtcattttgtacataaacgaagaggaatacaacccattcctcgtgtcctccactggagctaaggtgatcatccatcggcaggatgagtatcccttcgtcgaagatgtgggaacagagattgagacagcaatggtcacctctataggaatgcacctgacagagtccttcaagctgagtgagccctacagtcagtgcacggaggacgggagtgacgtgccaatcaggaacatctacaacgctgcctactcgctccagatctgccttcattcatgcttccagacaaagatggtggagaaatgtgggtgtgcccagtacagccagcctctacctcctgcagccaactactgcaactaccagcagcaccccaactggatgtattgttactaccaactgcatcgagcctttgtccaggaagagctgggctgccagtctgtgtgcaaggaagcctgcagctttaaagagtggacactaaccacaagcctggcacaatggccatctgtggtttcggagaagtggttgctgcctgttctcacttgggaccaaggccggcaagtaaacaaaaagctcaacaagacagacttggccaaactcttgatattctacaaagacctgaaccagagatccatcatggagagcccagccaacagtattgagatgcttctgtccaacttcggtggccagctgggcctgtggatgagctgctctgttgtctgcgtcatcgagatcatcgaggtcttcttcattgacttcttctctatcattgcccgccgccagtggcagaaagccaaggagtggtgggcctggaaacaggctcccccatgtccagaagctccccgtagcccacagggccaggacaatccagccctggatatagacgatgacctacccactttcaactctgctttgcacctgcctccagccctaggaacccaagtgcccggcacaccgccccccaaatacaataccttgcgcttggagagggccttttccaaccagctcacagatacccagatgctggatgagctctgaggcagggttgagaagacagatctagtcaggaccaccagccatggtctaaggacatggatcgggtgcccccagacgtgtgcacaggggaccctctgccccactctgggcttttcagatactctgaccaaaaagcctgctttaaaccgcaagatggggcctgggcatgcgcaggaggagccatcgggtactacgcagcaacactcacaactgtccaggctgagataaatcccgggacctgaactattagcacgtcactagagactgggagccgaggcagtggtgctggcccaagtgaaggccagagtgaggactgatgcagctctttacgggtcttgagagggaaggactcttccaaagccccaaagccgagggtttcacccacactgccagcctgggttggggcccaaggatgtgaccttgagtgtcaaggctggacagctactgccagatgccaaagataggagaaagtgccagccctgaagctggagccgtttgtgaataaactgttcttcatcattgacactggagaaaggtgtcctccatgccctcaggcagcagagaactggcccagagcccttggagtgttggtggagatcagagtgccgtggtggaggtctgggactatgtcagagtgtcctcactttggggcatgggtgggtccaggagatggatttagttattcaattttgtggatgaataaattgaggcacagaaagattaagttaccggcccaaggtgacacagtgaggaggtggcagagctaggatttgaacccagacaatctgacttcatgattttgcatccaattcgtgtctgtgccttttaaagggtgaggtctgtgtcactttgggtggggagggggagcatggtgggccatgctctgggcagctgttccaagacagagctgacccttccattaccaatggcctgtccctcaccaacaagccaactgccacagatgacccacttcataccacattcacatctttccacctgaaatggctaacaggtattaaatccttggttggtgtttaaagccaacccaagaacagggtgttaggtactgttttaagcacctagataggttagcataggggactgcaaatggtgttccgcaaagcaaatcctgtttttgaccatgaactaagaattttattttattttattttttattttttgtagaaataggatctcactatgttgcccaggctgttcttgaactcctggcctcaaatgatcttcccacttcagcctcccaaagtgcagggattacaggcacaagccaccgtgcccagccaagaatttttatttttgcttttaaatagcaaaagaagaagattctgtgactcatgaaaatgatatgagattcgaattccagtgtctataaataaagttttattggtacacagccaca

SEQ ID NO: 28426 - DNA, 7205 bp, Homo sapiens
  source 1..7205: mol_type = unassigned DNA
gagcgctccaagatggcgcccaccgcagtcccgcccgccgcatcctcggcgcctttgcagtccggccgcgcctcccgggccccgcgttagggccgccgctgcctccctcgccgccgccgctgccagctgacctgtcctggacgcagcataactaacgaagctgctgcaggatgagaagatggcagcgcggctgcttgcaccaccaggccctgatagtttcaagcctttcacccctgagtcactggcaaacattgagaggcgcattgctgagagcaagctcaagaaaccaccaaaggccgatggcagtcatcgggaggacgatgaggacagcaagcccaagccaaacagcgacctggaagcagggaagagtttgcctttcatctacggggacatcccccaaggcctggttgcagttcccctggaggactttgacccatactatttgacgcagaaaacctttgtagtattaaacagagggaaaactctcttcagatttagtgccacgcctgccttgtacattttaagtccttttaacctgataagaagaatagctattaaaattttgatacattcagtatttagcatgatcattatgtgcactattttgaccaactgtgtattcatgacttttagtaaccctcctgactggtcgaagaatgtggagtacacgttcacagggatttatacatttgaatcactagtgaaaatcattgcaagaggtttctgcatagatggctttacctttttacgggacccatggaactggttagatttcagtgtcatcatgatggcgtatataacagagtttgtaaacctaggcaatgtttcagctctacgcactttcagggtactgagggctttgaaaactatttcggtaatcccaggcctgaagacaattgtgggtgccctgattcagtctgtgaagaaactgtcagatgtgatgatcctgacagtgttctgcctgagtgtttttgccttgatcggactgcagctgttcatggggaaccttcgaaacaagtgtgttgtgtggcccataaacttcaacgagagctatcttgaaaatggcaccaaaggctttgattgggaagagtatatcaacaataaaacaaatttctacacagttcctggcatgctggaacctttactctgtgggaacagttctgatgctgggcaatgcccagagggataccagtgtatgaaagcaggaaggaaccccaactatggttacacaagttttgacacttttagctgggccttcttggcattatttcgccttatgacccaggactattgggaaaacttgtatcaattgactttacgagcagccgggaaaacatacatgatcttcttcgtcttggtcatctttgtgggttctttctatctggtgaacttgatcttggctgtggtggccatggcttatgaagaacagaatcaggcaacactggaggaggcagaacaaaaagaggctgaatttaaagcaatgttggagcaacttaagaagcaacaggaagaggcacaggctgctgcgatggccacttcagcaggaactgtctcagaagatgccatagaggaagaaggtgaagaaggagggggctcccctcggagctcttctgaaatctctaaactcagctcaaagagtgcaaaggaaagacgtaacaggagaaagaagaggaagcaaaaggaactctctgaaggagaggagaaaggggatcccgagaaggtgtttaagtcagagtcagaagatggcatgagaaggaaggcctttcggctgccagacaacagaatagggaggaaattttccatcatgaatcagtcactgctcagcatcccaggctcgcccttcctctcccgccacaacagcaagagcagcatcttcagtttcaggggacctgggcggttccgagacccgggctccgagaatgagttcgcggatgacgagcacagcacggtggaggagagcgagggccgccgggactccctcttcatccccatccgggcccgcgagcgccggagcagctacagcggctacagcggctacagccagggcagccgctcctcgcgcatcttccccagcctgcggcgcagcgtgaagcgcaacagcacggtggactgcaacggcgtggtgtccctcatcggcggccccggctcccacatcggcgggcgtctcctgccagaggctacaactgaggtggaaattaagaagaaaggccctggatctcttttagtttccatggaccaattagcctcctacgggcggaaggacagaatcaacagtataatgagtgttgttacaaatacactagtagaagaactggaagagtctcagagaaagtgcccgccatgctggtataaatttgccaacactttcctcatctgggagtgccacccctactggataaaactgaaagagattgtgaacttgatagttatggacccttttgtggatttagccatcaccatctgcatcgtcctgaatacactgtttatggcaatggagcaccatcctatgacaccacaatttgaacatgtcttggctgtaggaaatctggttttcactggaattttcacagcggaaatgttcctgaagctcatagccatggatccctactattatttccaagaaggttggaacatttttgacggatttattgtctccctcagtttaatggaactgagtctagcagacgtggaggggctttcagtgctgcgatctttccgattgctccgagtcttcaaattggccaaatcctggcccaccctgaacatgctaatcaagattattggaaattcagtgggtgccctgggcaacctgacactggtgctggccattattgtcttcatctttgccgtggtggggatgcaactctttggaaaaagctacaaagagtgtgtctgcaagatcaaccaggactgtgaactccctcgctggcatatgcatgactttttccattccttcctcattgtctttcgagtgttgtgcggggagtggattgagaccatgtgggactgcatggaagtggcaggccaggccatgtgcctcattgtctttatgatggtcatggtgattggcaacttggtggtgctgaacctgtttctggccttgctcctgagctccttcagtgcagacaacctggctgccacagatgacgatggggaaatgaacaacctccagatctcagtgatccgtatcaagaagggtgtggcctggaccaaactaaaggtgcacgccttcatgcaggcccactttaagcagcgtgaggctgatgaggtgaagcctctggatgagttgtatgaaaagaaggccaactgtatcgccaatcacaccggtgcagacatccaccggaatggtgacttccagaagaatggcaatggcacaaccagcggcattggcagcagcgtggagaagtacatcattgatgaggaccacatgtccttcatcaacaaccccaacttgactgtacgggtacccattgctgtgggcgagtctgactttgagaacctcaacacagaggatgttagcagcgagtcggatcctgaaggcagcaaagataaactagatgacaccagctcctctgaaggaagcaccattgatatcaaaccagaagtagaagaggtccctgtggaacagcctgaggaatacttggatccagatgcctgcttcacagaaggttgtgtccagcggttcaagtgctgccaggtcaacatcgaggaagggctaggcaagtcttggtggatcctgcggaaaacctgcttcctcatcgtggagcacaactggtttgagaccttcatcatcttcatgattctgctgagcagtggcgccctggccttcgaggacatctacattgagcagagaaagaccatccgcaccatcctggaatatgctgacaaagtcttcacctatatcttcatcctggagatgttgctcaagtggacagcctatggcttcgtcaagttcttcaccaatgcctggtgttggctggacttcctcattgtggctgtctctttagtcagccttatagctaatgccctgggctactcggaactaggtgccataaagtcccttaggaccctaagagctttgagacccttaagagccttatcacgatttgaagggatgagggtggtggtgaatgccttggtgggcgccatcccctccatcatgaatgtgctgctggtgtgtctcatcttctggctgattttcagcatcatgggagttaacttgtttgcgggaaagtaccactactgctttaatgagacttctgaaatccgatttgaaattgaagatgtcaacaataaaactgaatgtgaaaagcttatggaggggaacaatacagagatcagatggaagaacgtgaagatcaactttgacaatgttggggcaggatacctggcccttcttcaagtagcaaccttcaaaggctggatggacatcatgtatgcagctgtagattcccggaagcctgatgagcagcctaagtatgaggacaatatctacatgtacatctattttgtcatcttcatcatcttcggctccttcttcaccctgaacctgttcattggtgtcatcattgataacttcaatcaacaaaagaaaaagttcggaggtcaggacatcttcatgaccgaagaacagaagaagtactacaatgccatgaaaaagctgggctcaaagaagccacagaaacctattccccgccccttgaacaaaatccaaggaatcgtctttgattttgtcactcagcaagcctttgacattgttatcatgatgctcatctgccttaacatggtgacaatgatggtggagacagacactcaaagcaagcagatggagaacatcctctactggattaacctggtgtttgttatcttcttcacctgtgagtgtgtgctcaaaatgtttgcgttgaggcactactacttcaccattggctggaacatcttcgacttcgtggtagtcatcctctccattgtgggaatgttcctggcagatataattgagaaatactttgtttccccaaccctattccgagtcatccgattggcccgtattgggcgcatcttgcgtctgatcaaaggcgccaaagggattcgtaccctgctctttgccttaatgatgtccttgcctgccctgttcaacatcggccttctgctcttcctggtcatgttcatcttctccatttttgggatgtccaattttgcatatgtgaagcacgaggctggtatcgatgacatgttcaactttgagacatttggcaacagcatgatctgcctgtttcaaatcacaacctcagctggttgggatggcctgctgctgcccatcctaaaccgcccccctgactgcagcctagataaggaacacccagggagtggctttaagggagattgtgggaacccctcagtgggcatcttcttctttgtaagctacatcatcatctctttcctaattgtcgtgaacatgtacattgccatcatcctggagaacttcagtgtagccacagaggaaagtgcagaccctctgagtgaggatgactttgagaccttctatgagatctgggagaagttcgaccccgatgccacccagttcattgagtactgtaagctggcagactttgcagatgccttggagcatcctctccgagtgcccaagcccaataccattgagctcatcgctatggatctgccaatggtgagcggggatcgcatccactgcttggacatcctttttgccttcaccaagcgggtcctgggagatagcggggagttggacatcctgcggcagcagatggaagagcggttcgtggcatccaatccttccaaagtgtcttacgagccaatcacaaccacactgcgtcgcaagcaggaggaggtatctgcagtggtcctgcagcgtgcctaccggggacatttggcaaggcggggcttcatctgcaaaaagacaacttctaataagctggagaatggaggcacacaccgggagaaaaaagagagcaccccatctacagcctccctcccgtcctatgacagtgtaactaaacctgaaaaggagaaacagcagcgggcagaggaaggaagaagggaaagagccaaaagacaaaaagaggtcagagaatccaagtgttagaggagaacaaaaattcagtattatacagatctaaaactcgcaagtgaaagattgtttacaaacttcctgaatattatcaatgcagaacagctgtggagactctaacctgaagatctataccaaacgtcgtctgcttaccacgtaacacagctgcatcttgagcagtgacctgccaagggcaaaggaccccgctccctagacttacagattttctaatgcttgggcaggtggttactgcatgttccacatcagtcaatgcaacttaggacaaaactaaccagatacagaaacagaagagaggctgccgggaccagcatatttccgttgcagccaaatggattttattttttcattttattgattctcagaagcagaaagcatcactttaaaagttcgtttgttcatgcaaactatatttgcattcttacattagttaagctaagcagcaaaaagaaaacacacacacacactcacatttagcccatgtcatttaattgtcagtttctttgacataaagcgcatcttctccacatgggcttcacgtggtttggagatgggtgggggaaaacaatcaggtttcttcaggctgaggaggacttgctcaggccgattccaaacattgtgctcgttcaatgcgtagaaatgatttgcatgatggcatgccgtgatcagaagtcatgcatgagatccatacaccacaggacactactaatctagtcccttgcactgggtcagcctttggacaggacccagccctgcaccgttcactgtatttggagaaaatggtaagagttccataccggctacaattctttgagttcttaaaagtccttcatacaccttctgggtagggaaacaaccaactaattgactaacaccaccaacaacaaaaaacaaacccaatccaacaagcagatggatccgttgcgtgtatatgtttaacagacatctctaacatacagccattgttgcacattttgcaagatgaactatttaatgctgctctgtgtccagtacatgggggagactttgatcccaaatggcttgtactatttatgtcactgtaaaaccaaatcctagggct

SEQ ID NO: 28427 - DNA, 5820 bp, Homo sapiens
  source 1..5820: mol_type = unassigned DNA
atggcagcgcggctgcttgcaccaccaggccctgatagtttcaagcctttcacccctgagtcactggcaaacattgagaggcgcattgctgagagcaagctcaagaaaccaccaaaggccgatggcagtcatcgggaggacgatgaggacagcaagcccaagccaaacagcgacctggaagcagggaagagtttgcctttcatctacggggacatcccccaaggcctggttgcagttcccctggaggactttgacccatactatttgacgcagaaaacctttgtagtattaaacagagggaaaactctcttcagatttagtgccacgcctgccttgtacattttaagtccttttaacctgataagaagaatagctattaaaattttgatacattcagtatttagcatgatcattatgtgcactattttgaccaactgtgtattcatgacttttagtaaccctcctgactggtcgaagaatgtggagtacacgttcacagggatttatacatttgaatcactagtgaaaatcattgcaagaggtttctgcatagatggctttacctttttacgggacccatggaactggttagatttcagtgtcatcatgatggcgtatataacagagtttgtaaacctaggcaatgtttcagctctacgcactttcagggtactgagggctttgaaaactatttcggtaatcccaggcctgaagacaattgtgggtgccctgattcagtctgtgaagaaactgtcagatgtgatgatcctgacagtgttctgcctgagtgtttttgccttgatcggactgcagctgttcatggggaaccttcgaaacaagtgtgttgtgtggcccataaacttcaacgagagctatcttgaaaatggcaccaaaggctttgattgggaagagtatatcaacaataaaacaaatttctacacagttcctggcatgctggaacctttactctgtgggaacagttctgatgctgggcaatgcccagagggataccagtgtatgaaagcaggaaggaaccccaactatggttacacaagttttgacacttttagctgggccttcttggcattatttcgccttatgacccaggactattgggaaaacttgtatcaattgactttacgagcagccgggaaaacatacatgatcttcttcgtcttggtcatctttgtgggttctttctatctggtgaacttgatcttggctgtggtggccatggcttatgaagaacagaatcaggcaacactggaggaggcagaacaaaaagaggctgaatttaaagcaatgttggagcaacttaagaagcaacaggaagaggcacaggctgctgcgatggccacttcagcaggaactgtctcagaagatgccatagaggaagaaggtgaagaaggagggggctcccctcggagctcttctgaaatctctaaactcagctcaaagagtgcaaaggaaagacgtaacaggagaaagaagaggaagcaaaaggaactctctgaaggagaggagaaaggggatcccgagaaggtgtttaagtcagagtcagaagatggcatgagaaggaaggcctttcggctgccagacaacagaatagggaggaaattttccatcatgaatcagtcactgctcagcatcccaggctcgcccttcctctcccgccacaacagcaagagcagcatcttcagtttcaggggacctgggcggttccgagacccgggctccgagaatgagttcgcggatgacgagcacagcacggtggaggagagcgagggccgccgggactccctcttcatccccatccgggcccgcgagcgccggagcagctacagcggctacagcggctacagccagggcagccgctcctcgcgcatcttccccagcctgcggcgcagcgtgaagcgcaacagcacggtggactgcaacggcgtggtgtccctcatcggcggccccggctcccacatcggcgggcgtctcctgccagaggctacaactgaggtggaaattaagaagaaaggccctggatctcttttagtttccatggaccaattagcctcctacgggcggaaggacagaatcaacagtataatgagtgttgttacaaatacactagtagaagaactggaagagtctcagagaaagtgcccgccatgctggtataaatttgccaacactttcctcatctgggagtgccacccctactggataaaactgaaagagattgtgaacttgatagttatggacccttttgtggatttagccatcaccatctgcatcgtcctgaatacactgtttatggcaatggagcaccatcctatgacaccacaatttgaacatgtcttggctgtaggaaatctggttttcactggaattttcacagcggaaatgttcctgaagctcatagccatggatccctactattatttccaagaaggttggaacatttttgacggatttattgtctccctcagtttaatggaactgagtctagcagacgtggaggggctttcagtgctgcgatctttccgattgctccgagtcttcaaattggccaaatcctggcccaccctgaacatgctaatcaagattattggaaattcagtgggtgccctgggcaacctgacactggtgctggccattattgtcttcatctttgccgtggtggggatgcaactctttggaaaaagctacaaagagtgtgtctgcaagatcaaccaggactgtgaactccctcgctggcatatgcatgactttttccattccttcctcattgtctttcgagtgttgtgcggggagtggattgagaccatgtgggactgcatggaagtggcaggccaggccatgtgcctcattgtctttatgatggtcatggtgattggcaacttggtggtgctgaacctgtttctggccttgctcctgagctccttcagtgcagacaacctggctgccacagatgacgatggggaaatgaacaacctccagatctcagtgatccgtatcaagaagggtgtggcctggaccaaactaaaggtgcacgccttcatgcaggcccactttaagcagcgtgaggctgatgaggtgaagcctctggatgagttgtatgaaaagaaggccaactgtatcgccaatcacaccggtgcagacatccaccggaatggtgacttccagaagaatggcaatggcacaaccagcggcattggcagcagcgtggagaagtacatcattgatgaggaccacatgtccttcatcaacaaccccaacttgactgtacgggtacccattgctgtgggcgagtctgactttgagaacctcaacacagaggatgttagcagcgagtcggatcctgaaggcagcaaagataaactagatgacaccagctcctctgaaggaagcaccattgatatcaaaccagaagtagaagaggtccctgtggaacagcctgaggaatacttggatccagatgcctgcttcacagaaggttgtgtccagcggttcaagtgctgccaggtcaacatcgaggaagggctaggcaagtcttggtggatcctgcggaaaacctgcttcctcatcgtggagcacaactggtttgagaccttcatcatcttcatgattctgctgagcagtggcgccctggccttcgaggacatctacattgagcagagaaagaccatccgcaccatcctggaatatgctgacaaagtcttcacctatatcttcatcctggagatgttgctcaagtggacagcctatggcttcgtcaagttcttcaccaatgcctggtgttggctggacttcctcattgtggctgtggtggtgaatgccttggtgggcgccatcccctccatcatgaatgtgctgctggtgtgtctcatcttctggctgattttcagcatcatgggagttaacttgtttgcgggaaagtaccactactgctttaatgagacttctgaaatccgatttgaaattgaagatgtcaacaataaaactgaatgtgaaaagcttatggaggggaacaatacagagatcagatggaagaacgtgaagatcaactttgacaatgttggggcaggatacctggcccttcttcaagtagcaaccttcaaaggctggatggacatcatgtatgcagctgtagattcccggaagcctgatgagcagcctaagtatgaggacaatatctacatgtacatctattttgtcatcttcatcatcttcggctccttcttcaccctgaacctgttcattggtgtcatcattgataacttcaatcaacaaaagaaaaagttcggaggtcaggacatcttcatgaccgaagaacagaagaagtactacaatgccatgaaaaagctgggctcaaagaagccacagaaacctattccccgccccttgaacaaaatccaaggaatcgtctttgattttgtcactcagcaagcctttgacattgttatcatgatgctcatctgccttaacatggtgacaatgatggtggagacagacactcaaagcaagcagatggagaacatcctctactggattaacctggtgtttgttatcttcttcacctgtgagtgtgtgctcaaaatgtttgcgttgaggcactactacttcaccattggctggaacatcttcgacttcgtggtagtcatcctctccattgtgggaatgttcctggcagatataattgagaaatactttgtttccccaaccctattccgagtcatccgattggcccgtattgggcgcatcttgcgtctgatcaaaggcgccaaagggattcgtaccctgctctttgccttaatgatgtccttgcctgccctgttcaacatcggccttctgctcttcctggtcatgttcatcttctccatttttgggatgtccaattttgcatatgtgaagcacgaggctggtatcgatgacatgttcaactttgagacatttggcaacagcatgatctgcctgtttcaaatcacaacctcagctggttgggatggcctgctgctgcccatcctaaaccgcccccctgactgcagcctagataaggaacacccagggagtggctttaagggagattgtgggaacccctcagtgggcatcttcttctttgtaagctacatcatcatctctttcctaattgtcgtgaacatgtacattgccatcatcctggagaacttcagtgtagccacagaggaaagtgcagaccctctgagtgaggatgactttgagaccttctatgagatctgggagaagttcgaccccgatgccacccagttcattgagtactgtaagctggcagactttgcagatgccttggagcatcctctccgagtgcccaagcccaataccattgagctcatcgctatggatctgccaatggtgagcggggatcgcatccactgcttggacatcctttttgccttcaccaagcgggtcctgggagatagcggggagttggacatcctgcggcagcagatggaagagcggttcgtggcatccaatccttccaaagtgtcttacgagccaatcacaaccacactgcgtcgcaagcaggaggaggtatctgcagtggtcctgcagcgtgcctaccggggacatttggcaaggcggggcttcatctgcaaaaagacaacttctaataagctggagaatggaggcacacaccgggagaaaaaagagagcaccccatctacagcctccctcccgtcctatgacagtgtaactaaacctgaaaaggagaaacagcagcgggcagaggaaggaagaagggaaagagccaaaagacaaaaagaggtcagagaatccaagtgttag

SEQ ID NO: 28428 - DNA, 3858 bp, Homo sapiens
  source 1..3858: mol_type = unassigned DNA
tttctttctccacagacctttgtagtattaaacagagggaaaactctcttcagatttagtgccacgcctgccttgtacattttaagtccttttaacctgataagaagaatagctattaaaattttgatacattcattatttagcatgatcattatgtgcactattttgaccaactgtgtattcatgacttttagtaaccctcctgactggtcgaagaatgtggagtacacgttcacagggatttatacatttgaatcactagtgaaaatcattgcaagaggtttctgcatagatggctttacctttttacgggacccatggaactggttagatttcagtgtcatcatgatggcgtatataacagagtttgtaaacctaggcaatgtttcagctctacgcactttcagggtactgagggctttgaaaactatttcggtaatcccaggcctgaagacaattgtgggtgccctgattcagtctgtgaagaaactgtcagatgtgatgatcctgacagtgttctgcctgagtgtttttgccttgatcggactgcagctgttcatggggaaccttcgaaacaagtgtgttgtgtggcccataaacttcaacgagagctatcttgaaaatggcaccaaaggctttgattgggaagagtatatcaacaataaaacaaatttctacacagttcctggcatgctggaacctttactctgtgggaacagttctgatgctgggcaatgcccagagggataccagtgtatgaaagcaggaaggaaccccaactatggttacacaagttttgacacttttagctgggccttcttggcattatttcgccttatgacccaggactattgggaaaacttgtatcaattgactttacgagcagccgggaaaacatacatgatcttcttcgtcttggtcatctttgtgggttctttctatctggtgaacttgatcttggctgtggtggccatggcttatgaagaacagaatcaggcaacactggaggaggcagaacaaaaagaggctgaatttaaagcaatgttggagcaacttaagaagcaacaggaagaggcacaggctgctgcgatggccacttcagcaggaactgtctcagaagatgccatagaggaagaaggtgaagaaggagggggctcccctcggagctcttctgaaatctctaaactcagctcaaagagtgcaaaggaaagacgtaacaggagaaagaagaggaagcaaaaggaactctctgaaggagaggagaaaggggatcccgagaaggtgtttaagtcagagtcagaagatggcatgagaaggaaggcctttcggctgccagacaacagaatagggaggaaattttccatcatgaatcagtcactgctcagcatcccaggctcgcccttcctctcccgccacaacagcaagagcagcatcttcagtttcaggggacctgggcggttccgagacccgggctccgagaatgagttcgcggatgacgagcacagcacggtggaggagagcgagggccgccgggactccctcttcatccccatccgggcccgcgagcgccggagcagctacagcggctacagcggctacagccagggcagccgctcctcgcgcatcttccccagcctgcggcgcagcgtgaagcgcaacagcacggtggactgcaacggcgtggtgtccctcatcggcggccccggctcccacatcggcgggcgtctcctgccagaggctacaactgaggtggaaattaagaagaaaggccctggatctcttttagtttccatggaccaattagcctcctacgggcggaaggacagaatcaacagtataatgagtgttgttacaaatacactagtagaagaactggaagagtctcagagaaagtgcccgccatgctggtataaatttgccaacactttcctcatctgggagtgccacccctactggataaaactgaaagagattgtgaacttgatagttatggacccttttgtggatttagccatcaccatctgcatcgtcctgaatacactgtttatggcaatggagcaccatcctatgacaccacaatttgaacatgtcttggctgtaggaaatctggttttcactggaattttcacagcggaaatgttcctgaagctcatagccatggatccctactattatttccaagaaggttggaacatttttgacggatttattgtctccctcagtttaatggaactgagtctagcagacgtggaggggctttcagtgctgcgatctttccgattgctccgagtcttcaaattggccaaatcctggcccaccctgaacatgctaatcaagattattggaaattcagtgggtgccctgggcaacctgacactggtgctggccattattgtcttcatctttgccgtggtggggatgcaactctttggaaaaagctacaaagagtgtgtctgcaagatcaaccaggactgtgaactccctcgctggcatatgcatgactttttccattccttcctcattgtctttcgagtgttgtgcggggagtggattgagaccatgtgggactgcatggaagtggcaggccaggccatgtgcctcattgtctttatgatggtcatggtgattggcaacttggtggtgctgaacctgtttctggccttgctcctgagctccttcagtgcagacaacctggctgccacagatgacgatggggaaatgaacaacctccagatctcagtgatccgtatcaagaagggtgtggcctggaccaaactaaaggtgcacgccttcatgcaggcccactttaagcagcgtgaggctgatgaggtgaagcctctggatgagttgtatgaaaagaaggccaactgtatcgccaatcacaccggtgcagacatccaccggaatggtgacttccagaagaatggcaatggcacaaccagcggcattggcagcagcgtggagaagtacatcattgatgaggaccacatgtccttcatcaacaaccccaacttgactgtacgggtacccattgctgtgggcgagtctgactttgagaacctcaacacagaggatgttagcagcgagtcggatcctgaaggcagcaaagataaactagatgacaccagctcctctgaaggaagcaccattgatatcaaaccagaagtagaagaggtccctgtggaacagcctgaggaatacttggatccagatgcctgcttcacagaaggttgtgtccagcggttcaagtgctgccaggtcaacatcgaggaagggctaggcaagtcttggtggatcctgcggaaaacctgcttcctcatcgtggagcacaactggtttgagaccttcatcatcttcatgattctgctgagcagtggcgccctggccttcgaggacatctacattgagcagagaaagaccatccgcaccatcctggaatatgctgacaaagtcttcacctatatcttcatcctggagatgttgctcaagtggacagcctatggcttcgtcaagttcttcaccaatgcctggtgttggctggacttcctcattgtggctgtaccattaaatttgtctggcttaatttaatggggacttctgggacctgcagagactgtaaagggcgagggtggtggtgaatgccttggtgggcgccatcccctccatcatgaatgtgctgctggtgtgtctcatcttctggctgattttcagcatcatgggagttaacttgtttgcgggaaagtaccactactgctttaatgagacttctgaaatccgatttgaaattgaagatgtcaacaataaaactgaatgtgaaaagcttatggaggggaacaatacagagatcagatggaagaa

SEQ ID NO: 28429 - DNA, 6958 bp, Homo sapiens
  source 1..6958: mol_type = unassigned DNA
agctgacctgtcctggacgcagcataactaacgaagctgctgcaggatgagaagatggcagcgcggctgcttgcaccaccaggccctgatagtttcaagcctttcacccctgagtcactggcaaacattgagaggcgcattgctgagagcaagctcaagaaaccaccaaaggccgatggcagtcatcgggaggacgatgaggacagcaagcccaagccaaacagcgacctggaagcagggaagagtttgcctttcatctacggggacatcccccaaggcctggttgcagttcccctggaggactttgacccatactatttgacgcagaaaacctttgtagtattaaacagagggaaaactctcttcagatttagtgccacgcctgccttgtacattttaagtccttttaacctgataagaagaatagctattaaaattttgatacattcagtatttagcatgatcattatgtgcactattttgaccaactgtgtattcatgacttttagtaaccctcctgactggtcgaagaatgtggagtacacgttcacagggatttatacatttgaatcactagtgaaaatcattgcaagaggtttctgcatagatggctttacctttttacgggacccatggaactggttagatttcagtgtcatcatgatggcgtatataacagagtttgtaaacctaggcaatgtttcagctctacgcactttcagggtactgagggctttgaaaactatttcggtaatcccaggcctgaagacaattgtgggtgccctgattcagtctgtgaagaaactgtcagatgtgatgatcctgacagtgttctgcctgagtgtttttgccttgatcggactgcagctgttcatggggaaccttcgaaacaagtgtgttgtgtggcccataaacttcaacgagagctatcttgaaaatggcaccaaaggctttgattgggaagagtatatcaacaataaaacaaatttctacacagttcctggcatgctggaacctttactctgtgggaacagttctgatgctgggcaatgcccagagggataccagtgtatgaaagcaggaaggaaccccaactatggttacacaagttttgacacttttagctgggccttcttggcattatttcgccttatgacccaggactattgggaaaacttgtatcaattgactttacgagcagccgggaaaacatacatgatcttcttcgtcttggtcatctttgtgggttctttctatctggtgaacttgatcttggctgtggtggccatggcttatgaagaacagaatcaggcaacactggaggaggcagaacaaaaagaggctgaatttaaagcaatgttggagcaacttaagaagcaacaggaagaggcacaggctgctgcgatggccacttcagcaggaactgtctcagaagatgccatagaggaagaaggtgaagaaggagggggctcccctcggagctcttctgaaatctctaaactcagctcaaagagtgcaaaggaaagacgtaacaggagaaagaagaggaagcaaaaggaactctctgaaggagaggagaaaggggatcccgagaaggtgtttaagtcagagtcagaagatggcatgagaaggaaggcctttcggctgccagacaacagaatagggaggaaattttccatcatgaatcagtcactgctcagcatcccaggctcgcccttcctctcccgccacaacagcaagagcagcatcttcagtttcaggggacctgggcggttccgagacccgggctccgagaatgagttcgcggatgacgagcacagcacggtggaggagagcgagggccgccgggactccctcttcatccccatccgggcccgcgagcgccggagcagctacagcggctacagcggctacagccagggcagccgctcctcgcgcatcttccccagcctgcggcgcagcgtgaagcgcaacagcacggtggactgcaacggcgtggtgtccctcatcggcggccccggctcccacatcggcgggcgtctcctgccagaggctacaactgaggtggaaattaagaagaaaggccctggatctcttttagtttccatggaccaattagcctcctacgggcggaaggacagaatcaacagtataatgagtgttgttacaaatacactagtagaagaactggaagagtctcagagaaagtgcccgccatgctggtataaatttgccaacactttcctcatctgggagtgccacccctactggataaaactgaaagagattgtgaacttgatagttatggacccttttgtggatttagccatcaccatctgcatcgtcctgaatacactgtttatggcaatggagcaccatcctatgacaccacaatttgaacatgtcttggctgtaggaaatctggttttcactggaattttcacagcggaaatgttcctgaagctcatagccatggatccctactattatttccaagaaggttggaacatttttgacggatttattgtctccctcagtttaatggaactgagtctagcagacgtggaggggctttcagtgctgcgatctttccgattgctccgagtcttcaaattggccaaatcctggcccaccctgaacatgctaatcaagattattggaaattcagtgggtgccctgggcaacctgacactggtgctggccattattgtcttcatctttgccgtggtggggatgcaactctttggaaaaagctacaaagagtgtgtctgcaagatcaaccaggactgtgaactccctcgctggcatatgcatgactttttccattccttcctcattgtctttcgagtgttgtgcggggagtggattgagaccatgtgggactgcatggaagtggcaggccaggccatgtgcctcattgtctttatgatggtcatggtgattggcaacttggtggtgctgaacctgtttctggccttgctcctgagctccttcagtgcagacaacctggctgccacagatgacgatggggaaatgaacaacctccagatctcagtgatccgtatcaagaagggtgtggcctggaccaaactaaaggtgcacgccttcatgcaggcccactttaagcagcgtgaggctgatgaggtgaagcctctggatgagttgtatgaaaagaaggccaactgtatcgccaatcacaccggtgcagacatccaccggaatggtgacttccagaagaatggcaatggcacaaccagcggcattggcagcagcgtggagaagtacatcattgatgaggaccacatgtccttcatcaacaaccccaacttgactgtacgggtacccattgctgtgggcgagtctgactttgagaacctcaacacagaggatgttagcagcgagtcggatcctgaaggcagcaaagataaactagatgacaccagctcctctgaaggaagcaccattgatatcaaaccagaagtagaagaggtccctgtggaacagcctgaggaatacttggatccagatgcctgcttcacagaaggttgtgtccagcggttcaagtgctgccaggtcaacatcgaggaagggctaggcaagtcttggtggatcctgcggaaaacctgcttcctcatcgtggagcacaactggtttgagaccttcatcatcttcatgattctgctgagcagtggcgccctggccttcgaggacatctacattgagcagagaaagaccatccgcaccatcctggaatatgctgacaaagtcttcacctatatcttcatcctggagatgttgctcaagtggacagcctatggcttcgtcaagttcttcaccaatgcctggtgttggctggacttcctcattgtggctgtggtggtgaatgccttggtgggcgccatcccctccatcatgaatgtgctgctggtgtgtctcatcttctggctgattttcagcatcatgggagttaacttgtttgcgggaaagtaccactactgctttaatgagacttctgaaatccgatttgaaattgaagatgtcaacaataaaactgaatgtgaaaagcttatggaggggaacaatacagagatcagatggaagaacgtgaagatcaactttgacaatgttggggcaggatacctggcccttcttcaagtagcaaccttcaaaggctggatggacatcatgtatgcagctgtagattcccggaagcctgatgagcagcctaagtatgaggacaatatctacatgtacatctattttgtcatcttcatcatcttcggctccttcttcaccctgaacctgttcattggtgtcatcattgataacttcaatcaacaaaagaaaaagttcggaggtcaggacatcttcatgaccgaagaacagaagaagtactacaatgccatgaaaaagctgggctcaaagaagccacagaaacctattccccgccccttgaacaaaatccaaggaatcgtctttgattttgtcactcagcaagcctttgacattgttatcatgatgctcatctgccttaacatggtgacaatgatggtggagacagacactcaaagcaagcagatggagaacatcctctactggattaacctggtgtttgttatcttcttcacctgtgagtgtgtgctcaaaatgtttgcgttgaggcactactacttcaccattggctggaacatcttcgacttcgtggtagtcatcctctccattgtgggaatgttcctggcagatataattgagaaatactttgtttccccaaccctattccgagtcatccgattggcccgtattgggcgcatcttgcgtctgatcaaaggcgccaaagggattcgtaccctgctctttgccttaatgatgtccttgcctgccctgttcaacatcggccttctgctcttcctggtcatgttcatcttctccatttttgggatgtccaattttgcatatgtgaagcacgaggctggtatcgatgacatgttcaactttgagacatttggcaacagcatgatctgcctgtttcaaatcacaacctcagctggttgggatggcctgctgctgcccatcctaaaccgcccccctgactgcagcctagataaggaacacccagggagtggctttaagggagattgtgggaacccctcagtgggcatcttcttctttgtaagctacatcatcatctctttcctaattgtcgtgaacatgtacattgccatcatcctggagaacttcagtgtagccacagaggaaagtgcagaccctctgagtgaggatgactttgagaccttctatgagatctgggagaagttcgaccccgatgccacccagttcattgagtactgtaagctggcagactttgcagatgccttggagcatcctctccgagtgcccaagcccaataccattgagctcatcgctatggatctgccaatggtgagcggggatcgcatccactgcttggacatcctttttgccttcaccaagcgggtcctgggagatagcggggagttggacatcctgcggcagcagatggaagagcggttcgtggcatccaatccttccaaagtgtcttacgagccaatcacaaccacactgcgtcgcaagcaggaggaggtatctgcagtggtcctgcagcgtgcctaccggggacatttggcaaggcggggcttcatctgcaaaaagacaacttctaataagctggagaatggaggcacacaccgggagaaaaaagagagcaccccatctacagcctccctcccgtcctatgacagtgtaactaaacctgaaaaggagaaacagcagcgggcagaggaaggaagaagggaaagagccaaaagacaaaaagaggtcagagaatccaagtgttagaggagaacaaaaattcagtattatacagatctaaaactcgcaagtgaaagattgtttacaaacttcctgaatattatcaatgcagaacagctgtggagactctaacctgaagatctataccaaacgtcgtctgcttaccacgtaacacagctgcatcttgagcagtgacctgccaagggcaaaggaccccgctccctagacttacagattttctaatgcttgggcaggtggttactgcatgttccacatcagtcaatgcaacttaggacaaaactaaccagatacagaaacagaagagaggctgccgggaccagcatatttccgttgcagccaaatggattttattttttcattttattgattctcagaagcagaaagcatcactttaaaagttcgtttgttcatgcaaactatatttgcattcttacattagttaagctaagcagcaaaaagaaaacacacacacacactcacatttagcccatgtcatttaattgtcagtttctttgacataaagcgcatcttctccacatgggcttcacgtggtttggagatgggtgggggaaaacaatcaggtttcttcaggctgaggaggacttgctcaggccgattccaaacattgtgctcgttcaatgcgtagaaatgatttgcatgatggcatgccgtgatcagaagtcatgcatgagatccatacaccacaggacactactaatctagtcccttgcactgggtcagcctttggacaggacccagccctgcaccgttcactgtatttggagaaaatggtaagagttccataccggctacaattctttgagttcttaaaagtccttcatacaccttctgggtagggaaacaaccaactaattgactaacaccaccaacaacaaaaaacaaacccaatccaacaagcagatggatccgttgcgtgtatatgtttaacagacatctctaacatacagccattgttgcacattttgcaagatgaactatttaatgctgctctgtgtccagtacatgggggagactttgatcccaaatggcttgtactatttatgtcactgtaaaaccaaatcctagggct

SEQ ID NO: 28430 - DNA, 3253 bp, Homo sapiens
  source 1..3253: mol_type = unassigned DNA
gagacgcgagtctgagagcctgcgggcgggcggcgcgctgcaggcgagcgggcgagcgggcgcgccctgcagggagctgacctgtcctggacgcagcataactaacgaagctgctgcaggatgagaagatggcagcgcggctgcttgcaccaccaggccctgatagtttcaagcctttcacccctgagtcactggcaaacattgagaggcgcattgctgagagcaagctcaagaaaccaccaaaggccgatggcagtcatcgggaggacgatgaggacagcaagcccaagccaaacagcgacctggaagcagggaagagtttgcctttcatctacggggacatcccccaaggcctggttgcagttcccctggaggactttgacccatactatttgacgcagaaaacctttgtagtattaaacagagggaaaactctcttcagatttagtgccacgcctgccttgtacattttaagtccttttaacctgataagaagaatagctattaaaattttgatacattcagtatttagcatgatcattatgtgcactattttgaccaactgtgtattcatgacttttagtaaccctcctgactggtcgaagaatgtggagtacacgttcacagggatttatacatttgaatcactagtgaaaatcattgcaagaggtttctgcatagatggctttacctttttacgggacccatggaactggttagatttcagtgtcatcatgatggcatatgtgacagagtttgtggacctgggcaatgtctcagcgctgagaacattcagggttctccgagctttgaaaactatctctgtaattccaggcctgaagacaattgtgggtgccctgattcagtctgtgaagaaactgtcagatgtgatgatcctgacagtgttctgcctgagtgtttttgccttgatcggactgcagctgttcatggggaaccttcgaaacaagtgtgttgtgtggcccataaacttcaacgagagctatcttgaaaatggcaccaaaggctttgattgggaagagtatatcaacaataaaacaaatttctacacagttcctggcatgctggaacctttactctgtgggaacagttctgatgctgggcaatgcccagagggataccagtgtatgaaagcaggaaggaaccccaactatggttacacaagttttgacacttttagctgggccttcttggcattatttcgccttatgacccaggactattgggaaaacttgtatcaattgactttacgagcagccgggaaaacatacatgatcttcttcgtcttggtcatctttgtgggttctttctatctggtgaacttgatcttggctgtggtggccatggcttatgaagaacagaatcaggcaacactggaggaggcagaacaaaaagaggctgaatttaaagcaatgttggagcaacttaagaagcaacaggaagaggcacaggctgctgcgatggccacttcagcaggaactgtctcagaagatgccatagaggaagaaggtgaagaaggagggggctcccctcggagctcttctgaaatctctaaactcagctcaaagagtgcaaaggaaagacgtaacaggagaaagaagaggaagcaaaaggaactctctgaaggagaggagaaaggggatcccgagaaggtgtttaagtcagagtcagaagatggcatgagaaggaaggcctttcggctgccagacaacagaatagggaggaaattttccatcatgaatcagtcactgctcagcatcccaggctcgcccttcctctcccgccacaacagcaagagcagcatcttcagtttcaggggacctgggcggttccgagacccgggctccgagaatgagttcgcggatgacgagcacagcacggtggaggagagcgagggccgccgggactccctcttcatccccatccgggcccgcgagcgccggagcagctacagcggctacagcggctacagccagggcagccgctcctcgcgcatcttccccagcctgcggcgcagcgtgaagcgcaacagcacggtggactgcaacggcgtggtgtccctcatcggcggccccggctcccacatcggcgggcgtctcctgccagaggctacaactgaggtggaaattaagaagaaaggccctggatctcttttagtttccatggaccaattagcctcctacgggcggaaggacagaatcaacagtataatgagtgttgttacaaatacactagtagaagaactggaagagtctcagagaaagtgcccgccatgctggtataaatttgccaacactttcctcatctgggagtgccacccctactggataaaactgaaagagattgtgaacttgatagttatggacccttttgtggatttagccatcaccatctgcatcgtcctgaatacactgtttatggcaatggagcaccatcctatgacaccacaatttgaacatgtcttggctgtaggaaatctggttttcactggaattttcacagcggaaatgttcctgaagctcatagccatggatccctactattatttccaagaaggttggaacatttttgacggatttattgtctccctcagtttaatggaactgagtctagcagacgtggaggggctttcagtgctgcgatctttccgattgctccgagtcttcaaattggccaaatcctggcccaccctgaacatgctaatcaagattattggaaattcagtgggtgccctgggcaacctgacactggtgctggccattattgtcttcatctttgccgtggtggggatgcaactctttggaaaaagctacaaagagtgtgtctgcaagatcaaccaggactgtgaactccctcgctggcatatgcatgactttttccattccttcctcattgtctttcgagtgttgtgcggggagtggattgagaccatgtgggactgcatggaagtggcaggccaggccatgtgcctcattgtctttatgatggtcatggtgattggcaacttggtggttagtactaatttgtagatatttttgttctacaccctgaatattctacccctggcccagaagcccaagtccttctactgcttagtccttctactacccgtcatgtttgttgatttttattctttcttggcccagaaaccctaaggtacaaatgaaggagaggagagagatacttacagagtgcctacttagtcatgacccccacaacttgtcaacccttttcc

SEQ ID NO: 28431 - DNA, 8112 bp, Homo sapiens
  source 1..8112: mol_type = unassigned DNA
atggagcaaacagtgcttgtaccaccaggacctgacagcttcaacttcttcaccagagaatctcttgcggctattgaaagacgcattgcagaagaaaaggcaaagaatcccaaaccagacaaaaaagatgacgacgaaaatggcccaaagccaaatagtgacttggaagctggaaagaaccttccatttatttatggagacattcctccagagatggtgtcagagcccctggaggacctggacccctactatatcaataagaaaacttttatagtattgaataaagggaaggccatcttccggttcagtgccacctctgccctgtacattttaactcccttcaatcctcttaggaaaatagctattaagattttggtacattcattattcagcatgctaattatgtgcactattttgacaaactgtgtgtttatgacaatgagtaaccctcctgattggacaaagaatgtagaatacaccttcacaggaatatatacttttgaatcacttataaaaattattgcaaggggattctgtttagaagattttactttccttcgggatccatggaactggctcgatttcactgtcattacatttgcgtacgtcacagagtttgtggacctgggcaatgtctcggcattgagaacattcagagttctccgagcattgaagacgatttcagtcattccaggcctgaaaaccattgtgggagccctgatccagtctgtgaagaagctctcagatgtaatgatcctgactgtgttctgtctgagcgtatttgctctaattgggctgcagctgttcatgggcaacctgaggaataaatgtatacaatggcctcccaccaatgcttccttggaggaacatagtatagaaaagaatataactgtgaattataatggtacacttataaatgaaactgtctttgagtttgactggaagtcatatattcaagattcaagatatcattatttcctggagggttttttagatgcactactatgtggaaatagctctgatgcaggccaatgtccagagggatatatgtgtgtgaaagctggtagaaatcccaattatggctacacaagctttgataccttcagttgggcttttttgtccttgtttcgactaatgactcaggacttctgggaaaatctttatcaactgacattacgtgctgctgggaaaacgtacatgatattttttgtattggtcattttcttgggctcattctacctaataaatttgatcctggctgtggtggccatggcctacgaggaacagaatcaggccaccttggaagaagcagaacagaaagaggccgaatttcagcagatgattgaacagcttaaaaagcaacaggaggcagctcagcaggcagcaacggcaactgcctcagaacattccagagagcccagtgcagcaggcaggctctcagacagctcatctgaagcctctaagttgagttccaagagtgctaaggaaagaagaaatcggaggaagaaaagaaaacagaaagagcagtctggtggggaagagaaagatgaggatgaattccaaaaatctgaatctgaggacagcatcaggaggaaaggttttcgcttctccattgaagggaaccgattgacatatgaaaagaggtactcctccccacaccagtctttgttgagcatccgtggctccctattttcaccaaggcgaaatagcagaacaagccttttcagctttagagggcgagcaaaggatgtgggatctgagaacgacttcgcagatgatgagcacagcacctttgaggataacgagagccgtagagattccttgtttgtgccccgacgacacggagagagacgcaacagcaacctgagtcagaccagtaggtcatcccggatgctggcagtgtttccagcgaatgggaagatgcacagcactgtggattgcaatggtgtggtttccttggttggtggaccttcagttcctacatcgcctgttggacagcttctgccagaggtgataatagataagccagctactgatgacaatggaacaaccactgaaactgaaatgagaaagagaaggtcaagttctttccacgtttccatggactttctagaagatccttcccaaaggcaacgagcaatgagtatagccagcattctaacaaatacagtagaagaacttgaagaatccaggcagaaatgcccaccctgttggtataaattttccaacatattcttaatctgggactgttctccatattggttaaaagtgaaacatgttgtcaacctggttgtgatggacccatttgttgacctggccatcaccatctgtattgtcttaaatactcttttcatggccatggagcactatccaatgacggaccatttcaataatgtgcttacagtaggaaacttggttttcactgggatctttacagcagaaatgtttctgaaaattattgccatggatccttactattatttccaagaaggctggaatatctttgacggttttattgtgacgcttagcctggtagaacttggactcgccaatgtggaaggattatctgttctccgttcatttcgattgctgcgagttttcaagttggcaaaatcttggccaacgttaaatatgctaataaagatcatcggcaattccgtgggggctctgggaaatttaaccctcgtcttggccatcatcgtcttcatttttgccgtggtcggcatgcagctctttggtaaaagctacaaagattgtgtctgcaagatcgccagtgattgtcaactcccacgctggcacatgaatgacttcttccactccttcctgattgtgttccgcgtgctgtgtggggagtggatagagaccatgtgggactgtatggaggttgctggtcaagccatgtgccttactgtcttcatgatggtcatggtgattggaaacctagtggtcctgaatctctttctggccttgcttctgagctcatttagtgcagacaaccttgcagccactgatgatgataatgaaatgaataatctccaaattgctgtggataggatgcacaaaggagtagcttatgtgaaaagaaaaatatatgaatttattcaacagtccttcattaggaaacaaaagattttagatgaaattaaaccacttgatgatctaaacaacaagaaagacagttgtatgtccaatcatacagcagaaattgggaaagatcttgactatcttaaagatgtaaatggaactacaagtggtataggaactggcagcagtgttgaaaaatacattattgatgaaagtgattacatgtcattcataaacaaccccagtcttactgtgactgtaccaattgctgtaggagaatctgactttgaaaatttaaacacggaagactttagtagtgaatcggatctggaagaaagcaaagagaaactgaatgaaagcagtagctcatcagaaggtagcactgtggacatcggcgcacctgtagaagaacagcccgtagtggaacctgaagaaactcttgaaccagaagcttgtttcactgaaggctgtgtacaaagattcaagtgttgtcaaatcaatgtggaagaaggcagaggaaaacaatggtggaacctgagaaggacgtgtttccgaatagttgaacataactggtttgagaccttcattgttttcatgattctccttagtagtggtgctctggcatttgaagatatatatattgatcagcgaaagacgattaagacgatgttggaatatgctgacaaggttttcacttacattttcattctggaaatgcttctaaaatgggtggcatatggctatcaaacatatttcaccaatgcctggtgttggctggacttcttaattgttgatgtttcattggtcagtttaacagcaaatgccttgggttactcagaacttggagccatcaaatctctcaggacactaagagctctgagacctctaagagccttatctcgatttgaagggatgagggtggttgtgaatgcccttttaggagcaattccatccatcatgaatgtgcttctggtttgtcttatattctggctaattttcagcatcatgggcgtaaatttgtttgctggcaaattctaccactgtattaacaccacaactggtgacaggtttgacatcgaagacgtgaataatcatactgattgcctaaaactaatagaaagaaatgagactgctcgatggaaaaatgtgaaagtaaactttgataatgtaggatttgggtatctctctttgcttcaagttgccacattcaaaggatggatggatataatgtatgcagcagttgattccagaaatgtggaactccagcctaagtatgaagaaagtctgtacatgtatctttactttgttattttcatcatctttgggtccttcttcaccttgaacctgtttattggtgtcatcatagataatttcaaccagcagaaaaagaagtttggaggtcaagacatctttatgacagaagaacagaagaaatactataatgcaatgaaaaaattaggatcgaaaaaaccgcaaaagcctatacctcgaccaggaaacaaatttcaaggaatggtctttgacttcgtaaccagacaagtttttgacataagcatcatgattctcatctgtcttaacatggtcacaatgatggtggaaacagatgaccagagtgaatatgtgactaccattttgtcacgcatcaatctggtgttcattgtgctatttactggagagtgtgtactgaaactcatctctctacgccattattattttaccattggatggaatatttttgattttgtggttgtcattctctccattgtaggtatgtttcttgccgagctgatagaaaagtatttcgtgtcccctaccctgttccgagtgatccgtcttgctaggattggccgaatcctacgtctgatcaaaggagcaaaggggatccgcacgctgctctttgctttgatgatgtcccttcctgcgttgtttaacatcggcctcctactcttcctagtcatgttcatctacgccatctttgggatgtccaactttgcctatgttaagagggaagttgggatcgatgacatgttcaactttgagacctttggcaacagcatgatctgcctattccaaattacaacctctgctggctgggatggattgctagcacccattctcaacagtaagccacccgactgtgaccctaataaagttaaccctggaagctcagttaagggagactgtgggaacccatctgttggaattttcttttttgtcagttacatcatcatatccttcctggttgtggtgaacatgtacatcgcggtcatcctggagaacttcagtgttgctactgaagaaagtgcagagcctctgagtgaggatgactttgagatgttctatgaggtttgggagaagtttgatcccgatgcaactcagttcatggaatttgaaaaattatctcagtttgcagctgcgcttgaaccgcctctcaatctgccacaaccaaacaaactccagctcattgccatggatttgcccatggtgagtggtgaccggatccactgtcttgatatcttatttgcttttacaaagcgggttctaggagagagtggagagatggatgctctacgaatacagatggaagagcgattcatggcttccaatccttccaaggtctcctatcagccaatcactactactttaaaacgaaaacaagaggaagtatctgctgtcattattcagcgtgcttacagacgccaccttttaaagcgaactgtaaaacaagcttcctttacgtacaataaaaacaaaatcaaaggtggggctaatcttcttataaaagaagacatgataattgacagaataaatgaaaactctattacagaaaaaactgatctgaccatgtccactgcagcttgtccaccttcctatgaccgggtgacaaagccaattgtggaaaaacatgagcaagaaggcaaagatgaaaaagccaaagggaaataaatgaaaataaataaaaataattgggtgacaaattgtttacagcctgtgaaggtgatgtatttttatcaacaggactcctttaggaggtcaatgccaaactgactgtttttacacaaatctccttaaggtcagtgcctacaataagacagtgaccccttgtcagcaaactgtgactctgtgtaaaggggagatgaccttgacaggaggttactgttctcactaccagctgacactgctgaagataagatgcacaatggctagtcagactgtagggaccagtttcaaggggtgcaaacctgtgattttggggttgtttaacatgaaacactttagtgtagtaattgtatccactgtttgcatttcaactgccacatttgtcacatttttatggaatctgttagtggattcatctttttgttaatccatgtgtttattatatgtgactatttttgtaaacgaagtttctgttgagaaataggctaaggacctctataacaggtatgccacctggggggtatggcaaccacatggccctcccagctacacaaagtcgtggtttgcatgagggcatgctgcacttagagatcatgcatgagaaaaagtcacaagaaaaacaaattcttaaatttcaccatatttctgggaggggtaattgggtgataagtggaggtgctttgttgatcttgttttgcgaaatccagcccctagaccaagtagattatttgtgggtaggccagtaaatcttagcaggtgcaaacttcattcaaatgtttggagtcataaatgttatgtttctttttgttgtattaaaaaaaaaacctgaatagtgaatattgcccctcaccctccaccgccagaagactgaattgaccaaaattactctttataaatttctgctttttcctgcactttgtttagccatcttcggctctcagcaaggttgacactgtatatgttaatgaaatgctatttattatgtaaatagtcattttaccctgtggtgcacgtttgagcaaacaaataatgacctaagcacagtatttattgcatcaaatatgtaccacaagaaatgtagagtgcaagctttacacaggtaataaaatgtattctgtaccatttatagatagtttggatgctatcaatgcatgtttatattaccatgctgctgtatctggtttctctcactgctcagaatctcatttatgagaaaccatatgtcagtggtaaagtcaaggaaattgttcaacagatctcatttatttaagtcattaagcaatagtttgcagcactttaacagctttttggttatttttacattttaagtggataacatatggtatatagccagactgtacagacatgtttaaaaaaacacactgcttaacctattaaatatgtgtttagaattttataagcaaatataaatactgtaaaaagtcactttattttatttttcagcattatgtacataaatatgaagaggaaattatcttcaggttgatatcacaatcacttttcttactttctgtccatagtactttttcatgaaagaaatttgctaaataagacatgaaaacaagactgggtagttgtagatttctgctttttaaattacatttgctaattttagattatttcacaattttaaggagcaaaataggttcacgattcatatccaaattatgctttgcaattggaaaagggtttaaaattttatttatatttctggtagtacctgcactaactgaattgaaggtagtgcttatgttatttttgttctttttttctgacttcggtttatgttttcatttctttggagtaatgctgctctagattgttctaaatagaatgtgggcttcataatttttttttccacaaaaacagagtagtcaacttatatagtcaattacatcaggacattttgtgtttcttacagaagcaaaccataggctcctcttttccttaaaactacttagataaactgtattcgtgaactgcatgctggaaaatgctactattatgctaaataatgctaaccaacatttaaaatgtgcaaaactaataaagattacattttttatt

SEQ ID NO: 28432 - DNA, 8097 bp, Homo sapiens
  source 1..8097: mol_type = unassigned DNA
aatgtgcaggatgacaagatggagcaaacagtgcttgtaccaccaggacctgacagcttcaacttcttcaccagagaatctcttgcggctattgaaagacgcattgcagaagaaaaggcaaagaatcccaaaccagacaaaaaagatgacgacgaaaatggcccaaagccaaatagtgacttggaagctggaaagaaccttccatttatttatggagacattcctccagagatggtgtcagagcccctggaggacctggacccctactatatcaataagaaaacttttatagtattgaataaagggaaggccatcttccggttcagtgccacctctgccctgtacattttaactcccttcaatcctcttaggaaaatagctattaagattttggtacattcattattcagcatgctaattatgtgcactattttgacaaactgtgtgtttatgacaatgagtaaccctcctgattggacaaagaatgtagaatacaccttcacaggaatatatacttttgaatcacttataaaaattattgcaaggggattctgtttagaagattttactttccttcgggatccatggaactggctcgatttcactgtcattacatttgcgtacgtcacagagtttgtggacctgggcaatgtctcggcattgagaacattcagagttctccgagcattgaagacgatttcagtcattccaggcctgaaaaccattgtgggagccctgatccagtctgtgaagaagctctcagatgtaatgatcctgactgtgttctgtctgagcgtatttgctctaattgggctgcagctgttcatgggcaacctgaggaataaatgtatacaatggcctcccaccaatgcttccttggaggaacatagtatagaaaagaatataactgtgaattataatggtacacttataaatgaaactgtctttgagtttgactggaagtcatatattcaagattcaagatatcattatttcctggagggttttttagatgcactactatgtggaaatagctctgatgcaggccaatgtccagagggatatatgtgtgtgaaagctggtagaaatcccaattatggctacacaagctttgataccttcagttgggcttttttgtccttgtttcgactaatgactcaggacttctgggaaaatctttatcaactgacattacgtgctgctgggaaaacgtacatgatattttttgtattggtcattttcttgggctcattctacctaataaatttgatcctggctgtggtggccatggcctacgaggaacagaatcaggccaccttggaagaagcagaacagaaagaggccgaatttcagcagatgattgaacagcttaaaaagcaacaggaggcagctcagcaggcagcaacggcaactgcctcagaacattccagagagcccagtgcagcaggcaggctctcagacagctcatctgaagcctctaagttgagttccaagagtgctaaggaaagaagaaatcggaggaagaaaagaaaacagaaagagcagtctggtggggaagagaaagatgaggatgaattccaaaaatctgaatctgaggacagcatcaggaggaaaggttttcgcttctccattgaagggaaccgattgacatatgaaaagaggtactcctccccacaccagtctttgttgagcatccgtggctccctattttcaccaaggcgaaatagcagaacaagccttttcagctttagagggcgagcaaaggatgtgggatctgagaacgacttcgcagatgatgagcacagcacctttgaggataacgagagccgtagagattccttgtttgtgccccgacgacacggagagagacgcaacagcaacctgagtcagaccagtaggtcatcccggatgctggcagtgtttccagcgaatgggaagatgcacagcactgtggattgcaatggtgtggtttccttggttggtggaccttcagttcctacatcgcctgttggacagcttctgccagagggaacaaccactgaaactgaaatgagaaagagaaggtcaagttctttccacgtttccatggactttctagaagatccttcccaaaggcaacgagcaatgagtatagccagcattctaacaaatacagtagaagaacttgaagaatccaggcagaaatgcccaccctgttggtataaattttccaacatattcttaatctgggactgttctccatattggttaaaagtgaaacatgttgtcaacctggttgtgatggacccatttgttgacctggccatcaccatctgtattgtcttaaatactcttttcatggccatggagcactatccaatgacggaccatttcaataatgtgcttacagtaggaaacttggttttcactgggatctttacagcagaaatgtttctgaaaattattgccatggatccttactattatttccaagaaggctggaatatctttgacggttttattgtgacgcttagcctggtagaacttggactcgccaatgtggaaggattatctgttctccgttcatttcgattgctgcgagttttcaagttggcaaaatcttggccaacgttaaatatgctaataaagatcatcggcaattccgtgggggctctgggaaatttaaccctcgtcttggccatcatcgtcttcatttttgccgtggtcggcatgcagctctttggtaaaagctacaaagattgtgtctgcaagatcgccagtgattgtcaactcccacgctggcacatgaatgacttcttccactccttcctgattgtgttccgcgtgctgtgtggggagtggatagagaccatgtgggactgtatggaggttgctggtcaagccatgtgccttactgtcttcatgatggtcatggtgattggaaacctagtggtcctgaatctctttctggccttgcttctgagctcatttagtgcagacaaccttgcagccactgatgatgataatgaaatgaataatctccaaattgctgtggataggatgcacaaaggagtagcttatgtgaaaagaaaaatatatgaatttattcaacagtccttcattaggaaacaaaagattttagatgaaattaaaccacttgatgatctaaacaacaagaaagacagttgtatgtccaatcatacagcagaaattgggaaagatcttgactatcttaaagatgtaaatggaactacaagtggtataggaactggcagcagtgttgaaaaatacattattgatgaaagtgattacatgtcattcataaacaaccccagtcttactgtgactgtaccaattgctgtaggagaatctgactttgaaaatttaaacacggaagactttagtagtgaatcggatctggaagaaagcaaagagaaactgaatgaaagcagtagctcatcagaaggtagcactgtggacatcggcgcacctgtagaagaacagcccgtagtggaacctgaagaaactcttgaaccagaagcttgtttcactgaaggctgtgtacaaagattcaagtgttgtcaaatcaatgtggaagaaggcagaggaaaacaatggtggaacctgagaaggacgtgtttccgaatagttgaacataactggtttgagaccttcattgttttcatgattctccttagtagtggtgctctggcatttgaagatatatatattgatcagcgaaagacgattaagacgatgttggaatatgctgacaaggttttcacttacattttcattctggaaatgcttctaaaatgggtggcatatggctatcaaacatatttcaccaatgcctggtgttggctggacttcttaattgttgatgtttcattggtcagtttaacagcaaatgccttgggttactcagaacttggagccatcaaatctctcaggacactaagagctctgagacctctaagagccttatctcgatttgaagggatgagggtggttgtgaatgcccttttaggagcaattccatccatcatgaatgtgcttctggtttgtcttatattctggctaattttcagcatcatgggcgtaaatttgtttgctggcaaattctaccactgtattaacaccacaactggtgacaggtttgacatcgaagacgtgaataatcatactgattgcctaaaactaatagaaagaaatgagactgctcgatggaaaaatgtgaaagtaaactttgataatgtaggatttgggtatctctctttgcttcaagttgccacattcaaaggatggatggatataatgtatgcagcagttgattccagaaatgtggaactccagcctaagtatgaagaaagtctgtacatgtatctttactttgttattttcatcatctttgggtccttcttcaccttgaacctgtttattggtgtcatcatagataatttcaaccagcagaaaaagaagtttggaggtcaagacatctttatgacagaagaacagaagaaatactataatgcaatgaaaaaattaggatcgaaaaaaccgcaaaagcctatacctcgaccaggaaacaaatttcaaggaatggtctttgacttcgtaaccagacaagtttttgacataagcatcatgattctcatctgtcttaacatggtcacaatgatggtggaaacagatgaccagagtgaatatgtgactaccattttgtcacgcatcaatctggtgttcattgtgctatttactggagagtgtgtactgaaactcatctctctacgccattattattttaccattggatggaatatttttgattttgtggttgtcattctctccattgtaggtatgtttcttgccgagctgatagaaaagtatttcgtgtcccctaccctgttccgagtgatccgtcttgctaggattggccgaatcctacgtctgatcaaaggagcaaaggggatccgcacgctgctctttgctttgatgatgtcccttcctgcgttgtttaacatcggcctcctactcttcctagtcatgttcatctacgccatctttgggatgtccaactttgcctatgttaagagggaagttgggatcgatgacatgttcaactttgagacctttggcaacagcatgatctgcctattccaaattacaacctctgctggctgggatggattgctagcacccattctcaacagtaagccacccgactgtgaccctaataaagttaaccctggaagctcagttaagggagactgtgggaacccatctgttggaattttcttttttgtcagttacatcatcatatccttcctggttgtggtgaacatgtacatcgcggtcatcctggagaacttcagtgttgctactgaagaaagtgcagagcctctgagtgaggatgactttgagatgttctatgaggtttgggagaagtttgatcccgatgcaactcagttcatggaatttgaaaaattatctcagtttgcagctgcgcttgaaccgcctctcaatctgccacaaccaaacaaactccagctcattgccatggatttgcccatggtgagtggtgaccggatccactgtcttgatatcttatttgcttttacaaagcgggttctaggagagagtggagagatggatgctctacgaatacagatggaagagcgattcatggcttccaatccttccaaggtctcctatcagccaatcactactactttaaaacgaaaacaagaggaagtatctgctgtcattattcagcgtgcttacagacgccaccttttaaagcgaactgtaaaacaagcttcctttacgtacaataaaaacaaaatcaaaggtggggctaatcttcttataaaagaagacatgataattgacagaataaatgaaaactctattacagaaaaaactgatctgaccatgtccactgcagcttgtccaccttcctatgaccgggtgacaaagccaattgtggaaaaacatgagcaagaaggcaaagatgaaaaagccaaagggaaataaatgaaaataaataaaaataattgggtgacaaattgtttacagcctgtgaaggtgatgtatttttatcaacaggactcctttaggaggtcaatgccaaactgactgtttttacacaaatctccttaaggtcagtgcctacaataagacagtgaccccttgtcagcaaactgtgactctgtgtaaaggggagatgaccttgacaggaggttactgttctcactaccagctgacactgctgaagataagatgcacaatggctagtcagactgtagggaccagtttcaaggggtgcaaacctgtgattttggggttgtttaacatgaaacactttagtgtagtaattgtatccactgtttgcatttcaactgccacatttgtcacatttttatggaatctgttagtggattcatctttttgttaatccatgtgtttattatatgtgactatttttgtaaacgaagtttctgttgagaaataggctaaggacctctataacaggtatgccacctggggggtatggcaaccacatggccctcccagctacacaaagtcgtggtttgcatgagggcatgctgcacttagagatcatgcatgagaaaaagtcacaagaaaaacaaattcttaaatttcaccatatttctgggaggggtaattgggtgataagtggaggtgctttgttgatcttgttttgcgaaatccagcccctagaccaagtagattatttgtgggtaggccagtaaatcttagcaggtgcaaacttcattcaaatgtttggagtcataaatgttatgtttctttttgttgtattaaaaaaaaaacctgaatagtgaatattgcccctcaccctccaccgccagaagactgaattgaccaaaattactctttataaatttctgctttttcctgcactttgtttagccatcttcggctctcagcaaggttgacactgtatatgttaatgaaatgctatttattatgtaaatagtcattttaccctgtggtgcacgtttgagcaaacaaataatgacctaagcacagtatttattgcatcaaatatgtaccacaagaaatgtagagtgcaagctttacacaggtaataaaatgtattctgtaccatttatagatagtttggatgctatcaatgcatgtttatattaccatgctgctgtatctggtttctctcactgctcagaatctcatttatgagaaaccatatgtcagtggtaaagtcaaggaaattgttcaacagatctcatttatttaagtcattaagcaatagtttgcagcactttaacagctttttggttatttttacattttaagtggataacatatggtatatagccagactgtacagacatgtttaaaaaaacacactgcttaacctattaaatatgtgtttagaattttataagcaaatataaatactgtaaaaagtcactttattttatttttcagcattatgtacataaatatgaagaggaaattatcttcaggttgatatcacaatcacttttcttactttctgtccatagtactttttcatgaaagaaatttgctaaataagacatgaaaacaagactgggtagttgtagatttctgctttttaaattacatttgctaattttagattatttcacaattttaaggagcaaaataggttcacgattcatatccaaattatgctttgcaattggaaaagggtttaaaattttatttatatttctggtagtacctgcactaactgaattgaaggtagtgcttatgttatttttgttctttttttctgacttcggtttatgttttcatttctttggagtaatgctgctctagattgttctaaatagaatgtgggcttcataatttttttttccacaaaaacagagtagtcaacttatatagtcaattacatcaggacattttgtgtttcttacagaagcaaaccataggctcctcttttccttaaaactacttagataaactgtattcgtgaactgcatgctggaaaatgctactattatgctaaataatgctaaccaacatttaaaatgtgcaaaactaataaagattacattttttatt

SEQ ID NO: 28433 - DNA, 5946 bp, Homo sapiens
  source 1..5946: mol_type = unassigned DNA
atggagcaaacagtgcttgtaccaccaggacctgacagcttcaacttcttcaccagagaatctcttgcggctattgaaagacgcattgcagaagaaaaggcaaagaatcccaaaccagacaaaaaagatgacgacgaaaatggcccaaagccaaatagtgacttggaagctggaaagaaccttccatttatttatggagacattcctccagagatggtgtcagagcccctggaggacctggacccctactatatcaataagaaaacttttatagtattgaataaagggaaggccatcttccggttcagtgccacctctgccctgtacattttaactcccttcaatcctcttaggaaaatagctattaagattttggtacattcattattcagcatgctaattatgtgcactattttgacaaactgtgtgtttatgacaatgagtaaccctcctgattggacaaagaatgtagaatacaccttcacaggaatatatacttttgaatcacttataaaaattattgcaaggggattctgtttagaagattttactttccttcgggatccatggaactggctcgatttcactgtcattacatttgcgtacgtcacagagtttgtggacctgggcaatgtctcggcattgagaacattcagagttctccgagcattgaagacgatttcagtcattccaggcctgaaaaccattgtgggagccctgatccagtctgtgaagaagctctcagatgtaatgatcctgactgtgttctgtctgagcgtatttgctctaattgggctgcagctgttcatgggcaacctgaggaataaatgtatacaatggcctcccaccaatgcttccttggaggaacatagtatagaaaagaatataactgtgaattataatggtacacttataaatgaaactgtctttgagtttgactggaagtcatatattcaagattcaagatatcattatttcctggagggttttttagatgcactactatgtggaaatagctctgatgcaggccaatgtccagagggatatatgtgtgtgaaagctggtagaaatcccaattatggctacacaagctttgataccttcagttgggcttttttgtccttgtttcgactaatgactcaggacttctgggaaaatctttatcaactgacattacgtgctgctgggaaaacgtacatgatattttttgtattggtcattttcttgggctcattctacctaataaatttgatcctggctgtggtggccatggcctacgaggaacagaatcaggccaccttggaagaagcagaacagaaagaggccgaatttcagcagatgattgaacagcttaaaaagcaacaggaggcagctcagcaggcagcaacggcaactgcctcagaacattccagagagcccagtgcagcaggcaggctctcagacagctcatctgaagcctctaagttgagttccaagagtgctaaggaaagaagaaatcggaggaagaaaagaaaacagaaagagcagtctggtggggaagagaaagatgaggatgaattccaaaaatctgaatctgaggacagcatcaggaggaaaggttttcgcttctccattgaagggaaccgattgacatatgaaaagaggtactcctccccacaccagtctttgttgagcatccgtggctccctattttcaccaaggcgaaatagcagaacaagccttttcagctttagagggcgagcaaaggatgtgggatctgagaacgacttcgcagatgatgagcacagcacctttgaggataacgagagccgtagagattccttgtttgtgccccgacgacacggagagagacgcaacagcaacctgagtcagaccagtaggtcatcccggatgctggcagtgtttccagcgaatgggaagatgcacagcactgtggattgcaatggtgtggtttccttgggaacaaccactgaaactgaaatgagaaagagaaggtcaagttctttccacgtttccatggactttctagaagatccttcccaaaggcaacgagcaatgagtatagccagcattctaacaaatacagtagaagaacttgaagaatccaggcagaaatgcccaccctgttggtataaattttccaacatattcttaatctgggactgttctccatattggttaaaagtgaaacatgttgtcaacctggttgtgatggacccatttgttgacctggccatcaccatctgtattgtcttaaatactcttttcatggccatggagcactatccaatgacggaccatttcaataatgtgcttacagtaggaaacttggttttcactgggatctttacagcagaaatgtttctgaaaattattgccatggatccttactattatttccaagaaggctggaatatctttgacggttttattgtgacgcttagcctggtagaacttggactcgccaatgtggaaggattatctgttctccgttcatttcgattgctgcgagttttcaagttggcaaaatcttggccaacgttaaatatgctaataaagatcatcggcaattccgtgggggctctgggaaatttaaccctcgtcttggccatcatcgtcttcatttttgccgtggtcggcatgcagctctttggtaaaagctacaaagattgtgtctgcaagatcgccagtgattgtcaactcccacgctggcacatgaatgacttcttccactccttcctgattgtgttccgcgtgctgtgtggggagtggatagagaccatgtgggactgtatggaggttgctggtcaagccatgtgccttactgtcttcatgatggtcatggtgattggaaacctagtggtcctgaatctctttctggccttgcttctgagctcatttagtgcagacaaccttgcagccactgatgatgataatgaaatgaataatctccaaattgctgtggataggatgcacaaaggagtagcttatgtgaaaagaaaaatatatgaatttattcaacagtccttcattaggaaacaaaagattttagatgaaattaaaccacttgatgatctaaacaacaagaaagacagttgtatgtccaatcatacagcagaaattgggaaagatcttgactatcttaaagatgtaaatggaactacaagtggtataggaactggcagcagtgttgaaaaatacattattgatgaaagtgattacatgtcattcataaacaaccccagtcttactgtgactgtaccaattgctgtaggagaatctgactttgaaaatttaaacacggaagactttagtagtgaatcggatctggaagaaagcaaagagaaactgaatgaaagcagtagctcatcagaaggtagcactgtggacatcggcgcacctgtagaagaacagcccgtagtggaacctgaagaaactcttgaaccagaagcttgtttcactgaaggctgtgtacaaagattcaagtgttgtcaaatcaatgtggaagaaggcagaggaaaacaatggtggaacctgagaaggacgtgtttccgaatagttgaacataactggtttgagaccttcattgttttcatgattctccttagtagtggtgctctggcatttgaagatatatatattgatcagcgaaagacgattaagacgatgttggaatatgctgacaaggttttcacttacattttcattctggaaatgcttctaaaatgggtggcatatggctatcaaacatatttcaccaatgcctggtgttggctggacttcttaattgttgatgtttcattggtcagtttaacagcaaatgccttgggttactcagaacttggagccatcaaatctctcaggacactaagagctctgagacctctaagagccttatctcgatttgaagggatgagggtggttgtgaatgcccttttaggagcaattccatccatcatgaatgtgcttctggtttgtcttatattctggctaattttcagcatcatgggcgtaaatttgtttgctggcaaattctaccactgtattaacaccacaactggtgacaggtttgacatcgaagacgtgaataatcatactgattgcctaaaactaatagaaagaaatgagactgctcgatggaaaaatgtgaaagtaaactttgataatgtaggatttgggtatctctctttgcttcaagttgccacattcaaaggatggatggatataatgtatgcagcagttgattccagaaatgtggaactccagcctaagtatgaagaaagtctgtacatgtatctttactttgttattttcatcatctttgggtccttcttcaccttgaacctgtttattggtgtcatcatagataatttcaaccagcagaaaaagaagtttggaggtcaagacatctttatgacagaagaacagaagaaatactataatgcaatgaaaaaattaggatcgaaaaaaccgcaaaagcctatacctcgaccaggaaacaaatttcaaggaatggtctttgacttcgtaaccagacaagtttttgacataagcatcatgattctcatctgtcttaacatggtcacaatgatggtggaaacagatgaccagagtgaatatgtgactaccattttgtcacgcatcaatctggtgttcattgtgctatttactggagagtgtgtactgaaactcatctctctacgccattattattttaccattggatggaatatttttgattttgtggttgtcattctctccattgtaggtatgtttcttgccgagctgatagaaaagtatttcgtgtcccctaccctgttccgagtgatccgtcttgctaggattggccgaatcctacgtctgatcaaaggagcaaaggggatccgcacgctgctctttgctttgatgatgtcccttcctgcgttgtttaacatcggcctcctactcttcctagtcatgttcatctacgccatctttgggatgtccaactttgcctatgttaagagggaagttgggatcgatgacatgttcaactttgagacctttggcaacagcatgatctgcctattccaaattacaacctctgctggctgggatggattgctagcacccattctcaacagtaagccacccgactgtgaccctaataaagttaaccctggaagctcagttaagggagactgtgggaacccatctgttggaattttcttttttgtcagttacatcatcatatccttcctggttgtggtgaacatgtacatcgcggtcatcctggagaacttcagtgttgctactgaagaaagtgcagagcctctgagtgaggatgactttgagatgttctatgaggtttgggagaagtttgatcccgatgcaactcagttcatggaatttgaaaaattatctcagtttgcagctgcgcttgaaccgcctctcaatctgccacaaccaaacaaactccagctcattgccatggatttgcccatggtgagtggtgaccggatccactgtcttgatatcttatttgcttttacaaagcgggttctaggagagagtggagagatggatgctctacgaatacagatggaagagcgattcatggcttccaatccttccaaggtctcctatcagccaatcactactactttaaaacgaaaacaagaggaagtatctgctgtcattattcagcgtgcttacagacgccaccttttaaagcgaactgtaaaacaagcttcctttacgtacaataaaaacaaaatcaaaggtggggctaatcttcttataaaagaagacatgataattgacagaataaatgaaaactctattacagaaaaaactgatctgaccatgtccactgcagcttgtccaccttcctatgaccgggtgacaaagccaattgtggaaaaacatgagcaagaaggcaaagatgaaaaagccaaagggaaataa

SEQ ID NO: 28434 - DNA, 8133 bp, Homo sapiens
  source 1..8133: mol_type = unassigned DNA
aatgtgcaggatgacaagatggagcaaacagtgcttgtaccaccaggacctgacagcttcaacttcttcaccagagaatctcttgcggctattgaaagacgcattgcagaagaaaaggcaaagaatcccaaaccagacaaaaaagatgacgacgaaaatggcccaaagccaaatagtgacttggaagctggaaagaaccttccatttatttatggagacattcctccagagatggtgtcagagcccctggaggacctggacccctactatatcaataagaaaacttttatagtattgaataaagggaaggccatcttccggttcagtgccacctctgccctgtacattttaactcccttcaatcctcttaggaaaatagctattaagattttggtacattcattattcagcatgctaattatgtgcactattttgacaaactgtgtgtttatgacaatgagtaaccctcctgattggacaaagaatgtagaatacaccttcacaggaatatatacttttgaatcacttataaaaattattgcaaggggattctgtttagaagattttactttccttcgggatccatggaactggctcgatttcactgtcattacatttgcgtacgtcacagagtttgtggacctgggcaatgtctcggcattgagaacattcagagttctccgagcattgaagacgatttcagtcattccaggcctgaaaaccattgtgggagccctgatccagtctgtgaagaagctctcagatgtaatgatcctgactgtgttctgtctgagcgtatttgctctaattgggctgcagctgttcatgggcaacctgaggaataaatgtatacaatggcctcccaccaatgcttccttggaggaacatagtatagaaaagaatataactgtgaattataatggtacacttataaatgaaactgtctttgagtttgactggaagtcatatattcaagattcaagatatcattatttcctggagggttttttagatgcactactatgtggaaatagctctgatgcaggccaatgtccagagggatatatgtgtgtgaaagctggtagaaatcccaattatggctacacaagctttgataccttcagttgggcttttttgtccttgtttcgactaatgactcaggacttctgggaaaatctttatcaactgacattacgtgctgctgggaaaacgtacatgatattttttgtattggtcattttcttgggctcattctacctaataaatttgatcctggctgtggtggccatggcctacgaggaacagaatcaggccaccttggaagaagcagaacagaaagaggccgaatttcagcagatgattgaacagcttaaaaagcaacaggaggcagctcagcaggcagcaacggcaactgcctcagaacattccagagagcccagtgcagcaggcaggctctcagacagctcatctgaagcctctaagttgagttccaagagtgctaaggaaagaagaaatcggaggaagaaaagaaaacagaaagagcagtctggtggggaagagaaagatgaggatgaattccaaaaatctgaatctgaggacagcatcaggaggaaaggttttcgcttctccattgaagggaaccgattgacatatgaaaagaggtactcctccccacaccagtctttgttgagcatccgtggctccctattttcaccaaggcgaaatagcagaacaagccttttcagctttagagggcgagcaaaggatgtgggatctgagaacgacttcgcagatgatgagcacagcacctttgaggataacgagagccgtagagattccttgtttgtgccccgacgacacggagagagacgcaacagcaacctgagtcagaccagtaggtcatcccggatgctggcagtgtttccagcgaatgggaagatgcacagcactgtggattgcaatggtgtggtttccttggttggtggaccttcagttcctacatcgcctgttggacagcttctgccagaggtgataatagataagccagctactgatgacaatggaacaaccactgaaactgaaatgagaaagagaaggtcaagttctttccacgtttccatggactttctagaagatccttcccaaaggcaacgagcaatgagtatagccagcattctaacaaatacagtagaagaacttgaagaatccaggcagaaatgcccaccctgttggtataaattttccaacatattcttaatctgggactgttctccatattggttaaaagtgaaacatgttgtcaacctggttgtgatggacccatttgttgacctggccatcaccatctgtattgtcttaaatactcttttcatggccatggagcactatccaatgacggaccatttcaataatgtgcttacagtaggaaacttggttttcactgggatctttacagcagaaatgtttctgaaaattattgccatggatccttactattatttccaagaaggctggaatatctttgacggttttattgtgacgcttagcctggtagaacttggactcgccaatgtggaaggattatctgttctccgttcatttcgattgctgcgagttttcaagttggcaaaatcttggccaacgttaaatatgctaataaagatcatcggcaattccgtgggggctctgggaaatttaaccctcgtcttggccatcatcgtcttcatttttgccgtggtcggcatgcagctctttggtaaaagctacaaagattgtgtctgcaagatcgccagtgattgtcaactcccacgctggcacatgaatgacttcttccactccttcctgattgtgttccgcgtgctgtgtggggagtggatagagaccatgtgggactgtatggaggttgctggtcaagccatgtgccttactgtcttcatgatggtcatggtgattggaaacctagtggtcctgaatctctttctggccttgcttctgagctcatttagtgcagacaaccttgcagccactgatgatgataatgaaatgaataatctccaaattgctgtggataggatgcacaaaggagtagcttatgtgaaaagaaaaatatatgaatttattcaacagtccttcattaggaaacaaaagattttagatgaaattaaaccacttgatgatctaaacaacaagaaagacagttgtatgtccaatcatacagcagaaattgggaaagatcttgactatcttaaagatgtaaatggaactacaagtggtataggaactggcagcagtgttgaaaaatacattattgatgaaagtgattacatgtcattcataaacaaccccagtcttactgtgactgtaccaattgctgtaggagaatctgactttgaaaatttaaacacggaagactttagtagtgaatcggatctggaagaaagcaaagagaaactgaatgaaagcagtagctcatcagaaggtagcactgtggacatcggcgcacctgtagaagaacagcccgtagtggaacctgaagaaactcttgaaccagaagcttgtttcactgaaggctgtgtacaaagattcaagtgttgtcaaatcaatgtggaagaaggcagaggaaaacaatggtggaacctgagaaggacgtgtttccgaatagttgaacataactggtttgagaccttcattgttttcatgattctccttagtagtggtgctctggcatttgaagatatatatattgatcagcgaaagacgattaagacgatgttggaatatgctgacaaggttttcacttacattttcattctggaaatgcttctaaaatgggtggcatatggctatcaaacatatttcaccaatgcctggtgttggctggacttcttaattgttgatgtttcattggtcagtttaacagcaaatgccttgggttactcagaacttggagccatcaaatctctcaggacactaagagctctgagacctctaagagccttatctcgatttgaagggatgagggtggttgtgaatgcccttttaggagcaattccatccatcatgaatgtgcttctggtttgtcttatattctggctaattttcagcatcatgggcgtaaatttgtttgctggcaaattctaccactgtattaacaccacaactggtgacaggtttgacatcgaagacgtgaataatcatactgattgcctaaaactaatagaaagaaatgagactgctcgatggaaaaatgtgaaagtaaactttgataatgtaggatttgggtatctctctttgcttcaagttgccacattcaaaggatggatggatataatgtatgcagcagttgattccagaaatgtggaactccagcctaagtatgaagaaagtctgtacatgtatctttactttgttattttcatcatctttgggtccttcttcaccttgaacctgtttattggtgtcatcatagataatttcaaccagcagaaaaagaagtttggaggtcaagacatctttatgacagaagaacagaagaaatactataatgcaatgaaaaaattaggatcgaaaaaaccgcaaaagcctatacctcgaccaggaaacaaatttcaaggaatggtctttgacttcgtaaccagacaagtttttgacataagcatcatgattctcatctgtcttaacatggtcacaatgatggtggaaacagatgaccagagtgaatatgtgactaccattttgtcacgcatcaatctggtgttcattgtgctatttactggagagtgtgtactgaaactcatctctctacgccattattattttaccattggatggaatatttttgattttgtggttgtcattctctccattgtaggtatgtttcttgccgagctgatagaaaagtatttcgtgtcccctaccctgttccgagtgatccgtcttgctaggattggccgaatcctacgtctgatcaaaggagcaaaggggatccgcacgctgctctttgctttgatgatgtcccttcctgcgttgtttaacatcggcctcctactcttcctagtcatgttcatctacgccatctttgggatgtccaactttgcctatgttaagagggaagttgggatcgatgacatgttcaactttgagacctttggcaacagcatgatctgcctattccaaattacaacctctgctggctgggatggattgctagcacccattctcaacagtaagccacccgactgtgaccctaataaagttaaccctggaagctcagttaagggagactgtgggaacccatctgttggaattttcttttttgtcagttacatcatcatatccttcctggttgtggtgaacatgtacatcgcggtcatcctggagaacttcagtgttgctactgaagaaagtgcagagcctctgagtgaggatgactttgagatgttctatgaggtttgggagaagtttgatcccgatgcaactcagttcatggaatttgaaaaattatctcagtttgcagctgcgcttgaaccgcctctcaatctgccacaaccaaacaaactccagctcattgccatggatttgcccatggtgagtggtgaccggatccactgtcttgatatcttatttgcttttacaaagcgggttctaggagagagtggagagatggatgctctacgaatacagatggaagagcgattcatggcttccaatccttccaaggtctcctatcagccaatcactactactttaaaacgaaaacaagaggaagtatctgctgtcattattcagcgtgcttacagacgccaccttttaaagcgaactgtaaaacaagcttcctttacgtacaataaaaacaaaatcaaaggtggggctaatcttcttataaaagaagacatgataattgacagaataaatgaaaactctattacagaaaaaactgatctgaccatgtccactgcagcttgtccaccttcctatgaccgggtgacaaagccaattgtggaaaaacatgagcaagaaggcaaagatgaaaaagccaaagggaaataaatgaaaataaataaaaataattgggtgacaaattgtttacagcctgtgaaggtgatgtatttttatcaacaggactcctttaggaggtcaatgccaaactgactgtttttacacaaatctccttaaggtcagtgcctacaataagacagtgaccccttgtcagcaaactgtgactctgtgtaaaggggagatgaccttgacaggaggttactgttctcactaccagctgacactgctgaagataagatgcacaatggctagtcagactgtagggaccagtttcaaggggtgcaaacctgtgattttggggttgtttaacatgaaacactttagtgtagtaattgtatccactgtttgcatttcaactgccacatttgtcacatttttatggaatctgttagtggattcatctttttgttaatccatgtgtttattatatgtgactatttttgtaaacgaagtttctgttgagaaataggctaaggacctctataacaggtatgccacctggggggtatggcaaccacatggccctcccagctacacaaagtcgtggtttgcatgagggcatgctgcacttagagatcatgcatgagaaaaagtcacaagaaaaacaaattcttaaatttcaccatatttctgggaggggtaattgggtgataagtggaggtgctttgttgatcttgttttgcgaaatccagcccctagaccaagtagattatttgtgggtaggccagtaaatcttagcaggtgcaaacttcattcaaatgtttggagtcataaatgttatgtttctttttgttgtattaaaaaaaaaacctgaatagtgaatattgcccctcaccctccaccgccagaagactgaattgaccaaaattactctttataaatttctgctttttcctgcactttgtttagccatcttcggctctcagcaaggttgacactgtatatgttaatgaaatgctatttattatgtaaatagtcattttaccctgtggtgcacgtttgagcaaacaaataatgacctaagcacagtatttattgcatcaaatatgtaccacaagaaatgtagagtgcaagctttacacaggtaataaaatgtattctgtaccatttatagatagtttggatgctatcaatgcatgtttatattaccatgctgctgtatctggtttctctcactgctcagaatctcatttatgagaaaccatatgtcagtggtaaagtcaaggaaattgttcaacagatctcatttatttaagtcattaagcaatagtttgcagcactttaacagctttttggttatttttacattttaagtggataacatatggtatatagccagactgtacagacatgtttaaaaaaacacactgcttaacctattaaatatgtgtttagaattttataagcaaatataaatactgtaaaaagtcactttattttatttttcagcattatgtacataaatatgaagaggaaattatcttcaggttgatatcacaatcacttttcttactttctgtccatagtactttttcatgaaagaaatttgctaaataagacatgaaaacaagactgggtagttgtagatttctgctttttaaattacatttgctaattttagattatttcacaattttaaggagcaaaataggttcacgattcatatccaaattatgctttgcaattggaaaagggtttaaaattttatttatatttctggtagtacctgcactaactgaattgaaggtagtgcttatgttatttttgttctttttttctgacttcggtttatgttttcatttctttggagtaatgctgctctagattgttctaaatagaatgtgggcttcataatttttttttccacaaaaacagagtagtcaacttatatagtcaattacatcaggacattttgtgtttcttacagaagcaaaccataggctcctcttttccttaaaactacttagataaactgtattcgtgaactgcatgctggaaaatgctactattatgctaaataatgctaaccaacatttaaaatgtgcaaaactaataaagattacattttttatttta

SEQ ID NO: 28435 - DNA, 1447 bp, Homo sapiens
  source 1..1447: mol_type = unassigned DNA
ccggtcccagagccgcagctgctgcgcccgcgcgctcccggggacattctaaccgccgccaggtcccgccgcctctcgccccgctattaataccggcggcccgggaggggggcgcagcacgcgccgcgcagccatggggaggctgctggccttagtggtcggcgcggcactggtgtcctcagcctgcgggggctgcgtggaggtggactcggagaccgaggccgtgtatgggatgaccttcaaaattctttgcatctcctgcaagcgccgcagcgagaccaacgctgagaccttcaccgagtggaccttccgccagaagggcactgaggagtttgtcaagatcctgcgctatgagaatgaggtgttgcagctggaggaggatgagcgcttcgagggccgcgtggtgtggaatggcagccggggcaccaaagacctgcaggatctgtctatcttcatcaccaatgtcacctacaaccactcgggcgactacgagtgccacgtctaccgcctgctcttcttcgaaaactacgagcacaacaccagcgtcgtcaagaagatccacattgaggtagtggacaaagccaacagagacatggcatccatcgtgtctgagatcatgatgtatgtgctcattgtggtgttgaccatatggctcgtggcagagatgatttactgctacaagaagatcgctgccgccacggagactgctgcacaggagaatgcctcggaatacctggccatcacctctgaaagcaaagagaactgcacgggcgtccaggtggccgaatagccctggccctgggccccgcctcaaggaagagccagccgtaatggggactctccaggcaccgcctgcccccagcgtgggggtggccactcctgggccccagaaagcctcagagtcctgccgacggagccactggggtgggagggggcagggggcttggctcgcacccccactttcgcctcctccagctcctgccccgccggccgcgcaccgccatgcatgatgggtaaagcaatactgccgctgcccccaccctgcttctgctgcctgtttggggaggggggcggtgaggtgggggcagcggccccgcacccctcctccttgctgatttgcacacattggccgcttcagacacgcacttctggggccagcccctccccgcctcctccctgcctggcggcaggggtcgcgatgatgggctggagcagtttggggcagggggttctgggacccactccgactccccctccccggcatcatttcccctcccgcttcctccggctggacctggggtcccccctccctgtaatgcactcctgccccggcccaacctcgccctctctcaccagccttgaactgtggccacctagaaaggggcccattcagcctcgtctctttacagaagtagttttgttcatgaaataaagactcttggacttg

SEQ ID NO: 28436 - DNA, 1112 bp, Homo sapiens
  source 1..1112: mol_type = unassigned DNA
ccggtcccagagccgcagctgctgcgcccgcgcgctcccggggacattctaaccgccgccaggtcccgccgcctctcgccccgctattaataccggcggcccgggaggggggcgcagcacgcgccgcgcagccatggggaggctgctggccttagtggtcggcgcggcactggtgtcctcagcctgcgggggctgcgtggaggtggactcggagaccgaggccgtgtatgggatgaccttcaaaattctttgcatctcctgcaagcgccgcagcgagaccaacgctgagaccttcaccgagtggaccttccgccagaagggcactgaggagtttgtcaagatcctgcgctatgagaatgaggtgttgcagctggaggaggatgagcgcttcgagggccgcgtggtgtggaatggcagccggggcaccaaagacctgcaggatctgtctatcttcatcaccaatgtcacctacaaccactcgggcgactacgagtgccacgtctaccgcctgctcttcttcgaaaactacgagcacaacaccagcgtcgtcaagaagatccacattgaggtagtggacaaaggtgagtcgggtgctgcctgcccctttaccgtcacccaccggagagccagatggagggacagatggcaggcagtggacaggacaggctggctctgtgcctggccagccaaccgcccacagcagcgggctgagggggaggggagcagcccctcctgcccactccagctctggcctctgtttctctccagcccacggagaggtcaaagcatgcctgtcccccacagacgctccgggtacagaacccagctctgtcacctgtgctgtatgacctctggcaggtgccttctgtctctgagccaaagggttgtcctgggcttgcccgggataataatccgatgtgtttctcggggtgtggtttgagccattcttccatcatggggttcatgaggattgagcagctgcaggcacacgcctggcttccagcagagccttgcaggtggtggcgagggtggcggttcttactgttcgagtagctcagccctgctgccctctgtggtgatgaggcaagagagcgtgccacctagagcagagt

SEQ ID NO: 28437 - DNA, 8403 bp, Homo sapiens
  source 1..8403: mol_type = unassigned DNA
aaaaaaaagatttttttttttttaaagcatgatggaattttagctgcagtcttcttggtgccagcttatcaatcccaaactctgggtgtaaaagattctacagggcactttcttatgcaaggagctaaacagtgattaaaggagcaggatgaaaagatggcacagtcagtgctggtaccgccaggacctgacagcttccgcttctttaccagggaatcccttgctgctattgaacaacgcattgcagaagagaaagctaagagacccaaacaggaacgcaaggatgaggatgatgaaaatggcccaaagccaaacagtgacttggaagcaggaaaatctcttccatttatttatggagacattcctccagagatggtgtcagtgcccctggaggatctggacccctactatatcaataagaaaacgtttatagtattgaataaagggaaagcaatctctcgattcagtgccacccctgccctttacattttaactcccttcaaccctattagaaaattagctattaagattttggtacattctttattcaatatgctcattatgtgcacgattcttaccaactgtgtatttatgaccatgagtaaccctccagactggacaaagaatgtggagtatacctttacaggaatttatacttttgaatcacttattaaaatacttgcaaggggcttttgtttagaagatttcacatttttacgggatccatggaattggttggatttcacagtcattacttttgcatatgtgacagagtttgtggacctgggcaatgtctcagcgttgagaacattcagagttctccgagcattgaaaacaatttcagtcattccaggcctgaagaccattgtgggggccctgatccagtcagtgaagaagctttctgatgtcatgatcttgactgtgttctgtctaagcgtgtttgcgctaataggattgcagttgttcatgggcaacctacgaaataaatgtttgcaatggcctccagataattcttcctttgaaataaatatcacttccttctttaacaattcattggatgggaatggtactactttcaataggacagtgagcatatttaactgggatgaatatattgaggataaaagtcacttttattttttagaggggcaaaatgatgctctgctttgtggcaacagctcagatgcaggccagtgtcctgaaggatacatctgtgtgaaggctggtagaaaccccaactatggctacacgagctttgacacctttagttgggcctttttgtccttatttcgtctcatgactcaagacttctgggaaaacctttatcaactgacactacgtgctgctgggaaaacgtacatgatattttttgtgctggtcattttcttgggctcattctatctaataaatttgatcttggctgtggtggccatggcctatgaggaacagaatcaggccacattggaagaggctgaacagaaggaagctgaatttcagcagatgctcgaacagttgaaaaagcaacaagaagaagctcaggcggcagctgcagccgcatctgctgaatcaagagacttcagtggtgctggtgggataggagttttttcagagagttcttcagtagcatctaagttgagctccaaaagtgaaaaagagctgaaaaacagaagaaagaaaaagaaacagaaagaacagtctggagaagaagagaaaaatgacagagtccgaaaatcggaatctgaagacagcataagaagaaaaggtttccgtttttccttggaaggaagtaggctgacatatgaaaagagattttcttctccacaccagtccttactgagcatccgtggctcccttttctctccaagacgcaacagtagggcgagccttttcagcttcagaggtcgagcaaaggacattggctctgagaatgactttgctgatgatgagcacagcacctttgaggacaatgacagccgaagagactctctgttcgtgccgcacagacatggagaacggcgccacagcaatgtcagccaggccagccgtgcctccagggtgctccccatcctgcccatgaatgggaagatgcatagcgctgtggactgcaatggtgtggtctccctggtcgggggcccttctaccctcacatctgctgggcagctcctaccagagggcacaactactgaaacagaaataagaaagagacggtccagttcttatcatgtttccatggatttattggaagatcctacatcaaggcaaagagcaatgagtatagccagtattttgaccaacaccatggaagaacttgaagaatccagacagaaatgcccaccatgctggtataaatttgctaatatgtgtttgatttgggactgttgtaaaccatggttaaaggtgaaacaccttgtcaacctggttgtaatggacccatttgttgacctggccatcaccatctgcattgtcttaaatacactcttcatggctatggagcactatcccatgacggagcagttcagcagtgtactgtctgttggaaacctggtcttcacagggatcttcacagcagaaatgtttctcaagataattgccatggatccatattattactttcaagaaggctggaatatttttgatggttttattgtgagccttagtttaatggaacttggtttggcaaatgtggaaggattgtcagttctccgatcattccggctgctccgagttttcaagttggcaaaatcttggccaactctaaatatgctaattaagatcattggcaattctgtgggggctctaggaaacctcaccttggtattggccatcatcgtcttcatttttgctgtggtcggcatgcagctctttggtaagagctacaaagaatgtgtctgcaagatttccaatgattgtgaactcccacgctggcacatgcatgactttttccactccttcctgatcgtgttccgcgtgctgtgtggagagtggatagagaccatgtgggactgtatggaggtcgctggccaaaccatgtgccttactgtcttcatgatggtcatggtgattggaaatctagtggttctgaacctcttcttggccttgcttttgagttccttcagttctgacaatcttgctgccactgatgatgataacgaaatgaataatctccagattgctgtgggaaggatgcagaaaggaatcgattttgttaaaagaaaaatacgtgaatttattcagaaagcctttgttaggaagcagaaagctttagatgaaattaaaccgcttgaagatctaaataataaaaaagacagctgtatttccaaccataccaccatagaaataggcaaagacctcaattatctcaaagacggaaatggaactactagtggcataggcagcagtgtagaaaaatatgtcgtggatgaaagtgattacatgtcatttataaacaaccctagcctcactgtgacagtaccaattgctgttggagaatctgactttgaaaatttaaatactgaagaattcagcagcgagtcagatatggaggaaagcaaagagaagctaaatgcaactagttcatctgaaggcagcacggttgatattggagctcccgccgagggagaacagcctgaggttgaacctgaggaatcccttgaacctgaagcctgttttacagaagactgtgtacggaagttcaagtgttgtcagataagcatagaagaaggcaaagggaaactctggtggaatttgaggaaaacatgctataagatagtggagcacaattggttcgaaaccttcattgtcttcatgattctgctgagcagtggggctctggcctttgaagatatatacattgagcagcgaaaaaccattaagaccatgttagaatatgctgacaaggttttcacttacatattcattctggaaatgctgctaaagtgggttgcatatggttttcaagtgtattttaccaatgcctggtgctggctagacttcctgattgttgatgtctcactggttagcttaactgcaaatgccttgggttactcagaacttggtgccatcaaatccctcagaacactaagagctctgaggccactgagagctttgtcccggtttgaaggaatgagggttgttgtaaatgctcttttaggagccattccatctatcatgaatgtacttctggtttgtctgatcttttggctaatattcagtatcatgggagtgaatctctttgctggcaagttttaccattgtattaattacaccactggagagatgtttgatgtaagcgtggtcaacaactacagtgagtgcaaagctctcattgagagcaatcaaactgccaggtggaaaaatgtgaaagtaaactttgataacgtaggacttggatatctgtctctacttcaagtagccacgtttaagggatggatggatattatgtatgcagctgttgattcacgaaatgtagaattacaacccaagtatgaagacaacctgtacatgtatctttattttgtcatctttattatttttggttcattctttaccttgaatcttttcattggtgtcatcatagataacttcaaccaacagaaaaagaagtttggaggtcaagacatttttatgacagaagaacagaagaaatactacaatgcaatgaaaaaactgggttcaaagaaaccacaaaaacccatacctcgacctgctaacaaattccaaggaatggtctttgattttgtaaccaaacaagtctttgatatcagcatcatgatcctcatctgccttaacatggtcaccatgatggtggaaaccgatgaccagagtcaagaaatgacaaacattctgtactggattaatctggtgtttattgttctgttcactggagaatgtgtgctgaaactgatctctcttcgttactactatttcactattggatggaatatttttgattttgtggtggtcattctctccattgtaggaatgtttctggctgaactgatagaaaagtattttgtgtcccctaccctgttccgagtgatccgtcttgccaggattggccgaatcctacgtctgatcaaaggagcaaaggggatccgcacgctgctctttgctttgatgatgtcccttcctgcgttgtttaacatcggcctccttcttttcctggtcatgttcatctacgccatctttgggatgtccaattttgcctatgttaagagggaagttgggatcgatgacatgttcaactttgagacctttggcaacagcatgatctgcctgttccaaattacaacctctgctggctgggatggattgctagcacctattcttaatagtggacctccagactgtgaccctgacaaagatcaccctggaagctcagttaaaggagactgtgggaacccatctgttgggattttcttttttgtcagttacatcatcatatccttcctggttgtggtgaacatgtacatcgcggtcatcctggagaacttcagtgttgctactgaagaaagtgcagagcctctgagtgaggatgactttgagatgttctatgaggtttgggagaagtttgatcccgatgcgacccagtttatagagtttgccaaactttctgattttgcagatgccctggatcctcctcttctcatagcaaaacccaacaaagtccagctcattgccatggatctgcccatggtgagtggtgaccggatccactgtcttgacatcttatttgcttttacaaagcgtgttttgggtgagagtggagagatggatgcccttcgaatacagatggaagagcgattcatggcatcaaacccctccaaagtctcttatgagcccattacgaccacgttgaaacgcaaacaagaggaggtgtctgctattattatccagagggcttacagacgctacctcttgaagcaaaaagttaaaaaggtatcaagtatatacaagaaagacaaaggcaaagaatgtgatggaacacccatcaaagaagatactctcattgataaactgaatgagaattcaactccagagaaaaccgatatgacgccttccaccacgtctccaccctcgtatgatagtgtgaccaaaccagaaaaagaaaaatttgaaaaagacaaatcagaaaaggaagacaaagggaaagatatcagggaaagtaaaaagtaaaaagaaaccaagaattttccattttgtgatcaattgtttacagcccgtgatggtgatgtgtttgtgtcaacaggactcccacaggaggtctatgccaaactgactgtttttacaaatgtatacttaaggtcagtgcctataacaagacagagacctctggtcagcaaactggaactcagtaaactggagaaatagtatcgatgggaggtttctattttcacaaccagctgacactgctgaagagcagaggcgtaatggctactcagacgataggaaccaatttaaaggggggagggaagttaaatttttatgtaaattcaacatgtgacacttgataatagtaattgtcaccagtgtttatgttttaactgccacacctgccatatttttacaaaacgtgtgctgtgaatttatcacttttctttttaattcacaggttgtttactattatatgtgactatttttgtaaatgggtttgtgtttggggagagggattaaagggagggaattctacatttctctattgtattgtataactggatatattttaaatggaggcatgctgcaattctcattcacacataaaaaaatcacatcacaaaagggaagagtttacttcttgtttcaggatgtttttagatttttgaggtgcttaaatagctattcgtatttttaaggtgtctcatccagaaaaaatttaatgtgcctgtaaatgttccatagaatcacaagcattaaagagttgttttatttttacataacccattaaatgtacatgtatatatgtatatatgtatatgtgcgtgtatatacatatatatgtatacacacatgcacacacagagatatacacataccattacattgtcattcacagtcccagcagcatgactatcacatttttgataagtgtcctttggcataaaataaaaatatcctatcagtcctttctaagaagcctgaattgaccaaaaaacatccccaccaccactttataaagttgattctgctttatcctgcagtattgtttagccatcttctgctcttggtaaggttgacatagtatatgtcaatttaaaaaataaaagtctgctttgtaaatagtaattttacccagtggtgcatgtttgagcaaacaaaaatgatgatttaagcacactacttattgcatcaaatatgtaccacagtaagtatagtttgcaagctttcaacaggtaatatgatgtaattggttccattatagtttgaagctgtcactgctgcatgtttatcttgcctatgctgctgtatcttattccttccactgttcagaagtctaatatgggaagccatatatcagtggtaaagtgaagcaaattgttctaccaagacctcattcttcatgtcattaagcaataggttgcagcaaacaaggaagagcttcttgctttttattcttccaaccttaattgaacactcaatgatgaaaagcccgactgtacaaacatgttgcaagctgcttaaatctgtttaaaatatatggttagagttttctaagaaaatataaatactgtaaaaagttcattttattttatttttcagccttttgtacgtaaaatgagaaattaaaagtatcttcaggtggatgtcacagtcactattgttagtttctgttcctagcacttttaaattgaagcacttcacaaaataagaagcaaggactaggatgcagtgtaggtttctgcttttttattagtactgtaaacttgcacacatttcaatgtgaaacaaatctcaaactgagttcaatgtttatttgctttcaatagtaatgccttatcattgaaagaggcttaaagaaaaaaaaaatcagctgatactcttggcattgcttgaatccaatgtttccacctagtctttttattcagtaatcatcagtcttttccaatgtttgtttacacagatagatcttattgacccatatggcactagaactgtatcagatataatatgggatcccagctttttttcctctcccacaaaaccaggtagtgaagttatattaccagttacagcaaaatactttgtgtttcacaagcaacaataaatgtagattctttatactgaagctattgacttgtagtgtgttggtgaaatgcatgcaggaaaatgctgttaccataaagaacggtaaaccacattacaatcaagccaaaagaataaaggtttcgcttttgtttttgtatttaa

SEQ ID NO: 28438 - DNA, 8792 bp, Homo sapiens
  source 1..8792: mol_type = unassigned DNA
atgctgttttctaacagacattgggtaccatcgaatgactgtcagaacagaaagctaaggcaaaggagggaggatgctgtggtcatcctttcttgtttttttcttctttaatgaggatagagcacatgtgagattttactttctactccagtaaaaattctgaagaattgcattggagactgttatattcaacacatacgtggattctgtgttatgatttacatttttctttatttcagcactttcttatgcaaggagctaaacagtgattaaaggagcaggatgaaaagatggcacagtcagtgctggtaccgccaggacctgacagcttccgcttctttaccagggaatcccttgctgctattgaacaacgcattgcagaagagaaagctaagagacccaaacaggaacgcaaggatgaggatgatgaaaatggcccaaagccaaacagtgacttggaagcaggaaaatctcttccatttatttatggagacattcctccagagatggtgtcagtgcccctggaggatctggacccctactatatcaataagaaaacgtttatagtattgaataaagggaaagcaatctctcgattcagtgccacccctgccctttacattttaactcccttcaaccctattagaaaattagctattaagattttggtacattctttattcaatatgctcattatgtgcacgattcttaccaactgtgtatttatgaccatgagtaaccctccagactggacaaagaatgtggagtatacctttacaggaatttatacttttgaatcacttattaaaatacttgcaaggggcttttgtttagaagatttcacatttttacgggatccatggaattggttggatttcacagtcattacttttgcgtatgtaacagaatttgtaaacctaggcaatgtttcagctcttcgaactttcagagtcttgagagctttgaaaactatttctgtaattccaggcctgaagaccattgtgggggccctgatccagtcagtgaagaagctttctgatgtcatgatcttgactgtgttctgtctaagcgtgtttgcgctaataggattgcagttgttcatgggcaacctacgaaataaatgtttgcaatggcctccagataattcttcctttgaaataaatatcacttccttctttaacaattcattggatgggaatggtactactttcaataggacagtgagcatatttaactgggatgaatatattgaggataaaagtcacttttattttttagaggggcaaaatgatgctctgctttgtggcaacagctcagatgcaggccagtgtcctgaaggatacatctgtgtgaaggctggtagaaaccccaactatggctacacgagctttgacacctttagttgggcctttttgtccttatttcgtctcatgactcaagacttctgggaaaacctttatcaactgacactacgtgctgctgggaaaacgtacatgatattttttgtgctggtcattttcttgggctcattctatctaataaatttgatcttggctgtggtggccatggcctatgaggaacagaatcaggccacattggaagaggctgaacagaaggaagctgaatttcagcagatgctcgaacagttgaaaaagcaacaagaagaagctcaggcggcagctgcagccgcatctgctgaatcaagagacttcagtggtgctggtgggataggagttttttcagagagttcttcagtagcatctaagttgagctccaaaagtgaaaaagagctgaaaaacagaagaaagaaaaagaaacagaaagaacagtctggagaagaagagaaaaatgacagagtccgaaaatcggaatctgaagacagcataagaagaaaaggtttccgtttttccttggaaggaagtaggctgacatatgaaaagagattttcttctccacaccagtccttactgagcatccgtggctcccttttctctccaagacgcaacagtagggcgagccttttcagcttcagaggtcgagcaaaggacattggctctgagaatgactttgctgatgatgagcacagcacctttgaggacaatgacagccgaagagactctctgttcgtgccgcacagacatggagaacggcgccacagcaatgtcagccaggccagccgtgcctccagggtgctccccatcctgcccatgaatgggaagatgcatagcgctgtggactgcaatggtgtggtctccctggtcgggggcccttctaccctcacatctgctgggcagctcctaccagagggcacaactactgaaacagaaataagaaagagacggtccagttcttatcatgtttccatggatttattggaagatcctacatcaaggcaaagagcaatgagtatagccagtattttgaccaacaccatggaagaacttgaagaatccagacagaaatgcccaccatgctggtataaatttgctaatatgtgtttgatttgggactgttgtaaaccatggttaaaggtgaaacaccttgtcaacctggttgtaatggacccatttgttgacctggccatcaccatctgcattgtcttaaatacactcttcatggctatggagcactatcccatgacggagcagttcagcagtgtactgtctgttggaaacctggtcttcacagggatcttcacagcagaaatgtttctcaagataattgccatggatccatattattactttcaagaaggctggaatatttttgatggttttattgtgagccttagtttaatggaacttggtttggcaaatgtggaaggattgtcagttctccgatcattccggctgctccgagttttcaagttggcaaaatcttggccaactctaaatatgctaattaagatcattggcaattctgtgggggctctaggaaacctcaccttggtattggccatcatcgtcttcatttttgctgtggtcggcatgcagctctttggtaagagctacaaagaatgtgtctgcaagatttccaatgattgtgaactcccacgctggcacatgcatgactttttccactccttcctgatcgtgttccgcgtgctgtgtggagagtggatagagaccatgtgggactgtatggaggtcgctggccaaaccatgtgccttactgtcttcatgatggtcatggtgattggaaatctagtggttctgaacctcttcttggccttgcttttgagttccttcagttctgacaatcttgctgccactgatgatgataacgaaatgaataatctccagattgctgtgggaaggatgcagaaaggaatcgattttgttaaaagaaaaatacgtgaatttattcagaaagcctttgttaggaagcagaaagctttagatgaaattaaaccgcttgaagatctaaataataaaaaagacagctgtatttccaaccataccaccatagaaataggcaaagacctcaattatctcaaagacggaaatggaactactagtggcataggcagcagtgtagaaaaatatgtcgtggatgaaagtgattacatgtcatttataaacaaccctagcctcactgtgacagtaccaattgctgttggagaatctgactttgaaaatttaaatactgaagaattcagcagcgagtcagatatggaggaaagcaaagagaagctaaatgcaactagttcatctgaaggcagcacggttgatattggagctcccgccgagggagaacagcctgaggttgaacctgaggaatcccttgaacctgaagcctgttttacagaagactgtgtacggaagttcaagtgttgtcagataagcatagaagaaggcaaagggaaactctggtggaatttgaggaaaacatgctataagatagtggagcacaattggttcgaaaccttcattgtcttcatgattctgctgagcagtggggctctggcctttgaagatatatacattgagcagcgaaaaaccattaagaccatgttagaatatgctgacaaggttttcacttacatattcattctggaaatgctgctaaagtgggttgcatatggttttcaagtgtattttaccaatgcctggtgctggctagacttcctgattgttgatgtctcactggttagcttaactgcaaatgccttgggttactcagaacttggtgccatcaaatccctcagaacactaagagctctgaggccactgagagctttgtcccggtttgaaggaatgagggttgttgtaaatgctcttttaggagccattccatctatcatgaatgtacttctggtttgtctgatcttttggctaatattcagtatcatgggagtgaatctctttgctggcaagttttaccattgtattaattacaccactggagagatgtttgatgtaagcgtggtcaacaactacagtgagtgcaaagctctcattgagagcaatcaaactgccaggtggaaaaatgtgaaagtaaactttgataacgtaggacttggatatctgtctctacttcaagtagccacgtttaagggatggatggatattatgtatgcagctgttgattcacgaaatgtagaattacaacccaagtatgaagacaacctgtacatgtatctttattttgtcatctttattatttttggttcattctttaccttgaatcttttcattggtgtcatcatagataacttcaaccaacagaaaaagaagtttggaggtcaagacatttttatgacagaagaacagaagaaatactacaatgcaatgaaaaaactgggttcaaagaaaccacaaaaacccatacctcgacctgctaacaaattccaaggaatggtctttgattttgtaaccaaacaagtctttgatatcagcatcatgatcctcatctgccttaacatggtcaccatgatggtggaaaccgatgaccagagtcaagaaatgacaaacattctgtactggattaatctggtgtttattgttctgttcactggagaatgtgtgctgaaactgatctctcttcgttactactatttcactattggatggaatatttttgattttgtggtggtcattctctccattgtaggaatgtttctggctgaactgatagaaaagtattttgtgtcccctaccctgttccgagtgatccgtcttgccaggattggccgaatcctacgtctgatcaaaggagcaaaggggatccgcacgctgctctttgctttgatgatgtcccttcctgcgttgtttaacatcggcctccttcttttcctggtcatgttcatctacgccatctttgggatgtccaattttgcctatgttaagagggaagttgggatcgatgacatgttcaactttgagacctttggcaacagcatgatctgcctgttccaaattacaacctctgctggctgggatggattgctagcacctattcttaatagtggacctccagactgtgaccctgacaaagatcaccctggaagctcagttaaaggagactgtgggaacccatctgttgggattttcttttttgtcagttacatcatcatatccttcctggttgtggtgaacatgtacatcgcggtcatcctggagaacttcagtgttgctactgaagaaagtgcagagcctctgagtgaggatgactttgagatgttctatgaggtttgggagaagtttgatcccgatgcgacccagtttatagagtttgccaaactttctgattttgcagatgccctggatcctcctcttctcatagcaaaacccaacaaagtccagctcattgccatggatctgcccatggtgagtggtgaccggatccactgtcttgacatcttatttgcttttacaaagcgtgttttgggtgagagtggagagatggatgcccttcgaatacagatggaagagcgattcatggcatcaaacccctccaaagtctcttatgagcccattacgaccacgttgaaacgcaaacaagaggaggtgtctgctattattatccagagggcttacagacgctacctcttgaagcaaaaagttaaaaaggtatcaagtatatacaagaaagacaaaggcaaagaatgtgatggaacacccatcaaagaagatactctcattgataaactgaatgagaattcaactccagagaaaaccgatatgacgccttccaccacgtctccaccctcgtatgatagtgtgaccaaaccagaaaaagaaaaatttgaaaaagacaaatcagaaaaggaagacaaagggaaagatatcagggaaagtaaaaagtaaaaagaaaccaagaattttccattttgtgatcaattgtttacagcccgtgatggtgatgtgtttgtgtcaacaggactcccacaggaggtctatgccaaactgactgtttttacaaatgtatacttaaggtcagtgcctataacaagacagagacctctggtcagcaaactggaactcagtaaactggagaaatagtatcgatgggaggtttctattttcacaaccagctgacactgctgaagagcagaggcgtaatggctactcagacgataggaaccaatttaaaggggggagggaagttaaatttttatgtaaattcaacatgtgacacttgataatagtaattgtcaccagtgtttatgttttaactgccacacctgccatatttttacaaaacgtgtgctgtgaatttatcacttttctttttaattcacaggttgtttactattatatgtgactatttttgtaaatgggtttgtgtttggggagagggattaaagggagggaattctacatttctctattgtattgtataactggatatattttaaatggaggcatgctgcaattctcattcacacataaaaaaatcacatcacaaaagggaagagtttacttcttgtttcaggatgtttttagatttttgaggtgcttaaatagctattcgtatttttaaggtgtctcatccagaaaaaatttaatgtgcctgtaaatgttccatagaatcacaagcattaaagagttgttttatttttacataacccattaaatgtacatgtatatatgtatatatgtatatgtgcgtgtatatacatatatatgtatacacacatgcacacacagagatatacacataccattacattgtcattcacagtcccagcagcatgactatcacatttttgataagtgtcctttggcataaaataaaaatatcctatcagtcctttctaagaagcctgaattgaccaaaaaacatccccaccaccactttataaagttgattctgctttatcctgcagtattgtttagccatcttctgctcttggtaaggttgacatagtatatgtcaatttaaaaaataaaagtctgctttgtaaatagtaattttacccagtggtgcatgtttgagcaaacaaaaatgatgatttaagcacactacttattgcatcaaatatgtaccacagtaagtatagtttgcaagctttcaacaggtaatatgatgtaattggttccattatagtttgaagctgtcactgctgcatgtttatcttgcctatgctgctgtatcttattccttccactgttcagaagtctaatatgggaagccatatatcagtggtaaagtgaagcaaattgttctaccaagacctcattcttcatgtcattaagcaataggttgcagcaaacaaggaagagcttcttgctttttattcttccaaccttaattgaacactcaatgatgaaaagcccgactgtacaaacatgttgcaagctgcttaaatctgtttaaaatatatggttagagttttctaagaaaatataaatactgtaaaaagttcattttattttatttttcagccttttgtacgtaaaatgagaaattaaaagtatcttcaggtggatgtcacagtcactattgttagtttctgttcctagcacttttaaattgaagcacttcacaaaataagaagcaaggactaggatgcagtgtaggtttctgcttttttattagtactgtaaacttgcacacatttcaatgtgaaacaaatctcaaactgagttcaatgtttatttgctttcaatagtaatgccttatcattgaaagaggcttaaagaaaaaaaaaatcagctgatactcttggcattgcttgaatccaatgtttccacctagtctttttattcagtaatcatcagtcttttccaatgtttgtttacacagatagatcttattgacccatatggcactagaactgtatcagatataatatgggatcccagctttttttcctctcccacaaaaccaggtagtgaagttatattaccagttacagcaaaatactttgtgtttcacaagcaacaataaatgtagattctttatactgaagctattgacttgtagtgtgttggtgaaatgcatgcaggaaaatgctgttaccataaagaacggtaaaccacattacaatcaagccaaaagaataaaggtttcgcttttgtttttgtatttaattgttgtctttgtttctatctttgaaatgccatttaaaggtagatttctatcatgtaaaaataatctatctgaaaaacaaatgtaaagaacacacattaattactataattcatctttcaattttttcatggaatggaagttaattaagaagagtgtattggataactactttaatattggccaaaaagctagatatggcatcaggtagactagtggaaagttacaaaaattaataaaaaattgactaacatttt

SEQ ID NO: 28439 - DNA, 6274 bp, Homo sapiens
  source 1..6274: mol_type = unassigned DNA
cactttcttatgcaaggagctaaacagtgattaaaggagcaggatgaaaagatggcacagtcagtgctggtaccgccaggacctgacagcttccgcttctttaccagggaatcccttgctgctattgaacaacgcattgcagaagagaaagctaagagacccaaacaggaacgcaaggatgaggatgatgaaaatggcccaaagccaaacagtgacttggaagcaggaaaatctcttccatttatttatggagacattcctccagagatggtgtcagtgcccctggaggatctggacccctactatatcaataagaaaacgtttatagtattgaataaagggaaagcaatctctcgattcagtgccacccctgccctttacattttaactcccttcaaccctattagaaaattagctattaagattttggtacattctttattcaatatgctcattatgtgcacgattcttaccaactgtgtatttatgaccatgagtaaccctccagactggacaaagaatgtggagtatacctttacaggaatttatacttttgaatcacttattaaaatacttgcaaggggcttttgtttagaagatttcacatttttacgggatccatggaattggttggatttcacagtcattacttttgcgtatgtaacagaatttgtaaacctaggcaatgtttcagctcttcgaactttcagagtcttgagagctttgaaaactatttctgtaattccaggcctgaagaccattgtgggggccctgatccagtcagtgaagaagctttctgatgtcatgatcttgactgtgttctgtctaagcgtgtttgcgctaataggattgcagttgttcatgggcaacctacgaaataaatgtttgcaatggcctccagataattcttcctttgaaataaatatcacttccttctttaacaattcattggatgggaatggtactactttcaataggacagtgagcatatttaactgggatgaatatattgaggataaaagtcacttttattttttagaggggcaaaatgatgctctgctttgtggcaacagctcagatgcaggccagtgtcctgaaggatacatctgtgtgaaggctggtagaaaccccaactatggctacacgagctttgacacctttagttgggcctttttgtccttatttcgtctcatgactcaagacttctgggaaaacctttatcaactgacactacgtgctgctgggaaaacgtacatgatattttttgtgctggtcattttcttgggctcattctatctaataaatttgatcttggctgtggtggccatggcctatgaggaacagaatcaggccacattggaagaggctgaacagaaggaagctgaatttcagcagatgctcgaacagttgaaaaagcaacaagaagaagctcaggcggcagctgcagccgcatctgctgaatcaagagacttcagtggtgctggtgggataggagttttttcagagagttcttcagtagcatctaagttgagctccaaaagtgaaaaagagctgaaaaacagaagaaagaaaaagaaacagaaagaacagtctggagaagaagagaaaaatgacagagtccgaaaatcggaatctgaagacagcataagaagaaaaggtttccgtttttccttggaaggaagtaggctgacatatgaaaagagattttcttctccacaccagtccttactgagcatccgtggctcccttttctctccaagacgcaacagtagggcgagccttttcagcttcagaggtcgagcaaaggacattggctctgagaatgactttgctgatgatgagcacagcacctttgaggacaatgacagccgaagagactctctgttcgtgccgcacagacatggagaacggcgccacagcaatgtcagccaggccagccgtgcctccagggtgctccccatcctgcccatgaatgggaagatgcatagcgctgtggactgcaatggtgtggtctccctggtcgggggcccttctaccctcacatctgctgggcagctcctaccagagggcacaactactgaaacagaaataagaaagagacggtccagttcttatcatgtttccatggatttattggaagatcctacatcaaggcaaagagcaatgagtatagccagtattttgaccaacaccatggaagaacttgaagaatccagacagaaatgcccaccatgctggtataaatttgctaatatgtgtttgatttgggactgttgtaaaccatggttaaaggtgaaacaccttgtcaacctggttgtaatggacccatttgttgacctggccatcaccatctgcattgtcttaaatacactcttcatggctatggagcactatcccatgacggagcagttcagcagtgtactgtctgttggaaacctggtcttcacagggatcttcacagcagaaatgtttctcaagataattgccatggatccatattattactttcaagaaggctggaatatttttgatggttttattgtgagccttagtttaatggaacttggtttggcaaatgtggaaggattgtcagttctccgatcattccggctgctccgagttttcaagttggcaaaatcttggccaactctaaatatgctaattaagatcattggcaattctgtgggggctctaggaaacctcaccttggtattggccatcatcgtcttcatttttgctgtggtcggcatgcagctctttggtaagagctacaaagaatgtgtctgcaagatttccaatgattgtgaactcccacgctggcacatgcatgactttttccactccttcctgatcgtgttccgcgtgctgtgtggagagtggatagagaccatgtgggactgtatggaggtcgctggccaaaccatgtgccttactgtcttcatgatggtcatggtgattggaaatctagtggttctgaacctcttcttggccttgcttttgagttccttcagttctgacaatcttgctgccactgatgatgataacgaaatgaataatctccagattgctgtgggaaggatgcagaaaggaatcgattttgttaaaagaaaaatacgtgaatttattcagaaagcctttgttaggaagcagaaagctttagatgaaattaaaccgcttgaagatctaaataataaaaaagacagctgtatttccaaccataccaccatagaaataggcaaagacctcaattatctcaaagacggaaatggaactactagtggcataggcagcagtgtagaaaaatatgtcgtggatgaaagtgattacatgtcatttataaacaaccctagcctcactgtgacagtaccaattgctgttggagaatctgactttgaaaatttaaatactgaagaattcagcagcgagtcagatatggaggaaagcaaagagaagctaaatgcaactagttcatctgaaggcagcacggttgatattggagctcccgccgagggagaacagcctgaggttgaacctgaggaatcccttgaacctgaagcctgttttacagaagactgtgtacggaagttcaagtgttgtcagataagcatagaagaaggcaaagggaaactctggtggaatttgaggaaaacatgctataagatagtggagcacaattggttcgaaaccttcattgtcttcatgattctgctgagcagtggggctctggcctttgaagatatatacattgagcagcgaaaaaccattaagaccatgttagaatatgctgacaaggttttcacttacatattcattctggaaatgctgctaaagtgggttgcatatggttttcaagtgtattttaccaatgcctggtgctggctagacttcctgattgttgatgtctcactggttagcttaactgcaaatgccttgggttactcagaacttggtgccatcaaatccctcagaacactaagagctctgaggccactgagagctttgtcccggtttgaaggaatgagggttgttgtaaatgctcttttaggagccattccatctatcatgaatgtacttctggtttgtctgatcttttggctaatattcagtatcatgggagtgaatctctttgctggcaagttttaccattgtattaattacaccactggagagatgtttgatgtaagcgtggtcaacaactacagtgagtgcaaagctctcattgagagcaatcaaactgccaggtggaaaaatgtgaaagtaaactttgataacgtaggacttggatatctgtctctacttcaagtagccacgtttaagggatggatggatattatgtatgcagctgttgattcacgaaatgtagaattacaacccaagtatgaagacaacctgtacatgtatctttattttgtcatctttattatttttggttcattctttaccttgaatcttttcattggtgtcatcatagataacttcaaccaacagaaaaagaagtttggaggtcaagacatttttatgacagaagaacagaagaaatactacaatgcaatgaaaaaactgggttcaaagaaaccacaaaaacccatacctcgacctgctaacaaattccaaggaatggtctttgattttgtaaccaaacaagtctttgatatcagcatcatgatcctcatctgccttaacatggtcaccatgatggtggaaaccgatgaccagagtcaagaaatgacaaacattctgtactggattaatctggtgtttattgttctgttcactggagaatgtgtgctgaaactgatctctcttcgttactactatttcactattggatggaatatttttgattttgtggtggtcattctctccattgtaggaatgtttctggctgaactgatagaaaagtattttgtgtcccctaccctgttccgagtgatccgtcttgccaggattggccgaatcctacgtctgatcaaaggagcaaaggggatccgcacgctgctctttgctttgatgatgtcccttcctgcgttgtttaacatcggcctccttcttttcctggtcatgttcatctacgccatctttgggatgtccaattttgcctatgttaagagggaagttgggatcgatgacatgttcaactttgagacctttggcaacagcatgatctgcctgttccaaattacaacctctgctggctgggatggattgctagcacctattcttaatagtggacctccagactgtgaccctgacaaagatcaccctggaagctcagttaaaggagactgtgggaacccatctgttgggattttcttttttgtcagttacatcatcatatccttcctggttgtggtgaacatgtacatcgcggtcatcctggagaacttcagtgttgctactgaagaaagtgcagagcctctgagtgaggatgactttgagatgttctatgaggtttgggagaagtttgatcccgatgcgacccagtttatagagtttgccaaactttctgattttgcagatgccctggatcctcctcttctcatagcaaaacccaacaaagtccagctcattgccatggatctgcccatggtgagtggtgaccggatccactgtcttgacatcttatttgcttttacaaagcgtgttttgggtgagagtggagagatggatgcccttcgaatacagatggaagagcgattcatggcatcaaacccctccaaagtctcttatgagcccattacgaccacgttgaaacgcaaacaagaggaggtgtctgctattattatccagagggcttacagacgctacctcttgaagcaaaaagttaaaaaggtatcaagtatatacaagaaagacaaaggcaaagaatgtgatggaacacccatcaaagaagatactctcattgataaactgaatgagaattcaactccagagaaaaccgatatgacgccttccaccacgtctccaccctcgtatgatagtgtgaccaaaccagaaaaagaaaaatttgaaaaagacaaatcagaaaaggaagacaaagggaaagatatcagggaaagtaaaaagtaaaaagaaaccaagaattttccattttgtgatcaattgtttacagcccgtgatggtgatgtgtttgtgtcaacaggactcccacaggaggtctatgccaaactgactgtttttacaaatgtatacttaaggtcagtgcctataacaagacagagacctctggtcagcaaactggaactcagtaaactggagaaatagtatcgatggg

SEQ ID NO: 28440 - DNA, 8792 bp, Homo sapiens
  source 1..8792: mol_type = unassigned DNA
atgctgttttctaacagacattgggtaccatcgaatgactgtcagaacagaaagctaaggcaaaggagggaggatgctgtggtcatcctttcttgtttttttcttctttaatgaggatagagcacatgtgagattttactttctactccagtaaaaattctgaagaattgcattggagactgttatattcaacacatacgtggattctgtgttatgatttacatttttctttatttcagcactttcttatgcaaggagctaaacagtgattaaaggagcaggatgaaaagatggcacagtcagtgctggtaccgccaggacctgacagcttccgcttctttaccagggaatcccttgctgctattgaacaacgcattgcagaagagaaagctaagagacccaaacaggaacgcaaggatgaggatgatgaaaatggcccaaagccaaacagtgacttggaagcaggaaaatctcttccatttatttatggagacattcctccagagatggtgtcagtgcccctggaggatctggacccctactatatcaataagaaaacgtttatagtattgaataaagggaaagcaatctctcgattcagtgccacccctgccctttacattttaactcccttcaaccctattagaaaattagctattaagattttggtacattctttattcaatatgctcattatgtgcacgattcttaccaactgtgtatttatgaccatgagtaaccctccagactggacaaagaatgtggagtatacctttacaggaatttatacttttgaatcacttattaaaatacttgcaaggggcttttgtttagaagatttcacatttttacgggatccatggaattggttggatttcacagtcattacttttgcatatgtgacagagtttgtggacctgggcaatgtctcagcgttgagaacattcagagttctccgagcattgaaaacaatttcagtcattccaggcctgaagaccattgtgggggccctgatccagtcagtgaagaagctttctgatgtcatgatcttgactgtgttctgtctaagcgtgtttgcgctaataggattgcagttgttcatgggcaacctacgaaataaatgtttgcaatggcctccagataattcttcctttgaaataaatatcacttccttctttaacaattcattggatgggaatggtactactttcaataggacagtgagcatatttaactgggatgaatatattgaggataaaagtcacttttattttttagaggggcaaaatgatgctctgctttgtggcaacagctcagatgcaggccagtgtcctgaaggatacatctgtgtgaaggctggtagaaaccccaactatggctacacgagctttgacacctttagttgggcctttttgtccttatttcgtctcatgactcaagacttctgggaaaacctttatcaactgacactacgtgctgctgggaaaacgtacatgatattttttgtgctggtcattttcttgggctcattctatctaataaatttgatcttggctgtggtggccatggcctatgaggaacagaatcaggccacattggaagaggctgaacagaaggaagctgaatttcagcagatgctcgaacagttgaaaaagcaacaagaagaagctcaggcggcagctgcagccgcatctgctgaatcaagagacttcagtggtgctggtgggataggagttttttcagagagttcttcagtagcatctaagttgagctccaaaagtgaaaaagagctgaaaaacagaagaaagaaaaagaaacagaaagaacagtctggagaagaagagaaaaatgacagagtccgaaaatcggaatctgaagacagcataagaagaaaaggtttccgtttttccttggaaggaagtaggctgacatatgaaaagagattttcttctccacaccagtccttactgagcatccgtggctcccttttctctccaagacgcaacagtagggcgagccttttcagcttcagaggtcgagcaaaggacattggctctgagaatgactttgctgatgatgagcacagcacctttgaggacaatgacagccgaagagactctctgttcgtgccgcacagacatggagaacggcgccacagcaatgtcagccaggccagccgtgcctccagggtgctccccatcctgcccatgaatgggaagatgcatagcgctgtggactgcaatggtgtggtctccctggtcgggggcccttctaccctcacatctgctgggcagctcctaccagagggcacaactactgaaacagaaataagaaagagacggtccagttcttatcatgtttccatggatttattggaagatcctacatcaaggcaaagagcaatgagtatagccagtattttgaccaacaccatggaagaacttgaagaatccagacagaaatgcccaccatgctggtataaatttgctaatatgtgtttgatttgggactgttgtaaaccatggttaaaggtgaaacaccttgtcaacctggttgtaatggacccatttgttgacctggccatcaccatctgcattgtcttaaatacactcttcatggctatggagcactatcccatgacggagcagttcagcagtgtactgtctgttggaaacctggtcttcacagggatcttcacagcagaaatgtttctcaagataattgccatggatccatattattactttcaagaaggctggaatatttttgatggttttattgtgagccttagtttaatggaacttggtttggcaaatgtggaaggattgtcagttctccgatcattccggctgctccgagttttcaagttggcaaaatcttggccaactctaaatatgctaattaagatcattggcaattctgtgggggctctaggaaacctcaccttggtattggccatcatcgtcttcatttttgctgtggtcggcatgcagctctttggtaagagctacaaagaatgtgtctgcaagatttccaatgattgtgaactcccacgctggcacatgcatgactttttccactccttcctgatcgtgttccgcgtgctgtgtggagagtggatagagaccatgtgggactgtatggaggtcgctggccaaaccatgtgccttactgtcttcatgatggtcatggtgattggaaatctagtggttctgaacctcttcttggccttgcttttgagttccttcagttctgacaatcttgctgccactgatgatgataacgaaatgaataatctccagattgctgtgggaaggatgcagaaaggaatcgattttgttaaaagaaaaatacgtgaatttattcagaaagcctttgttaggaagcagaaagctttagatgaaattaaaccgcttgaagatctaaataataaaaaagacagctgtatttccaaccataccaccatagaaataggcaaagacctcaattatctcaaagacggaaatggaactactagtggcataggcagcagtgtagaaaaatatgtcgtggatgaaagtgattacatgtcatttataaacaaccctagcctcactgtgacagtaccaattgctgttggagaatctgactttgaaaatttaaatactgaagaattcagcagcgagtcagatatggaggaaagcaaagagaagctaaatgcaactagttcatctgaaggcagcacggttgatattggagctcccgccgagggagaacagcctgaggttgaacctgaggaatcccttgaacctgaagcctgttttacagaagactgtgtacggaagttcaagtgttgtcagataagcatagaagaaggcaaagggaaactctggtggaatttgaggaaaacatgctataagatagtggagcacaattggttcgaaaccttcattgtcttcatgattctgctgagcagtggggctctggcctttgaagatatatacattgagcagcgaaaaaccattaagaccatgttagaatatgctgacaaggttttcacttacatattcattctggaaatgctgctaaagtgggttgcatatggttttcaagtgtattttaccaatgcctggtgctggctagacttcctgattgttgatgtctcactggttagcttaactgcaaatgccttgggttactcagaacttggtgccatcaaatccctcagaacactaagagctctgaggccactgagagctttgtcccggtttgaaggaatgagggttgttgtaaatgctcttttaggagccattccatctatcatgaatgtacttctggtttgtctgatcttttggctaatattcagtatcatgggagtgaatctctttgctggcaagttttaccattgtattaattacaccactggagagatgtttgatgtaagcgtggtcaacaactacagtgagtgcaaagctctcattgagagcaatcaaactgccaggtggaaaaatgtgaaagtaaactttgataacgtaggacttggatatctgtctctacttcaagtagccacgtttaagggatggatggatattatgtatgcagctgttgattcacgaaatgtagaattacaacccaagtatgaagacaacctgtacatgtatctttattttgtcatctttattatttttggttcattctttaccttgaatcttttcattggtgtcatcatagataacttcaaccaacagaaaaagaagtttggaggtcaagacatttttatgacagaagaacagaagaaatactacaatgcaatgaaaaaactgggttcaaagaaaccacaaaaacccatacctcgacctgctaacaaattccaaggaatggtctttgattttgtaaccaaacaagtctttgatatcagcatcatgatcctcatctgccttaacatggtcaccatgatggtggaaaccgatgaccagagtcaagaaatgacaaacattctgtactggattaatctggtgtttattgttctgttcactggagaatgtgtgctgaaactgatctctcttcgttactactatttcactattggatggaatatttttgattttgtggtggtcattctctccattgtaggaatgtttctggctgaactgatagaaaagtattttgtgtcccctaccctgttccgagtgatccgtcttgccaggattggccgaatcctacgtctgatcaaaggagcaaaggggatccgcacgctgctctttgctttgatgatgtcccttcctgcgttgtttaacatcggcctccttcttttcctggtcatgttcatctacgccatctttgggatgtccaattttgcctatgttaagagggaagttgggatcgatgacatgttcaactttgagacctttggcaacagcatgatctgcctgttccaaattacaacctctgctggctgggatggattgctagcacctattcttaatagtggacctccagactgtgaccctgacaaagatcaccctggaagctcagttaaaggagactgtgggaacccatctgttgggattttcttttttgtcagttacatcatcatatccttcctggttgtggtgaacatgtacatcgcggtcatcctggagaacttcagtgttgctactgaagaaagtgcagagcctctgagtgaggatgactttgagatgttctatgaggtttgggagaagtttgatcccgatgcgacccagtttatagagtttgccaaactttctgattttgcagatgccctggatcctcctcttctcatagcaaaacccaacaaagtccagctcattgccatggatctgcccatggtgagtggtgaccggatccactgtcttgacatcttatttgcttttacaaagcgtgttttgggtgagagtggagagatggatgcccttcgaatacagatggaagagcgattcatggcatcaaacccctccaaagtctcttatgagcccattacgaccacgttgaaacgcaaacaagaggaggtgtctgctattattatccagagggcttacagacgctacctcttgaagcaaaaagttaaaaaggtatcaagtatatacaagaaagacaaaggcaaagaatgtgatggaacacccatcaaagaagatactctcattgataaactgaatgagaattcaactccagagaaaaccgatatgacgccttccaccacgtctccaccctcgtatgatagtgtgaccaaaccagaaaaagaaaaatttgaaaaagacaaatcagaaaaggaagacaaagggaaagatatcagggaaagtaaaaagtaaaaagaaaccaagaattttccattttgtgatcaattgtttacagcccgtgatggtgatgtgtttgtgtcaacaggactcccacaggaggtctatgccaaactgactgtttttacaaatgtatacttaaggtcagtgcctataacaagacagagacctctggtcagcaaactggaactcagtaaactggagaaatagtatcgatgggaggtttctattttcacaaccagctgacactgctgaagagcagaggcgtaatggctactcagacgataggaaccaatttaaaggggggagggaagttaaatttttatgtaaattcaacatgtgacacttgataatagtaattgtcaccagtgtttatgttttaactgccacacctgccatatttttacaaaacgtgtgctgtgaatttatcacttttctttttaattcacaggttgtttactattatatgtgactatttttgtaaatgggtttgtgtttggggagagggattaaagggagggaattctacatttctctattgtattgtataactggatatattttaaatggaggcatgctgcaattctcattcacacataaaaaaatcacatcacaaaagggaagagtttacttcttgtttcaggatgtttttagatttttgaggtgcttaaatagctattcgtatttttaaggtgtctcatccagaaaaaatttaatgtgcctgtaaatgttccatagaatcacaagcattaaagagttgttttatttttacataacccattaaatgtacatgtatatatgtatatatgtatatgtgcgtgtatatacatatatatgtatacacacatgcacacacagagatatacacataccattacattgtcattcacagtcccagcagcatgactatcacatttttgataagtgtcctttggcataaaataaaaatatcctatcagtcctttctaagaagcctgaattgaccaaaaaacatccccaccaccactttataaagttgattctgctttatcctgcagtattgtttagccatcttctgctcttggtaaggttgacatagtatatgtcaatttaaaaaataaaagtctgctttgtaaatagtaattttacccagtggtgcatgtttgagcaaacaaaaatgatgatttaagcacactacttattgcatcaaatatgtaccacagtaagtatagtttgcaagctttcaacaggtaatatgatgtaattggttccattatagtttgaagctgtcactgctgcatgtttatcttgcctatgctgctgtatcttattccttccactgttcagaagtctaatatgggaagccatatatcagtggtaaagtgaagcaaattgttctaccaagacctcattcttcatgtcattaagcaataggttgcagcaaacaaggaagagcttcttgctttttattcttccaaccttaattgaacactcaatgatgaaaagcccgactgtacaaacatgttgcaagctgcttaaatctgtttaaaatatatggttagagttttctaagaaaatataaatactgtaaaaagttcattttattttatttttcagccttttgtacgtaaaatgagaaattaaaagtatcttcaggtggatgtcacagtcactattgttagtttctgttcctagcacttttaaattgaagcacttcacaaaataagaagcaaggactaggatgcagtgtaggtttctgcttttttattagtactgtaaacttgcacacatttcaatgtgaaacaaatctcaaactgagttcaatgtttatttgctttcaatagtaatgccttatcattgaaagaggcttaaagaaaaaaaaaatcagctgatactcttggcattgcttgaatccaatgtttccacctagtctttttattcagtaatcatcagtcttttccaatgtttgtttacacagatagatcttattgacccatatggcactagaactgtatcagatataatatgggatcccagctttttttcctctcccacaaaaccaggtagtgaagttatattaccagttacagcaaaatactttgtgtttcacaagcaacaataaatgtagattctttatactgaagctattgacttgtagtgtgttggtgaaatgcatgcaggaaaatgctgttaccataaagaacggtaaaccacattacaatcaagccaaaagaataaaggtttcgcttttgtttttgtatttaattgttgtctttgtttctatctttgaaatgccatttaaaggtagatttctatcatgtaaaaataatctatctgaaaaacaaatgtaaagaacacacattaattactataattcatctttcaattttttcatggaatggaagttaattaagaagagtgtattggataactactttaatattggccaaaaagctagatatggcatcaggtagactagtggaaagttacaaaaattaataaaaaattgactaacatttt

SEQ ID NO: 28441 - DNA, 1801 bp, Homo sapiens
  source 1..1801: mol_type = unassigned DNA
atgctgttttctaacagacattgggtaccatcgaatgactgtcagaacagaaagctaaggcaaaggagggaggatgctgtggtcatcctttcttgtttttttcttctttaatgaggatagagcacatgtgagattttactttctactccagtaaaaattctgaagaattgcattggagactgttatattcaacacatacgtggattctgtgttatgatttacatttttctttatttcagcactttcttatgcaaggagctaaacagtgattaaaggagcaggatgaaaagatggcacagtcagtgctggtaccgccaggacctgacagcttccgcttctttaccagggaatcccttgctgctattgaacaacgcattgcagaagagaaagctaagagacccaaacaggaacgcaaggatgaggatgatgaaaatggcccaaagccaaacagtgacttggaagcaggaaaatctcttccatttatttatggagacattcctccagagatggtgtcagtgcccctggaggatctggacccctactatatcaataagaaaacgtttatagtattgaataaagggaaagcaatctctcgattcagtgccacccctgccctttacattttaactcccttcaaccctattagaaaattagctattaagattttggtacattctttattcaatatgctcattatgtgcacgattcttaccaactgtgtatttatgaccatgagtaaccctccagactggacaaagaatgtggagtatacctttacaggaatttatacttttgaatcacttattaaaatacttgcaaggggcttttgtttagaagatttcacatttttacgggatccatggaattggttggatttcacagtcattacttttgcatatgtgacagagtttgtggacctgggcaatgtctcagcgttgagaacattcagagttctccgagcattgaaaacaatttcagtcattccaggcctgaagaccattgtgggggccctgatccagtcagtgaagaagctttctgatgtcatgatcttgactgtgttctgtctaagcgtgtttgcgctaataggattgcagttgttcatgggcaacctacgaaataaatgtttgcaatggcctccagataattcttcctttgaaataaatatcacttccttctttaacaattcattggatgggaatggtactactttcaataggacagtgagcatatttaactgggatgaatatattgaggataaaagtcacttttattttttagaggggcaaaatgatgctctgctttgtggcaacagctcagatgcaggccagtgtcctgaaggatacatctgtgtgaaggctggtagaaaccccaactatggctacacgagctttgacacctttagttgggcctttttgtccttatttcgtctcatgactcaagacttctgggaaaacctttatcaactgacactacgtgctgctgggaaaacgtacatgatattttttgtgctggtcattttcttgggctcattctatctaataaatttgatcttggctgtggtggccatggcctatgaggaacagaatcaggccacattggaagaggctgaacagaaggaagctgaatttcagcagatgctcgaacagttgaaaaagcaacaagaagaagctcaggcggcagctgcagccgcatctgctgaatcaagagacttcagtggtgctggtgggataggagttttttcagagagttcttcagtagcatctaagttgagctccaaaagtgaaaaagagctgaaaaacag

SEQ ID NO: 28442 - DNA, 5826 bp, Homo sapiens
  source 1..5826: mol_type = unassigned DNA
ttttctctcccccccatctctctctctctcctttacacactccctctctctctctttttagcagcaacatacaagccggccatattagagagatggaaataaagcttccttaatgttgtatatgtctttgaagtacatccgtgcatttttttttagcatccaaccattcctcccttgtagttctcgccccctcaaatcaccctctcccgtagcccacccgactaacatctcagtctctgaaaatgcacagagatgcctggctacctcgccctgccttcagcctcacggggctcagtctctttttctctttggtgccaccaggacggagcatggaggtcacagtacctgccaccctcaacgtcctcaatggctctgacgcccgcctgccctgcaccttcaactcctgctacacagtgaaccacaaacagttctccctgaactggacttaccaggagtgcaacaactgctctgaggagatgttcctccagttccgcatgaagatcattaacctgaagctggagcggtttcaagaccgcgtggagttctcagggaaccccagcaagtacgatgtgtcggtgatgctgagaaacgtgcagccggaggatgaggggatttacaactgctacatcatgaacccccctgaccgccaccgtggccatggcaagatccatctgcaggtcctcatggaagagccccctgagcgggactccacggtggccgtgattgtgggtgcctccgtcgggggcttcctggctgtggtcatcttggtgctgatggtggtcaagtgtgtgaggagaaaaaaagagcagaagctgagcacagatgacctgaagaccgaggaggagggcaagacggacggtgaaggcaacccggatgatggcgccaagtagtgggtggccggccctgcagcctcccgtgtcccgtctcctcccctctccgccctgtacagtgaccctgcctgctcgctcttggtgtgcttcccgtgacctaggaccccagggcccacctggggcctcctgaacccccgacttcgtatctcccaccctgcaccaagagtgacccactctcttccatccgagaaacctgccatgctctgggacgtgtgggccctggggagaggagagaaagggctcccacctgccagtccctggggggaggcaggaggcacatgtgagggtccccagagagaagggagtgggtgggcaggggtagaggagggggccgctgtccacctgcccagtgcttggcctggcagtggcttcagagaggacctggtggggagggagggctttcctgtgctgacagcgctccctcaggagggccttggcctggcacggctgtgctcctcccctgctcccagcccagagcagccatcaggctggaggtgacgatgagttcctgaaacttggaggggcatgttaaagggatgactgtgcattccagggcactgacggaaagccagggctgcaggcaaagctggacatgtgccctggcccaggaggccatgttgggccctcgtttccattgctagtggcctccttggggctcccgttggctcctaatcccttaggactgtggatgaggccagactggaagagcagctccaggtagggggccatgtttcccagcggggacccaccaacagaggccagtttcaaagtcagctgaggggctgaggggtggggctccatggtgaatgcaggttgctgcaggctctgccttctccatggggtaaccaccctcgcctgggcaggggcagccaaggctgggaaatgaggaggccatgcacagggtggggcagctttctttggggcttcagtgagaactctcccagttgcccttggtggggtttccacctggcttttggctacagagagggaagggaaagcctgaggccggcataaggggaggccttggaacctgagctgccaatgccagccctgtcccatctgcagccacactactcgctcctctcccaacaactcccttcgtggggacaaaagtgacaattgtaggccaggcacagtggctcacgcctgtaatcccagcactttgggaggccaaggcgggtggattacctccatctgtttagtagaaatgggcaaaaccccatctctactaaaaatacaagaattagctgggcgtggtggcgtgtgcctgtaatcccagctatttgggaggctgaggcaggagaatcgcttgagcccgggaagcagaggttgcagtgaactgagatagtgatagtgccactgcaattcagcctgggtgacatagagagactccatctcaaaaaaaaaaaaaaaaaaaaaaaaaggcaattgtgcggagccaaccatcactgccattacactcacattcaatggaaattgattaggcctgagagaaggagcaagaggcagaaacactgactctgagaccatgaccttggaagatcctcagagatcaactagccaagtcactcacttaaaatggggaaactgaggttccaactgacagaaactgagggtcctgccctcttctctggctcctcagtctccagtttgaagcaacagagccatcattttcccagtgggaggggcctctgtgtcctggtctatgatggggcgagttggaggggtgggcttctctagccctgccccctcccaggagcccagcccctctggccaggactgaggaggagtggagggaagcagggagggagggagcaagtgtgaagggcacagctgctggcaaatgccccattccctgccccagcacttcccagcctttccaggagctctgccccacccctactcaaggagtcaggtgcccagggtagggaataagtctaggaaagggggtggagacaggaccgtgacagtctcagggaccaatccctgcctctgcccatcagattgccaatttggggagacagcaatatcatctgggagattcagcttaatttgcttcaattcagcaaccatttattgagcatctattatgtgccaggcactgtgccgggcactggggatatacacaaagccataagcactggggactgccaggttggcactgtagggaccaagattaactttttggtgcatctaattccacctctgcaagacactgcttccaaggctacagttggggaagatgaagagattctagaatctgtgccctgggaagggagaaacagcagggaagaggggcaatacaacagggtcaagggtgcagaggccaggcagagtgggtgcagagtgggggatgggcaaccagcctggtaacacctgggtgaggtgagcgagtcaagcccatctggaaatgctaaactcatcagctcagtacctaactgccaatcaacacactgccaatgcgggtgggctaagccgccaggatgcctgcagcagatggacgctgcccatccttgagccagccagctgggggcagagaggtgggtggcgggcacctcatgccagctgagaccaagagtggttgtatacatttctgcagcttgcagatttcatttttttggtcaccctttaagtgtccttctctcccaggatgagtgaggagctgtgctgatgttgggaacttatctttttccaggatccataacatttaggggaattatttgcgggctttcctagtgtattctaagaagttctaactctccatcaagaagcccaagattcctggagtctttttttcctctgccctgatcaactggggcccaggaaaagcaatgtctcttcacgggcctcagggccccagcagatggggctgggtcaggaaccatctctgtcccaggtgctcagccctcatatgcattttcttctggagcctcttagaatctcctccagaggactcatagagctgcctcccccaggatggtgaagttgggagcaaaatggggcttctgtaagtagaggtggaaaaccagagagatgtttccacagcagccatttccctaccctgtttcctaacttatgctgacaagttcttcctcttcctaccgtggggttcgagccccacttctggttgcatgttcccaccaccacgctctgctggttttagtcggctgactttctcaactgccccagcctctcctgctctctcagaacctccctctgcccccaccccccatctgtctcttcctcctaattaagggccactgcaaagagagacgggctggctaacccatgggatttagcttataagaacaaagcacaattattcaggactgaactgctttgaggtgccttggaactggctttggaaatagctatctgccccctagctatggactcttcacagttatttccagtttataaaaaggaaaagctgatcggatccatgtttctctctgcgagtctccttggggaggttgggctggtaaatatttgcaaggtcaggttaagcagacagacaattgaaaatactgggcaggtccaaaaggatagttccaggccataggaatggcttggtgcagttaacgggtgatgaagcaagaaatcttccttcctacttatgtcttaaagatggacagcctgtgtctcttgctgtgcctcttgctggcgtcttcctttattgaagcttgctgatgcactgtacatagtctctctctctaggtatagatatattatatatacaaatatcaaacatctcaccacacccaccccaaaagttacactgtgtgtgtgtggggaggtgtaataacttctcagtgttttgagttgattcaccaaaggcaaattttggaatgttcttgcgctttgtgcacttggaggggaaaacccaactacatatgcactttcttggttgtgtgtgctatagagaggttggaaggggtggttggaaggggagagaaactgagatggccctctgtgactcgactgctgggatgtatctgcttttgggagcagactgagtttcttttgcaatttgtcttattgtttgggtctactggcaacaataaactatctcccctgaaaatccctcgagtgtggctttattcaggggttcagggcagggtaggctgatgcttcaccaggatcttaactggaaccctaggtgctcctttcctggtaatcccattggcgctgccagatctccagcatctgagggcctcaatgcccctgcctcacaaggggaaggttgtctaccccacacttgtgcccccacagatgtttcatccctttgccttccccaaccccctggggactccgctcaccctggaacagagtggctgaacacctacttcttggagggctctcgattattttggggatgaagacaaccccggaagctcccaaggctgactgtcatgcggatgttgcctgtcctttgcatgggcagacaggccatccttcctgctctgttccccaaaggtgttggattagacatttcttttgcctcctctggactcagaaagaatagatgacagctggtcagagtctgccctcatgcagttcatggagaagggtggctgtgggaaggttcaggtggctcatgtcccatctacatactgctggatcctatatatatgtgccaaagcagccctaagaagtttaggaccaagggcaacctcctggctaggggctccactgtcccagacaggcctttttttctcccttgctcttcattcttccgtctctttgcatttctccctctctcccttgcaccgctctctctctctctctctctctctctctgtctgtctgtctctctctctcttgcctaggaggcttaccaggcttaccttcctcttcctactctggggttcgagccccacttctggctgcatgctccggccaccacgctctggtggtttcagtctgctgactttct

SEQ ID NO: 28443 - DNA, 9091 bp, Homo sapiens
  source 1..9091: mol_type = unassigned DNA
gaagcggaggcataagcagagaggattctggaaaggtctctttgttttcttatccacagagaaagaaagaaaaaaaattgtaactaatttgtaaacctctgtggtcaaaaaaaaaaaaaaaaaaaaaagctgaacagctgcagaggaagacacgttataccctaaccatcttggatgctgggctttgttatgctgtaattcataaggctctgttttatcagagattatggagcaagaaaactgaagccaagccacatcaaggtttgacagggatgagatacctgtcaaggattcatagtagagtggcttactgggaaaggagcaaagaatctcttctagggatattgtaagaataaatgagataattcacagaagggacctggagcttttccggaaaaaggtgctgtgactatctaaggtaattcgtatgcaagaagctacacgtaattaaatgtgcaggatgaaaagatggcacaggcactgttggtacccccaggacctgaaagcttccgcctttttactagagaatctcttgctgctatcgaaaaacgtgctgcagaagagaaagccaagaagcccaaaaaggaacaagataatgatgatgagaacaaaccaaagccaaatagtgacttggaagctggaaagaaccttccatttatttatggagacattcctccagagatggtgtcagagcccctggaggacctggatccctactatatcaataagaaaacttttatagtaatgaataaaggaaaggcaattttccgattcagtgccacctctgccttgtatattttaactccactaaaccctgttaggaaaattgctatcaagattttggtacattctttattcagcatgcttatcatgtgcactattttgaccaactgtgtatttatgaccttgagcaaccctcctgactggacaaagaatgtagagtacacattcactggaatctatacctttgagtcacttataaaaatcttggcaagagggttttgcttagaagattttacgtttcttcgtgatccatggaactggctggatttcagtgtcattgtgatggcatatgtgacagagtttgtggacctgggcaatgtctcagcgttgagaacattcagagttctccgagcactgaaaacaatttcagtcattccaggtttaaagaccattgtgggggccctgatccagtcggtaaagaagctttctgatgtgatgatcctgactgtgttctgtctgagcgtgtttgctctcattgggctgcagctgttcatgggcaatctgaggaataaatgtttgcagtggcccccaagcgattctgcttttgaaaccaacaccacttcctactttaatggcacaatggattcaaatgggacatttgttaatgtaacaatgagcacatttaactggaaggattacattggagatgacagtcacttttatgttttggatgggcaaaaagaccctttactctgtggaaatggctcagatgcaggccagtgtccagaaggatacatctgtgtgaaggctggtcgaaaccccaactatggctacacaagctttgacacctttagctgggctttcctgtctctatttcgactcatgactcaagactactgggaaaatctttaccagttgacattacgtgctgctgggaaaacatacatgatattttttgtcctggtcattttcttgggctcattttatttggtgaatttgatcctggctgtggtggccatggcctatgaggagcagaatcaggccaccttggaagaagcagaacaaaaagaggccgaatttcagcagatgctcgaacagcttaaaaagcaacaggaagaagctcaggcagttgcggcagcatcagctgcttcaagagatttcagtggaataggtgggttaggagagctgttggaaagttcttcagaagcatcaaagttgagttccaaaagtgctaaagaatggaggaaccgaaggaagaaaagaagacagagagagcaccttgaaggaaacaacaaaggagagagagacagctttcccaaatccgaatctgaagacagcgtcaaaagaagcagcttccttttctccatggatggaaacagactgaccagtgacaaaaaattctgctcccctcatcagtctctcttgagtatccgtggctccctgttttccccaagacgcaatagcaaaacaagcattttcagtttcagaggtcgggcaaaggatgttggatctgaaaatgactttgctgatgatgaacacagcacatttgaagacagcgaaagcaggagagactcactgtttgtgccgcacagacatggagagcgacgcaacagtaacgttagtcaggccagtatgtcatccaggatggtgccagggcttccagcaaatgggaagatgcacagcactgtggattgcaatggtgtggtttccttggtgggtggaccttcagctctaacgtcacctactggacaacttcccccagagggcaccaccacagaaacggaagtcagaaagagaaggttaagctcttaccagatttcaatggagatgctggaggattcctctggaaggcaaagagccgtgagcatagccagcattctgaccaacacaatggaagaacttgaagaatctagacagaaatgtccgccatgctggtatagatttgccaatgtgttcttgatctgggactgctgtgatgcatggttaaaagtaaaacatcttgtgaatttaattgttatggatccatttgttgatcttgccatcactatttgcattgtcttaaataccctctttatggccatggagcactaccccatgactgagcaattcagtagtgtgttgactgtaggaaacctggtctttactgggattttcacagcagaaatggttctcaagatcattgccatggatccttattactatttccaagaaggctggaatatctttgatggaattattgtcagcctcagtttaatggagcttggtctgtcaaatgtggagggattgtctgtactgcgatcattcagactgcttagagttttcaagttggcaaaatcctggcccacactaaatatgctaattaagatcattggcaattctgtgggggctctaggaaacctcaccttggtgttggccatcatcgtcttcatttttgctgtggtcggcatgcagctctttggtaagagctacaaagaatgtgtctgcaagatcaatgatgactgtacgctcccacggtggcacatgaacgacttcttccactccttcctgattgtgttccgcgtgctgtgtggagagtggatagagaccatgtgggactgtatggaggtcgctggccaaaccatgtgccttattgttttcatgttggtcatggtcattggaaaccttgtggttctgaacctctttctggccttattgttgagttcatttagctcagacaaccttgctgctactgatgatgacaatgaaatgaataatctgcagattgcagtaggaagaatgcaaaagggaattgattatgtgaaaaataagatgcgggagtgtttccaaaaagccttttttagaaagccaaaagttatagaaatccatgaaggcaataagatagacagctgcatgtccaataatactggaattgaaataagcaaagagcttaattatcttagagatgggaatggaaccaccagtggtgtaggtactggaagcagtgttgaaaaatacgtaatcgatgaaaatgattatatgtcattcataaacaaccccagcctcaccgtcacagtgccaattgctgttggagagtctgactttgaaaacttaaatactgaagagttcagcagtgagtcagaactagaagaaagcaaagagaaattaaatgcaaccagctcatctgaaggaagcacagttgatgttgttctaccccgagaaggtgaacaagctgaaactgaacccgaagaagaccttaaaccggaagcttgttttactgaaggatgtattaaaaagtttccattctgtcaagtaagtacagaagaaggcaaagggaagatctggtggaatcttcgaaaaacctgctacagtattgttgagcacaactggtttgagactttcattgtgttcatgatccttctcagtagtggtgcattggcctttgaagatatatacattgaacagcgaaagactatcaaaaccatgctagaatatgctgacaaagtctttacctatatattcattctggaaatgcttctcaaatgggttgcttatggatttcaaacatatttcactaatgcctggtgctggctagatttcttgatcgttgatgtttctttggttagcctggtagccaatgctcttggctactcagaactcggtgccatcaaatcattacggacattaagagctttaagacctctaagagccttatcccggtttgaaggcatgagggtggttgtgaatgctcttgttggagcaattccctctatcatgaatgtgctgttggtctgtctcatcttctggttgatctttagcatcatgggtgtgaatttgtttgctggcaagttctaccactgtgttaacatgacaacgggtaacatgtttgacattagtgatgttaacaatttgagtgactgtcaggctcttggcaagcaagctcggtggaaaaacgtgaaagtaaactttgataatgttggcgctggctatcttgcactgcttcaagtggccacatttaaaggctggatggatattatgtatgcagctgttgattcacgagatgttaaacttcagcctgtatatgaagaaaatctgtacatgtatttatactttgtcatctttatcatctttgggtcattcttcactctgaatctattcattggtgtcatcatagataacttcaaccagcagaaaaagaagtttggaggtcaagacatctttatgacagaggaacagaaaaaatattacaatgcaatgaagaaacttggatccaagaaacctcagaaacccatacctcgcccagcaaacaaattccaaggaatggtctttgattttgtaaccagacaagtctttgatatcagcatcatgatcctcatctgcctcaacatggtcaccatgatggtggaaacggatgaccagggcaaatacatgaccctagttttgtcccggatcaacctagtgttcattgttctgttcactggagaatttgtgctgaagctcgtctccctcagacactactacttcactataggctggaacatctttgactttgtggtggtgattctctccattgtaggtatgtttctggctgagatgatagaaaagtattttgtgtcccctaccttgttccgagtgatccgtcttgccaggattggccgaatcctacgtctgatcaaaggagcaaaggggatccgcacgctgctctttgctttgatgatgtcccttcctgcgttgtttaacatcggcctcctgctcttcctggtcatgtttatctatgccatctttgggatgtccaactttgcctatgttaaaaaggaagctggaattgatgacatgttcaactttgagacctttggcaacagcatgatctgcttgttccaaattacaacctctgctggctgggatggattgctagcacctattcttaatagtgcaccacccgactgtgaccctgacacaattcaccctggcagctcagttaagggagactgtgggaacccatctgttgggattttcttttttgtcagttacatcatcatatccttcctggttgtggtgaacatgtacatcgcggtcatcctggagaacttcagtgttgctactgaagaaagtgcagagcccctgagtgaggatgactttgagatgttctatgaggtttgggaaaagtttgatcccgatgcgacccagtttatagagttctctaaactctctgattttgcagctgccctggatcctcctcttctcatagcaaaacccaacaaagtccagcttattgccatggatctgcccatggtcagtggtgaccggatccactgtcttgatattttatttgcctttacaaagcgtgttttgggtgagagtggagagatggatgcccttcgaatacagatggaagacaggtttatggcatcaaacccctccaaagtctcttatgagcctattacaaccactttgaaacgtaaacaagaggaggtgtctgccgctatcattcagcgtaatttcagatgttatcttttaaagcaaaggttaaaaaatatatcaagtaactataacaaagaggcaattaaagggaggattgacttacctataaaacaagacatgattattgacaaactaaatgggaactccactccagaaaaaacagatgggagttcctctaccacctctcctccttcctatgatagtgtaacaaaaccagacaaggaaaagtttgagaaagacaaaccagaaaaagaaagcaaaggaaaagaggtcagagaaaatcaaaagtaaaaagaaacaaagaattatctttgtgatcaattgtttacagcctatgaaggtaaagtatatgtgtcaactggacttcaagaggaggtccatgccaaactgactgttttaacaaatactcatagtcagtgcctatacaagacagtgaagtgacctctctgtcactgcaactctgtgaagcagggtatcaacattgacaagaggttgctgtttttattaccagctgacactgctgaggagaaacccaatggctacctagactatagggatagttgtgcaaagtgaacattgtaactacaccaaacacctttagtacagtccttgcatccattctatttttaacttccatatctgccatatttttacaaaatttgttctagtgcatttccatggtccccaattcatagtttattcataatgctatgtcactatttttgtaaatgaggtttacgttgaagaaacagtatacaagaaccctgtctctcaaatgatcagacaaaggtgttttgccagagagataaaatttttgctcaaaaccagaaaaagaattgtaatggctacagtttcagttacttccattttctagatggctttaattttgaaagtattttagtctgttatgtttgtttctatctgaacagttatgtgcctgtaaagtctcctctaatatttaaaggattatttttatgcaaagtattctgtttcagcaagtgcaaattttattctaagtttcagagctctatatttaatttaggtcaaatgctttccaaaaagtaatctaataaatccattctagaaaaatatatctaaagtattgctttagaatagttgttccactttctgctgcagtattgctttgccatcttctgctctcagcaaagctgatagtctatgtcaattaaataccctatgttatgtaaatagttattttatcctgtggtgcatgtttgggcaaatatatatatagcctgataaacaacttctattaaatcaaatatgtaccacagtgtatgtgtcttttgcaagcttccaacagggatgtatcctgtatcattcattaaacatagtttaaaggctatcactaatgcatgttaatattgcctatgctgctctattttactcaatccattcttcacaagtcttggttaaagaatgtcacatattggtgatagaatgaattcaacctgctctgtccattatgtcaagcagaataatttgaagctatttacaaacacctttacttttgcacttttaattcaacatgagtatcatatggtatctctctagatttcaaggaaacacactggatactgcctactgacaaaacctattcttcatattttgctaaaaatatgtctaaaacttgtttaaatataaataatgtaaaaatataatcaactttatttgtcagcattttgtacataagaaaattattttcaggttgatgacatcacaatttattttactttatgcttttgcttttgatttttaatcacaattccaaacttttgaatccataagatttttcaatggataatttcctaaaataaaagttagataatgggttttatggatttctttgttataatatattttctaccattccaataggagatacattggtcaaacactcaaacctagatcattttctaccaactatggttgcctcaatataaccttttattcatagatgtttttttttattcaacttttgtagtatttacgtatgcagactagtcttatttttttaattcctgctgcactaaagctattacaaatataacatggactttgttctttttagccatgaacaaagtggcaaagttgtgcaattacctaacatgatataaatttttgttttttgcacaaaccaaaagtttaatgttaattctttttacaaaactatttactgtagtgtattgaagaactgcatgcagggaattgctattgctaaaaagaatggtgagctacgtcattattgagccaaaagaataaatttcattttttattgcatttcacttattggcctctggggttttttgtttttgttttttgctgttggcagtttaaaatatatataattaataaaacctgtgcttgatctgacatttgtatacataaaagtttacatgaattttacaacaaactagtgcatgattcaccaagcagtactacagaacaaaggcaaattaaaagcagctttgtgaacttttatgtgtgcaaaggatcaagttcacatgttccaactttcaggtttgataataatagtagtaaccacctacaatagctttcaatttcaattaactcccttggctataagcatctaaactcatcttctttcaatataattgatgctatctcctaattacttggtggctaataaatgttacattctttgttacttaaatgcattatataaactcctatgtatacataaggtattaatgatatagttattgagaatttatattaacttttttttcaagaacccttggatttatgtgaggtcaaaaccaaactcttattctcagtggaaaactccagttgtaatgcatatttttaaagacaatttggatctaaatatgtatttcataattctcccataataaattatataaggtgg

SEQ ID NO: 28444 - DNA, 9123 bp, Homo sapiens
  source 1..9123: mol_type = unassigned DNA
accatagagtgaatctcagaacaggaagcggaggcataagcagagaggattctggaaaggtctctttgttttcttatccacagagaaagaaagaaaaaaaattgtaactaatttgtaaacctctgtggtcaaaaaaaaaaaaaaaaaaaaaagctgaacagctgcagaggaagacacgttataccctaaccatcttggatgctgggctttgttatgctgtaattcataaggctctgttttatcagagattatggagcaagaaaactgaagccaagccacatcaaggtttgacagggatgagatacctgtcaaggattcatagtagagtggcttactgggaaaggagcaaagaatctcttctagggatattgtaagaataaatgagataattcacagaagggacctggagcttttccggaaaaaggtgctgtgactatctaaggtaattcgtatgcaagaagctacacgtaattaaatgtgcaggatgaaaagatggcacaggcactgttggtacccccaggacctgaaagcttccgcctttttactagagaatctcttgctgctatcgaaaaacgtgctgcagaagagaaagccaagaagcccaaaaaggaacaagataatgatgatgagaacaaaccaaagccaaatagtgacttggaagctggaaagaaccttccatttatttatggagacattcctccagagatggtgtcagagcccctggaggacctggatccctactatatcaataagaaaacttttatagtaatgaataaaggaaaggcaattttccgattcagtgccacctctgccttgtatattttaactccactaaaccctgttaggaaaattgctatcaagattttggtacattctttattcagcatgcttatcatgtgcactattttgaccaactgtgtatttatgaccttgagcaaccctcctgactggacaaagaatgtagagtacacattcactggaatctatacctttgagtcacttataaaaatcttggcaagagggttttgcttagaagattttacgtttcttcgtgatccatggaactggctggatttcagtgtcattgtgatggcgtatgtaacagaatttgtaagcctaggcaatgtttcagcccttcgaactttcagagtcttgagagctctgaaaactatttctgtaattccaggtttaaagaccattgtgggggccctgatccagtcggtaaagaagctttctgatgtgatgatcctgactgtgttctgtctgagcgtgtttgctctcattgggctgcagctgttcatgggcaatctgaggaataaatgtttgcagtggcccccaagcgattctgcttttgaaaccaacaccacttcctactttaatggcacaatggattcaaatgggacatttgttaatgtaacaatgagcacatttaactggaaggattacattggagatgacagtcacttttatgttttggatgggcaaaaagaccctttactctgtggaaatggctcagatgcaggccagtgtccagaaggatacatctgtgtgaaggctggtcgaaaccccaactatggctacacaagctttgacacctttagctgggctttcctgtctctatttcgactcatgactcaagactactgggaaaatctttaccagttgacattacgtgctgctgggaaaacatacatgatattttttgtcctggtcattttcttgggctcattttatttggtgaatttgatcctggctgtggtggccatggcctatgaggagcagaatcaggccaccttggaagaagcagaacaaaaagaggccgaatttcagcagatgctcgaacagcttaaaaagcaacaggaagaagctcaggcagttgcggcagcatcagctgcttcaagagatttcagtggaataggtgggttaggagagctgttggaaagttcttcagaagcatcaaagttgagttccaaaagtgctaaagaatggaggaaccgaaggaagaaaagaagacagagagagcaccttgaaggaaacaacaaaggagagagagacagctttcccaaatccgaatctgaagacagcgtcaaaagaagcagcttccttttctccatggatggaaacagactgaccagtgacaaaaaattctgctcccctcatcagtctctcttgagtatccgtggctccctgttttccccaagacgcaatagcaaaacaagcattttcagtttcagaggtcgggcaaaggatgttggatctgaaaatgactttgctgatgatgaacacagcacatttgaagacagcgaaagcaggagagactcactgtttgtgccgcacagacatggagagcgacgcaacagtaacgttagtcaggccagtatgtcatccaggatggtgccagggcttccagcaaatgggaagatgcacagcactgtggattgcaatggtgtggtttccttggtgggtggaccttcagctctaacgtcacctactggacaacttcccccagagggcaccaccacagaaacggaagtcagaaagagaaggttaagctcttaccagatttcaatggagatgctggaggattcctctggaaggcaaagagccgtgagcatagccagcattctgaccaacacaatggaagaacttgaagaatctagacagaaatgtccgccatgctggtatagatttgccaatgtgttcttgatctgggactgctgtgatgcatggttaaaagtaaaacatcttgtgaatttaattgttatggatccatttgttgatcttgccatcactatttgcattgtcttaaataccctctttatggccatggagcactaccccatgactgagcaattcagtagtgtgttgactgtaggaaacctggtctttactgggattttcacagcagaaatggttctcaagatcattgccatggatccttattactatttccaagaaggctggaatatctttgatggaattattgtcagcctcagtttaatggagcttggtctgtcaaatgtggagggattgtctgtactgcgatcattcagactgcttagagttttcaagttggcaaaatcctggcccacactaaatatgctaattaagatcattggcaattctgtgggggctctaggaaacctcaccttggtgttggccatcatcgtcttcatttttgctgtggtcggcatgcagctctttggtaagagctacaaagaatgtgtctgcaagatcaatgatgactgtacgctcccacggtggcacatgaacgacttcttccactccttcctgattgtgttccgcgtgctgtgtggagagtggatagagaccatgtgggactgtatggaggtcgctggccaaaccatgtgccttattgttttcatgttggtcatggtcattggaaaccttgtggttctgaacctctttctggccttattgttgagttcatttagctcagacaaccttgctgctactgatgatgacaatgaaatgaataatctgcagattgcagtaggaagaatgcaaaagggaattgattatgtgaaaaataagatgcgggagtgtttccaaaaagccttttttagaaagccaaaagttatagaaatccatgaaggcaataagatagacagctgcatgtccaataatactggaattgaaataagcaaagagcttaattatcttagagatgggaatggaaccaccagtggtgtaggtactggaagcagtgttgaaaaatacgtaatcgatgaaaatgattatatgtcattcataaacaaccccagcctcaccgtcacagtgccaattgctgttggagagtctgactttgaaaacttaaatactgaagagttcagcagtgagtcagaactagaagaaagcaaagagaaattaaatgcaaccagctcatctgaaggaagcacagttgatgttgttctaccccgagaaggtgaacaagctgaaactgaacccgaagaagaccttaaaccggaagcttgttttactgaaggatgtattaaaaagtttccattctgtcaagtaagtacagaagaaggcaaagggaagatctggtggaatcttcgaaaaacctgctacagtattgttgagcacaactggtttgagactttcattgtgttcatgatccttctcagtagtggtgcattggcctttgaagatatatacattgaacagcgaaagactatcaaaaccatgctagaatatgctgacaaagtctttacctatatattcattctggaaatgcttctcaaatgggttgcttatggatttcaaacatatttcactaatgcctggtgctggctagatttcttgatcgttgatgtttctttggttagcctggtagccaatgctcttggctactcagaactcggtgccatcaaatcattacggacattaagagctttaagacctctaagagccttatcccggtttgaaggcatgagggtggttgtgaatgctcttgttggagcaattccctctatcatgaatgtgctgttggtctgtctcatcttctggttgatctttagcatcatgggtgtgaatttgtttgctggcaagttctaccactgtgttaacatgacaacgggtaacatgtttgacattagtgatgttaacaatttgagtgactgtcaggctcttggcaagcaagctcggtggaaaaacgtgaaagtaaactttgataatgttggcgctggctatcttgcactgcttcaagtggccacatttaaaggctggatggatattatgtatgcagctgttgattcacgagatgttaaacttcagcctgtatatgaagaaaatctgtacatgtatttatactttgtcatctttatcatctttgggtcattcttcactctgaatctattcattggtgtcatcatagataacttcaaccagcagaaaaagaagtttggaggtcaagacatctttatgacagaggaacagaaaaaatattacaatgcaatgaagaaacttggatccaagaaacctcagaaacccatacctcgcccagcaaacaaattccaaggaatggtctttgattttgtaaccagacaagtctttgatatcagcatcatgatcctcatctgcctcaacatggtcaccatgatggtggaaacggatgaccagggcaaatacatgaccctagttttgtcccggatcaacctagtgttcattgttctgttcactggagaatttgtgctgaagctcgtctccctcagacactactacttcactataggctggaacatctttgactttgtggtggtgattctctccattgtaggtatgtttctggctgagatgatagaaaagtattttgtgtcccctaccttgttccgagtgatccgtcttgccaggattggccgaatcctacgtctgatcaaaggagcaaaggggatccgcacgctgctctttgctttgatgatgtcccttcctgcgttgtttaacatcggcctcctgctcttcctggtcatgtttatctatgccatctttgggatgtccaactttgcctatgttaaaaaggaagctggaattgatgacatgttcaactttgagacctttggcaacagcatgatctgcttgttccaaattacaacctctgctggctgggatggattgctagcacctattcttaatagtgcaccacccgactgtgaccctgacacaattcaccctggcagctcagttaagggagactgtgggaacccatctgttgggattttcttttttgtcagttacatcatcatatccttcctggttgtggtgaacatgtacatcgcggtcatcctggagaacttcagtgttgctactgaagaaagtgcagagcccctgagtgaggatgactttgagatgttctatgaggtttgggaaaagtttgatcccgatgcgacccagtttatagagttctctaaactctctgattttgcagctgccctggatcctcctcttctcatagcaaaacccaacaaagtccagcttattgccatggatctgcccatggtcagtggtgaccggatccactgtcttgatattttatttgcctttacaaagcgtgttttgggtgagagtggagagatggatgcccttcgaatacagatggaagacaggtttatggcatcaaacccctccaaagtctcttatgagcctattacaaccactttgaaacgtaaacaagaggaggtgtctgccgctatcattcagcgtaatttcagatgttatcttttaaagcaaaggttaaaaaatatatcaagtaactataacaaagaggcaattaaagggaggattgacttacctataaaacaagacatgattattgacaaactaaatgggaactccactccagaaaaaacagatgggagttcctctaccacctctcctccttcctatgatagtgtaacaaaaccagacaaggaaaagtttgagaaagacaaaccagaaaaagaaagcaaaggaaaagaggtcagagaaaatcaaaagtaaaaagaaacaaagaattatctttgtgatcaattgtttacagcctatgaaggtaaagtatatgtgtcaactggacttcaagaggaggtccatgccaaactgactgttttaacaaatactcatagtcagtgcctatacaagacagtgaagtgacctctctgtcactgcaactctgtgaagcagggtatcaacattgacaagaggttgctgtttttattaccagctgacactgctgaggagaaacccaatggctacctagactatagggatagttgtgcaaagtgaacattgtaactacaccaaacacctttagtacagtccttgcatccattctatttttaacttccatatctgccatatttttacaaaatttgttctagtgcatttccatggtccccaattcatagtttattcataatgctatgtcactatttttgtaaatgaggtttacgttgaagaaacagtatacaagaaccctgtctctcaaatgatcagacaaaggtgttttgccagagagataaaatttttgctcaaaaccagaaaaagaattgtaatggctacagtttcagttacttccattttctagatggctttaattttgaaagtattttagtctgttatgtttgtttctatctgaacagttatgtgcctgtaaagtctcctctaatatttaaaggattatttttatgcaaagtattctgtttcagcaagtgcaaattttattctaagtttcagagctctatatttaatttaggtcaaatgctttccaaaaagtaatctaataaatccattctagaaaaatatatctaaagtattgctttagaatagttgttccactttctgctgcagtattgctttgccatcttctgctctcagcaaagctgatagtctatgtcaattaaataccctatgttatgtaaatagttattttatcctgtggtgcatgtttgggcaaatatatatatagcctgataaacaacttctattaaatcaaatatgtaccacagtgtatgtgtcttttgcaagcttccaacagggatgtatcctgtatcattcattaaacatagtttaaaggctatcactaatgcatgttaatattgcctatgctgctctattttactcaatccattcttcacaagtcttggttaaagaatgtcacatattggtgatagaatgaattcaacctgctctgtccattatgtcaagcagaataatttgaagctatttacaaacacctttacttttgcacttttaattcaacatgagtatcatatggtatctctctagatttcaaggaaacacactggatactgcctactgacaaaacctattcttcatattttgctaaaaatatgtctaaaacttgtttaaatataaataatgtaaaaatataatcaactttatttgtcagcattttgtacataagaaaattattttcaggttgatgacatcacaatttattttactttatgcttttgcttttgatttttaatcacaattccaaacttttgaatccataagatttttcaatggataatttcctaaaataaaagttagataatgggttttatggatttctttgttataatatattttctaccattccaataggagatacattggtcaaacactcaaacctagatcattttctaccaactatggttgcctcaatataaccttttattcatagatgtttttttttattcaacttttgtagtatttacgtatgcagactagtcttatttttttaattcctgctgcactaaagctattacaaatataacatggactttgttctttttagccatgaacaaagtggcaaagttgtgcaattacctaacatgatataaatttttgttttttgcacaaaccaaaagtttaatgttaattctttttacaaaactatttactgtagtgtattgaagaactgcatgcagggaattgctattgctaaaaagaatggtgagctacgtcattattgagccaaaagaataaatttcattttttattgcatttcacttattggcctctggggttttttgtttttgttttttgctgttggcagtttaaaatatatataattaataaaacctgtgcttgatctgacatttgtatacataaaagtttacatgaattttacaacaaactagtgcatgattcaccaagcagtactacagaacaaaggcaaattaaaagcagctttgtgaacttttatgtgtgcaaaggatcaagttcacatgttccaactttcaggtttgataataatagtagtaaccacctacaatagctttcaatttcaattaactcccttggctataagcatctaaactcatcttctttcaatataattgatgctatctcctaattacttggtggctaataaatgttacattctttgttacttaaatgcattatataaactcctatgtatacataaggtattaatgatatagttattgagaatttatattaacttttttttcaagaacccttggatttatgtgaggtcaaaaccaaactcttattctcagtggaaaactccagttgtaatgcatatttttaaagacaatttggatctaaatatgtatttcataattctcccataataaattatataaggtggctaattgg

SEQ ID NO: 28445 - DNA, 6599 bp, Homo sapiens
  source 1..6599: mol_type = unassigned DNA
taccctaaccatcttggatgctgggctttgttatgctgtaattcataaggctctgttttatcagagattatggagcaagaaaactgaagccaagccacatcaaggtttgacagggatgagatacctgtcaaggattcatagtagagtggcttactgggaaaggagcaaagaatctcttctagggatattgtaagaataaatgagataattcacagaagggacctggagcttttccggaaaaaggtgctgtgactatctaaggtaattcgtatgcaagaagctacacgtaattaaatgtgcaggatgaaaagatggcacaggcactgttggtacccccaggacctgaaagcttccgcctttttactagagaatctcttgctgctatcgaaaaacgtgctgcagaagagaaagccaagaagcccaaaaaggaacaagataatgatgatgagaacaaaccaaagccaaatagtgacttggaagctggaaagaaccttccatttatttatggagacattcctccagagatggtgtcagagcccctggaggacctggatccctactatatcaataagaaaacttttatagtaatgaataaaggaaaggcaattttccgattcagtgccacctctgccttgtatattttaactccactaaaccctgttaggaaaattgctatcaagattttggtacattctttattcagcatgcttatcatgtgcactattttgaccaactgtgtatttatgaccttgagcaaccctcctgactggacaaagaatgtagagtacacattcactggaatctatacctttgagtcacttataaaaatcttggcaagagggttttgcttagaagattttacgtttcttcgtgatccatggaactggctggatttcagtgtcattgtgatggcgtatgtaacagaatttgtaagcctaggcaatgtttcagcccttcgaactttcagagtcttgagagctctgaaaactatttctgtaattccaggtttaaagaccattgtgggggccctgatccagtcggtaaagaagctttctgatgtgatgatcctgactgtgttctgtctgagcgtgtttgctctcattgggctgcagctgttcatgggcaatctgaggaataaatgtttgcagtggcccccaagcgattctgcttttgaaaccaacaccacttcctactttaatggcacaatggattcaaatgggacatttgttaatgtaacaatgagcacatttaactggaaggattacattggagatgacagtcacttttatgttttggatgggcaaaaagaccctttactctgtggaaatggctcagatgcaggccagtgtccagaaggatacatctgtgtgaaggctggtcgaaaccccaactatggctacacaagctttgacacctttagctgggctttcctgtctctatttcgactcatgactcaagactactgggaaaatctttaccagttgacattacgtgctgctgggaaaacatacatgatattttttgtcctggtcattttcttgggctcattttatttggtgaatttgatcctggctgtggtggccatggcctatgaggagcagaatcaggccaccttggaagaagcagaacaaaaagaggccgaatttcagcagatgctcgaacagcttaaaaagcaacaggaagaagctcaggcagttgcggcagcatcagctgcttcaagagatttcagtggaataggtgggttaggagagctgttggaaagttcttcagaagcatcaaagttgagttccaaaagtgctaaagaatggaggaaccgaaggaagaaaagaagacagagagagcaccttgaaggaaacaacaaaggagagagagacagctttcccaaatccgaatctgaagacagcgtcaaaagaagcagcttccttttctccatggatggaaacagactgaccagtgacaaaaaattctgctcccctcatcagtctctcttgagtatccgtggctccctgttttccccaagacgcaatagcaaaacaagcattttcagtttcagaggtcgggcaaaggatgttggatctgaaaatgactttgctgatgatgaacacagcacatttgaagacagcgaaagcaggagagactcactgtttgtgccgcacagacatggagagcgacgcaacagtaacggcaccaccacagaaacggaagtcagaaagagaaggttaagctcttaccagatttcaatggagatgctggaggattcctctggaaggcaaagagccgtgagcatagccagcattctgaccaacacaatggaagaacttgaagaatctagacagaaatgtccgccatgctggtatagatttgccaatgtgttcttgatctgggactgctgtgatgcatggttaaaagtaaaacatcttgtgaatttaattgttatggatccatttgttgatcttgccatcactatttgcattgtcttaaataccctctttatggccatggagcactaccccatgactgagcaattcagtagtgtgttgactgtaggaaacctggtctttactgggattttcacagcagaaatggttctcaagatcattgccatggatccttattactatttccaagaaggctggaatatctttgatggaattattgtcagcctcagtttaatggagcttggtctgtcaaatgtggagggattgtctgtactgcgatcattcagactgcttagagttttcaagttggcaaaatcctggcccacactaaatatgctaattaagatcattggcaattctgtgggggctctaggaaacctcaccttggtgttggccatcatcgtcttcatttttgctgtggtcggcatgcagctctttggtaagagctacaaagaatgtgtctgcaagatcaatgatgactgtacgctcccacggtggcacatgaacgacttcttccactccttcctgattgtgttccgcgtgctgtgtggagagtggatagagaccatgtgggactgtatggaggtcgctggccaaaccatgtgccttattgttttcatgttggtcatggtcattggaaaccttgtggttctgaacctctttctggccttattgttgagttcatttagctcagacaaccttgctgctactgatgatgacaatgaaatgaataatctgcagattgcagtaggaagaatgcaaaagggaattgattatgtgaaaaataagatgcgggagtgtttccaaaaagccttttttagaaagccaaaagttatagaaatccatgaaggcaataagatagacagctgcatgtccaataatactggaattgaaataagcaaagagcttaattatcttagagatgggaatggaaccaccagtggtgtaggtactggaagcagtgttgaaaaatacgtaatcgatgaaaatgattatatgtcattcataaacaaccccagcctcaccgtcacagtgccaattgctgttggagagtctgactttgaaaacttaaatactgaagagttcagcagtgagtcagaactagaagaaagcaaagagaaattaaatgcaaccagctcatctgaaggaagcacagttgatgttgttctaccccgagaaggtgaacaagctgaaactgaacccgaagaagaccttaaaccggaagcttgttttactgaaggatgtattaaaaagtttccattctgtcaagtaagtacagaagaaggcaaagggaagatctggtggaatcttcgaaaaacctgctacagtattgttgagcacaactggtttgagactttcattgtgttcatgatccttctcagtagtggtgcattggcctttgaagatatatacattgaacagcgaaagactatcaaaaccatgctagaatatgctgacaaagtctttacctatatattcattctggaaatgcttctcaaatgggttgcttatggatttcaaacatatttcactaatgcctggtgctggctagatttcttgatcgttgatgtttctttggttagcctggtagccaatgctcttggctactcagaactcggtgccatcaaatcattacggacattaagagctttaagacctctaagagccttatcccggtttgaaggcatgagggtggttgtgaatgctcttgttggagcaattccctctatcatgaatgtgctgttggtctgtctcatcttctggttgatctttagcatcatgggtgtgaatttgtttgctggcaagttctaccactgtgttaacatgacaacgggtaacatgtttgacattagtgatgttaacaatttgagtgactgtcaggctcttggcaagcaagctcggtggaaaaacgtgaaagtaaactttgataatgttggcgctggctatcttgcactgcttcaagtggccacatttaaaggctggatggatattatgtatgcagctgttgattcacgagatgttaaacttcagcctgtatatgaagaaaatctgtacatgtatttatactttgtcatctttatcatctttgggtcattcttcactctgaatctattcattggtgtcatcatagataacttcaaccagcagaaaaagaagtttggaggtcaagacatctttatgacagaggaacagaaaaaatattacaatgcaatgaagaaacttggatccaagaaacctcagaaacccatacctcgcccagcaaacaaattccaaggaatggtctttgattttgtaaccagacaagtctttgatatcagcatcatgatcctcatctgcctcaacatggtcaccatgatggtggaaacggatgaccagggcaaatacatgaccctagttttgtcccggatcaacctagtgttcattgttctgttcactggagaatttgtgctgaagctcgtctccctcagacactactacttcactataggctggaacatctttgactttgtggtggtgattctctccattgtaggtatgtttctggctgagatgatagaaaagtattttgtgtcccctaccttgttccgagtgatccgtcttgccaggattggccgaatcctacgtctgatcaaaggagcaaaggggatccgcacgctgctctttgctttgatgatgtcccttcctgcgttgtttaacatcggcctcctgctcttcctggtcatgtttatctatgccatctttgggatgtccaactttgcctatgttaaaaaggaagctggaattgatgacatgttcaactttgagacctttggcaacagcatgatctgcttgttccaaattacaacctctgctggctgggatggattgctagcacctattcttaatagtgcaccacccgactgtgaccctgacacaattcaccctggcagctcagttaagggagactgtgggaacccatctgttgggattttcttttttgtcagttacatcatcatatccttcctggttgtggtgaacatgtacatcgcggtcatcctggagaacttcagtgttgctactgaagaaagtgcagagcccctgagtgaggatgactttgagatgttctatgaggtttgggaaaagtttgatcccgatgcgacccagtttatagagttctctaaactctctgattttgcagctgccctggatcctcctcttctcatagcaaaacccaacaaagtccagcttattgccatggatctgcccatggtcagtggtgaccggatccactgtcttgatattttatttgcctttacaaagcgtgttttgggtgagagtggagagatggatgcccttcgaatacagatggaagacaggtttatggcatcaaacccctccaaagtctcttatgagcctattacaaccactttgaaacgtaaacaagaggaggtgtctgccgctatcattcagcgtaatttcagatgttatcttttaaagcaaaggttaaaaaatatatcaagtaactataacaaagaggcaattaaagggaggattgacttacctataaaacaagacatgattattgacaaactaaatgggaactccactccagaaaaaacagatgggagttcctctaccacctctcctccttcctatgatagtgtaacaaaaccagacaaggaaaagtttgagaaagacaaaccagaaaaagaaagcaaaggaaaagaggtcagagaaaatcaaaagtaaaaagaaacaaagaattatctttgtgatcaattgtttacagcctatgaaggtaaagtatatgtgtcaactggacttcaagaggaggtccatgccaaactgactgttttaacaaatactcatagtcagtgcctatacaagacagtgaagtgacctctctgtcactgcaactctgtgaagcagggtatcaacattgacaagaggttgctgtttttattaccagctgacactgctgaggagaaacccaatggctacctagactatagggatagttgtgcaaagtgaacattgtaactacaccaaacacctttagtacagtccttgcatccattctatttttaacttccatatctgccatatttttacaaaatttgttctagtgcatttccatggtccccaattcatagtttattcataatgctatgtcactatttt

SEQ ID NO: 28446 - DNA, 4144 bp, Homo sapiens
  source 1..4144: mol_type = unassigned DNA
aggtaattcgtatgcaagaagctacacgtaattaaatgtgcaggatgaaaagatggcacaggcactgttggtacccccaggacctgaaagcttccgcctttttactagagaatctcttgctgctatcgaaaaacgtgctgcagaagagaaagccaagaagcccaaaaaggaacaagataatgatgatgagaacaaaccaaagccaaatagtgacttggaagctggaaagaaccttccatttatttatggagacattcctccagagatggtgtcagagcccctggaggacctggatccctactatatcaataagaaaacttttatagtaatgaataaaggaaaggcaattttccgattcagtgccacctctgccttgtatattttaactccactaaaccctgttaggaaaattgctatcaagattttggtacattctttattcagcatgcttatcatgtgcactattttgaccaactgtgtatttatgaccttgagcaaccctcctgactggacaaagaatgtagagtacacattcactggaatctatacctttgagtcacttataaaaatcttggcaagagggttttgcttagaagattttacgtttcttcgtgatccatggaactggctggatttcagtgtcattgtgatggcatatgtgacagagtttgtggacctgggcaatgtctcagcgttgagaacattcagagttctccgagcactgaaaacaatttcagtcattccaggtttaaagaccattgtgggggccctgatccagtcggtaaagaagctttctgatgtgatgatcctgactgtgttctgtctgagcgtgtttgctctcattgggctgcagctgttcatgggcaatctgaggaataaatgtttgcagtggcccccaagcgattctgcttttgaaaccaacaccacttcctactttaatggcacaatggattcaaatgggacatttgttaatgtaacaatgagcacatttaactggaaggattacattggagatgacagtcacttttatgttttggatgggcaaaaagaccctttactctgtggaaatggctcagatgcaggccagtgtccagaaggatacatctgtgtgaaggctggtcgaaaccccaactatggctacacaagctttgacacctttagctgggctttcctgtctctatttcgactcatgactcaagactactgggaaaatctttaccagttgacattacgtgctgctgggaaaacatacatgatattttttgtcctggtcattttcttgggctcattttatttggtgaatttgatcctggctgtggtggccatggcctatgaggagcagaatcaggccaccttggaagaagcagaacaaaaagaggccgaatttcagcagatgctcgaacagcttaaaaagcaacaggaagaagctcaggcagttgcggcagcatcagctgcttcaagagatttcagtggaataggtgggttaggagagctgttggaaagttcttcagaagcatcaaagttgagttccaaaagtgctaaagaatggaggaaccgaaggaagaaaagaagacagagagagcaccttgaaggaaacaacaaaggagagagagacagctttcccaaatccgaatctgaagacagcgtcaaaagaagcagcttccttttctccatggatggaaacagactgaccagtgacaaaaaattctgctcccctcatcagtctctcttgagtatccgtggctccctgttttccccaagacgcaatagcaaaacaagcattttcagtttcagaggtcgggcaaaggatgttggatctgaaaatgactttgctgatgatgaacacagcacatttgaagacagcgaaagcaggagagactcactgtttgtgccgcacagacatggagagcgacgcaacagtaacggcaccaccacagaaacggaagtcagaaagagaaggttaagctcttaccagatttcaatggagatgctggaggattcctctggaaggcaaagagccgtgagcatagccagcattctgaccaacacaatggaagaacttgaagaatctagacagaaatgtccgccatgctggtatagatttgccaatgtgttcttgatctgggactgctgtgatgcatggttaaaagtaaaacatcttgtgaatttaattgttatggatccatttgttgatcttgccatcactatttgcattgtcttaaataccctctttatggccatggagcactaccccatgactgagcaattcagtagtgtgttgactgtaggaaacctggtctttactgggattttcacagcagaaatggttctcaagatcattgccatggatccttattactatttccaagaaggctggaatatctttgatggaattattgtcagcctcagtttaatggagcttggtctgtcaaatgtggagggattgtctgtactgcgatcattcagactgcttagagttttcaagttggcaaaatcctggcccacactaaatatgctaattaagatcattggcaattctgtgggggctctaggaaacctcaccttggtgttggccatcatcgtcttcatttttgctgtggtcggcatgcagctctttggtaagagctacaaagaatgtgtctgcaagatcaatgatgactgtacgctcccacggtggcacatgaacgacttcttccactccttcctgattgtgttccgcgtgctgtgtggagagtggatagagaccatgtgggactgtatggaggtcgctggccaaaccatgtgccttattgttttcatgttggtcatggtcattggaaaccttgtggttctgaacctctttctggccttattgttgagttcatttagctcagacaaccttgctgctactgatgatgacaatgaaatgaataatctgcagattgcagtaggaagaatgcaaaagggaattgattatgtgaaaaataagatgcgggagtgtttccaaaaagccttttttagaaagccaaaagttatagaaatccatgaaggcaataagatagacagctgcatgtccaataatactggaattgaaataagcaaagagcttaattatcttagagatgggaatggaaccaccagtggtgtaggtactggaagcagtgttgaaaaatacgtaatcgatgaaaatgattatatgtcattcataaacaaccccagcctcaccgtcacagtgccaattgctgttggagagtctgactttgaaaacttaaatactgaagagttcagcagtgagtcagaactagaagaaagcaaagagaaattaaatgcaaccagctcatctgaaggaagcacagttgatgttgttctaccccgagaaggtgaacaagctgaaactgaacccgaagaagaccttaaaccggaagcttgttttactgaaggatgtattaaaaagtttccattctgtcaagtaagtacagaagaaggcaaagggaagatctggtggaatcttcgaaaaacctgctacagtattgttgagcacaactggtttgagactttcattgtgttcatgatccttctcagtagtggtgcattggcctttgaagatatatacattgaacagcgaaagactatcaaaaccatgctagaatatgctgacaaagtctttacctatatattcattctggaaatgcttctcaaatgggttgcttatggatttcaaacatatttcactaatgcctggtgctggctagatttcttgatcgttgatgtttctttggttagcctggtagccaatgctcttggctactcagaactcggtgccatcaaatcattacggacattaagagctttaagacctctaagagccttatcccggtttgaaggcatgagggtggttgtgaatgctcttgttggagcaattccctctatcatgaatgtgctgttggtctgtctcatcttctggttgatctttagcatcatgggtgtgaatttgtttgctggcaagttctaccactgtgttaacatgacaacgggtaacatgtttgacattagtgatgttaacaatttgagtgactgtcaggctcttggcaagcaagctcggtggaaaaacgtgaaagtaaactttgataatgttggcgctggctatcttgcactgcttcaagtg

SEQ ID NO: 28447 - DNA, 1216 bp, Homo sapiens
  source 1..1216: mol_type = unassigned DNA
agaacaggaagcggaggcataagcagagaggattctggaaaggtctctttgttttcttatccacagagaaagaaagaaaaaaaattgtaactaatttgtaaacctctgtggtcaaaaaaaaaaaaaaaaaaaaaagctgaacagctgcagaggaagacacgttataccctaaccatcttggatgctgggctttgttatgctgtaattcataaggctctgttttatcagagattatggagcaagaaaactgaagccaagccacatcaaggtttgacagggatgagatacctgtcaaggattcatagtagagtggcttactgggaaaggagcaaagaatctcttctagggatattgtaagaataaatgagataattcacagaagggacctggagcttttccggaaaaaggtgctgtgactatctaaggggaaaagctgagagtctggaactagcctatcttccgaggacttagagacaacagtatgggaatttcaacgagacgtttttactttcttttgaccaagattcaaattctttattccagcccttgataagtaaataagaaggtaattcgtatgcaagaagctacacgtaattaaatgtgcaggatgaaaagatggcacaggcactgttggtacccccaggacctgaaagcttccgcctttttactagagaatctcttgctgctatcgaaaaacgtgctgcagaagagaaagccaagaagcccaaaaaggaacaagataatgatgatgagaacaaaccaaagccaaatagtgacttggaagctggaaagaaccttccatttatttatggagacattcctccagagatggtgtcagagcccctggaggacctggatccctactatatcaataagaaaacttttatagtaatgaataaaggaaaggcaattttccgattcagtgccacctctgccttgtatattttaactccactaaaccctgttaggaaaattgctatcaagattttggtacattctttattcagcatgcttatcatgtgcactattttgaccaactgtgtatttatgaccttgagcaaccctcctgactggacaaagaatgtagagtacacattcactggaatctatacctttgagtcacttataaaaatcttggcaagagggttttgcttagaagattttacgtttcttcgtgatccatggaactggctggatttcagtgtcattgtgatgg

SEQ ID NO: 28448 - DNA, 1908 bp, Homo sapiens
  source 1..1908: mol_type = unassigned DNA
attttctgagattggtaaggagtaaggaaactgaggcccaaagaacatacgaatcatgccccaagtcacaaatcttgtaattgccagaactgggacttgacaaggccccataaattctctaagtgacttgactttaccatatttataagagtagttggagctggaatgtgagggagcagggtaagaggggaaaggattgaactgactttactagagttctttaaaaattaaaacatggtcacttcatgacctttgatttttgaacaaattccaaggaatggtctttgattttgtaaccagacaagtctttgatatcagcatcatgatcctcatctgcctcaacatggtcaccatgatggtggaaacggatgaccagggcaaatacatgaccctagttttgtcccggatcaacctagtgttcattgttctgttcactggagaatttgtgctgaagctcgtctccctcagacactactacttcactataggctggaacatctttgactttgtggtggtgattctctccattgtaggtatgtttctggctgagatgatagaaaagtattttgtgtcccctaccttgttccgagtgatccgtcttgccaggattggccgaatcctacgtctgatcaaaggagcaaaggggatccgcacgctgctctttgctttgatgatgtcccttcctgcgttgtttaacatcggcctcctgctcttcctggtcatgtttatctatgccatctttgggatgtccaactttgcctatgttaaaaaggaagctggaattgatgacatgttcaactttgagacctttggcaacagcatgatctgcttgttccaaattacaacctctgctggctgggatggattgctagcacctattcttaatagtgcaccacccgactgtgaccctgacacaattcaccctggcagctcagttaagggagactgtgggaacccatctgttgggattttcttttttgtcagttacatcatcatatccttcctggttgtggtgaacatgtacatcgcggtcatcctggagaacttcagtgttgctactgaagaaagtgcagagcccctgagtgaggatgactttgagatgttctatgaggtttgggaaaagtttgatcccgatgcgacccagtttatagagttctctaaactctctgattttgcagctgccctggatcctcctcttctcatagcaaaacccaacaaagtccagcttattgccatggatctgcccatggtcagtggtgaccggatccactgtcttgatattttatttgcctttacaaagcgtgttttgggtgagagtggagagatggatgcccttcgaatacagatggaagacaggtttatggcatcaaacccctccaaagtctcttatgagcctattacaaccactttgaaacgtaaacaagaggaggtgtctgccgctatcattcagcgtaatttcagatgttatcttttaaagcaaaggttaaaaaatatatcaagtaactataacaaagaggcaattaaagggaggattgacttacctataaaacaagacatgattattgacaaactaaatgggaactccactccagaaaaaacagatgggagttcctctaccacctctcctccttcctatgatagtgtaacaaaaccagacaaggaaaagtttgagaaagacaaaccagaaaaagaaagcaaaggaaaagaggtcagagaaaatcaaaagtaaaaagaaacaaagaattatctttgtgatcaattgtttacagcctatgaaggtaaagtatatgtgtcaactggacttcaagaggaggtccatgccaaactgactgttttaacaaatactcatagtcagtgcctatacaagacagtgaagtgacctctctgtcactgcaactctgtgaagca

SEQ ID NO: 28449 - DNA, 5665 bp, Homo sapiens
  source 1..5665: mol_type = unassigned DNA
tgtcagggctgacagcacacacggcctgggggcctagagaagggttgctgatcacctgccacccagggtcggggccccgcaccatccgggggcgagctcccgggaaggggctccgcctctacacccaccccccaacctctgacatcgccggccgaacgggagctgccgcttccttcccggccccgctgcacctccccagggagccgagggcgggcgtggacgggaccgacgtggaacgcattctgtagcccagacgggcggccccggcggcttcgggagtggggtcacgcccagctggagaagcagttagggcggacgaagcaggagccgcggggctgggaggattccagtcggaacgcaaccgatcctggggaggcgagagccttggaagccgccagccccagaagatgcctgccttcaatagattgtttcccctggcttctctcgtgcttatctactgggtcagtgtctgcttccctgtgtgtgtggaagtgccctcggagacggaggccgtgcagggcaaccccatgaagctgcgctgcatctcctgcatgaagagagaggaggtggaggccaccacggtggtggaatggttctacaggcccgagggcggtaaagatttccttatttacgagtatcggaatggccaccaggaggtggagagcccctttcaggggcgcctgcagtggaatggcagcaaggacctgcaggacgtgtccatcactgtgctcaacgtcactctgaacgactctggcctctacacctgcaatgtgtcccgggagtttgagtttgaggcgcatcggccctttgtgaagacgacgcggctgatccccctaagagtcaccgaggaggctggagaggacttcacctctgtggtctcagaaatcatgatgtacatccttctggtcttcctcaccttgtggctgctcatcgagatgatatattgctacagaaaggtctcaaaagccgaagaggcagcccaagaaaacgcgtctgactaccttgccatcccatctgagaacaaggagaactctgcggtaccagtggaggaatagaacaggagcagtgtgacatgaggtggcctgaacacctgagggactggacatcccatgttcagcaatgtcaatggcatcaggagggcgccccaagggccccatcgcttcccttcatgcatccattgttctgttcattcattcatccatacatccacctgcctctgagctttcacctctgactccctaactccatcagacctctacgcaccataagactctgccagaactgagaagccaacatttctacatagactcaacctcaccctctcctagttttccaacaagacactccaaagccaactggatttctcccctgtgctccaaatgactttgtacaagtgctggagttagcacctccctctgcccttaactggctggaactggttcattctccattactgcaagagaatggaagtcttaatagaaggaagcaggagtgattagttcgggttaaagcaaaagtgtgtcatgaacttggattccctgaagtcagttttgtcaggttcatggcccactttgctacagcatcagagtgaagcacgcctgtctaggttctccagtgacagaaagatcctgaagcatggactaacatgctctctggagcttagtactccagagctagatcctgatgggtctctaaggttccctccaagaagacaaggacaggagacttgggaaggaccaatggtaatttaagtggctcttaaaaagtcatgcaacatgtttctggacacgttcctgatcctattgcgataatgtatgtgtgccctccctgtgggcacaccacctgggcattaggactgaaattcctgagttcttcctctcaaaatttctgtgcaccagtattattcctcattttacatacaggaggcaactaagactcatacagggctcaactgaataagaggcttaagaggataaactggagcagaaataagccttaggtgctgcccagtttacacttcctgggatggatgtttttgtttgttttgttttttgttttttttgtttgagatggagtctcactctgtcacctaggctagagtgcagtggtgtgatctcggctcactgcaacctctgcctcttgggttcaagcaattctcatgcctcggcctctccagtagctgggattacaggtgtgcaccaccacgcctggctaaattttgtatttttagtacagacagggtttgactatgttggccaggctagtcttgaactcctgacctcaaatgacccacccacctcagcctcccaaagtgctgagattacaggcgtgaggcactgcgcccggtggataactttgtttctgaaaagactgacattgaacttgtctatggcaatgcttctttcacaagcacggactgggctgaggtcaactctgatagattcagatgactagaaattggccaaaaaagcagggagaagaacatgaggtagacttaaagaacttcctttatgtaaagatctgtgactctgaaatatcctccaaaaggagagtgcatctgagactgatatttaaactaagaaaaatgtttagtctgagatggatcataagtaaatgagcagtgtgagaggggagggatgggtaggtgctttccaaatacttcgcctatgaatgcataattttcagatttttttcccctagattttgagggagcagagaaactggaaaaaactttagtcaatatctcgtgtttcattttaattaagtgacaggtccaagtgtgacatccttcagcacccagggacaagagaggggaaagatgctttatggaatgtaagaagatgaaggtgactgggattcagcgagagagaggtccctcagacctgggacctccctttatagggaaagaccatattccataggtttagggctttaccttaaaagctcatttttttcattcttccatccctaggaaagtacttaaaaccagacttttaaatttttatttatttattattatttttttgagacagattctcactctgtctcccaggctagagtgcagtggtgcaatctcagctcactgcagcctcaactgccccaggtttaagcaatcctcccacctcagcccccaggtaactgggactacaggcatgcaccaccatgcctggctaatttttgtattttatgtagagacaggggtcttgccatgtcgcccaggctgatcttgaactcctgggctcaagcaatctgccagcctcagcctctcaaagtgctgggattacaggcctgagcaactgtgcctggcccaaaaccagaccgttaacacattaaagagtctgattttgttgaagaaaatatttgcaataaattcaagactcttcttattggtaattttccacacaatccctctgaaataagggagaggatatagacctttttaactttatagttagaaaaattggcctcagtgtgaaatttttccagtcccatagctcatggatgccaccagcttgcggtagtagcaagatgcttactaccacaccgttttcctcggtggcccaatagctcgtgtatctaagttgaacccggcagtatgcatgattgcctttttctcttctttttaaaaaaacccaactcagatgctgcttgcgtggcttttaatgaagctgaatggtatctatcacttatttatccttgacaggttatcttccccactcttcctttttctaacttctccattcttctcattcttgacactttcattagaactatatggtttacgaagtattttcacttaactattttatttcttctctataactggtcctgtgaggtcacattacaaaagaagaaactgagggtctctgaggttaagtagctttactaaattataaggaaacctagctggtaggtagacagcaagaatccaggtcttctgactcctctttcagttctctttccacttagaccatagctgcttccttttcttattttttagcttccatctaaccattgcctatcttgcctgtcctaatgttctccatcttctctcacccctaatcccactcactgcttctctaccactttgctttttggtggatgctagcaatgtgctttgagagtcagtcctattttggttctctttctagttggtttgtacatcattatttctcctgaattgcaattaaactccttcctgggagatttgataatgactgtaaatcaataaggtactgtgatcaccagcctacttccaatctccacccacctccctgtctcttcccataatcctacgaaagacccagactagatgtctgtttctctggaagctttatctggcatgatgttgcttattaaagggcttagaagagttctcaagggctattaatatcactttagaaaccccatctgttgtcttggtgctggatatttcccatgtctgatcctcaataacacaattcactaaaggccaagcttggctcaatctgattttcccattcttactacttcacagccatgaatgtgattgctcaatccagttggccctgagagcaccttgccctgctgaccttcactgtcacctcggtcttgaatcagagccccaacccaaacactccctgcctgtccctaccccagcctttattctcaccacttgtttaacggcatgaccttttagtttctccattcccagacacccacacacccagacttccttctgagttgcaggtttctccttagatgtccaactagaaatattactaggaaagttacttttcaaagcaggaatgtgctgggaagtaggagacagcaactccctcctctctccccaaaattattggatcaaaaaagaaattccatccatctcagaatctgtgagtcctcctcacataaatctgagggaaaaggctgtgtcactgcatctttgcaggaagaaagagaagcaagagctagacacacttcagaatatatcttagtttcccctttcccagtttaacatgaaaatgaaaaaagaaaaaaatgaaaaacaaaaacaaaagaagccttcctctcacctcattttgtaaatgaaaaatccctaattcagtgaattcacctagtcactgcaaatgtatctgaatagtgcttggtgtgcttgccagtctgatcatccactcattctactaacatctttttgcacccactctgtcaagctctagcctagacctttagtgtgccatgcagtcacaggtctgaaaagcagcatcatccaaaccttacttaatctctaaaatctcagctggtggacagctcatgattagttcagcccacttcctcccccttagttgagtttgcagcaggacgcaggagataagcacttccaagcaagtctgatttatatatcaaactcggtctccatcccaggccagctgaccctcagagccagcaatgctctgtgcttcctccctgcgtcacggcttggcaagagctgcctctgctgagcagtgtgtgtgatggagacggaggccgctgaaggccgagtgcttgcaggcttgtgaactgccatcgaacacaatccaaactctggaaatgttcctgaccacctaagccctcaacaacgtaatgcctgtatgtgctgtttttcagtaaactccttgttcatgtcaataaagtatccctgaaaacc

SEQ ID NO: 28450 - DNA, 6061 bp, Homo sapiens
  source 1..6061: mol_type = unassigned DNA
cagggctgacagcacacacggcctgggggcctagagaagggttgctgatcacctgccacccagggtcggggccccgcaccatccgggggcgagctcccgggaaggggctccgcctctacacccaccccccaacctctgacatcgccggccgaacgggagctgccgcttccttcccggccccgctgcacctccccagggagccgagggcgggcgtggacgggaccgacgtggaacgcattctgtagcccagacgggcggccccggcggcttcgggagtggggtcacgcccagctggagaagcagttagggcggacgaagcaggagccgcggggctgggaggattccagtcggaacgcaaccgatcctggggaggcgagaggtgaatcaacctggacccttccacagcctggctgctaggccagcagtgcgactcccttccgagctgagcttaccctgggcgcaaacgagcgaggcaggggcgcgagtggaagctggagttccggggtgggcggggaggcgactgtccgtggtgctgagcgccggcgagagcgggcgcggagcggctgatcggctccctcgaactggggaggtccagtggggtcgcttagggcccaaagcccccacccggctccaaaagctcccagggcctccccaggcaccggtgctcggcccttccttcggtcagaaagtcgccccctgggggcagttcgtcccaaagggtttcctcgaaagaatctgagagggcgcagtccttgaccgagggaatctctctgtgtagccttggaagccgccagccccagaagatgcctgccttcaatagattgtttcccctggcttctctcgtgcttatctactgggtcagtgtctgcttccctgtgtgtgtggaagtgccctcggagacggaggccgtgcagggcaaccccatgaagctgcgctgcatctcctgcatgaagagagaggaggtggaggccaccacggtggtggaatggttctacaggcccgagggcggtaaagatttccttatttacgagtatcggaatggccaccaggaggtggagagcccctttcaggggcgcctgcagtggaatggcagcaaggacctgcaggacgtgtccatcactgtgctcaacgtcactctgaacgactctggcctctacacctgcaatgtgtcccgggagtttgagtttgaggcgcatcggccctttgtgaagacgacgcggctgatccccctaagagtcaccgaggaggctggagaggacttcacctctgtggtctcagaaatcatgatgtacatccttctggtcttcctcaccttgtggctgctcatcgagatgatatattgctacagaaaggtctcaaaagccgaagaggcagcccaagaaaacgcgtctgactaccttgccatcccatctgagaacaaggagaactctgcggtaccagtggaggaatagaacaggagcagtgtgacatgaggtggcctgaacacctgagggactggacatcccatgttcagcaatgtcaatggcatcaggagggcgccccaagggccccatcgcttcccttcatgcatccattgttctgttcattcattcatccatacatccacctgcctctgagctttcacctctgactccctaactccatcagacctctacgcaccataagactctgccagaactgagaagccaacatttctacatagactcaacctcaccctctcctagttttccaacaagacactccaaagccaactggatttctcccctgtgctccaaatgactttgtacaagtgctggagttagcacctccctctgcccttaactggctggaactggttcattctccattactgcaagagaatggaagtcttaatagaaggaagcaggagtgattagttcgggttaaagcaaaagtgtgtcatgaacttggattccctgaagtcagttttgtcaggttcatggcccactttgctacagcatcagagtgaagcacgcctgtctaggttctccagtgacagaaagatcctgaagcatggactaacatgctctctggagcttagtactccagagctagatcctgatgggtctctaaggttccctccaagaagacaaggacaggagacttgggaaggaccaatggtaatttaagtggctcttaaaaagtcatgcaacatgtttctggacacgttcctgatcctattgcgataatgtatgtgtgccctccctgtgggcacaccacctgggcattaggactgaaattcctgagttcttcctctcaaaatttctgtgcaccagtattattcctcattttacatacaggaggcaactaagactcatacagggctcaactgaataagaggcttaagaggataaactggagcagaaataagccttaggtgctgcccagtttacacttcctgggatggatgtttttgtttgttttgttttttgttttttttgtttgagatggagtctcactctgtcacctaggctagagtgcagtggtgtgatctcggctcactgcaacctctgcctcttgggttcaagcaattctcatgcctcggcctctccagtagctgggattacaggtgtgcaccaccacgcctggctaaattttgtatttttagtacagacagggtttgactatgttggccaggctagtcttgaactcctgacctcaaatgacccacccacctcagcctcccaaagtgctgagattacaggcgtgaggcactgcgcccggtggataactttgtttctgaaaagactgacattgaacttgtctatggcaatgcttctttcacaagcacggactgggctgaggtcaactctgatagattcagatgactagaaattggccaaaaaagcagggagaagaacatgaggtagacttaaagaacttcctttatgtaaagatctgtgactctgaaatatcctccaaaaggagagtgcatctgagactgatatttaaactaagaaaaatgtttagtctgagatggatcataagtaaatgagcagtgtgagaggggagggatgggtaggtgctttccaaatacttcgcctatgaatgcataattttcagatttttttcccctagattttgagggagcagagaaactggaaaaaactttagtcaatatctcgtgtttcattttaattaagtgacaggtccaagtgtgacatccttcagcacccagggacaagagaggggaaagatgctttatggaatgtaagaagatgaaggtgactgggattcagcgagagagaggtccctcagacctgggacctccctttatagggaaagaccatattccataggtttagggctttaccttaaaagctcatttttttcattcttccatccctaggaaagtacttaaaaccagacttttaaatttttatttatttattattatttttttgagacagattctcactctgtctcccaggctagagtgcagtggtgcaatctcagctcactgcagcctcaactgccccaggtttaagcaatcctcccacctcagcccccaggtaactgggactacaggcatgcaccaccatgcctggctaatttttgtattttatgtagagacaggggtcttgccatgtcgcccaggctgatcttgaactcctgggctcaagcaatctgccagcctcagcctctcaaagtgctgggattacaggcctgagcaactgtgcctggcccaaaaccagaccgttaacacattaaagagtctgattttgttgaagaaaatatttgcaataaattcaagactcttcttattggtaattttccacacaatccctctgaaataagggagaggatatagacctttttaactttatagttagaaaaattggcctcagtgtgaaatttttccagtcccatagctcatggatgccaccagcttgcggtagtagcaagatgcttactaccacaccgttttcctcggtggcccaatagctcgtgtatctaagttgaacccggcagtatgcatgattgcctttttctcttctttttaaaaaaacccaactcagatgctgcttgcgtggcttttaatgaagctgaatggtatctatcacttatttatccttgacaggttatcttccccactcttcctttttctaacttctccattcttctcattcttgacactttcattagaactatatggtttacgaagtattttcacttaactattttatttcttctctataactggtcctgtgaggtcacattacaaaagaagaaactgagggtctctgaggttaagtagctttactaaattataaggaaacctagctggtaggtagacagcaagaatccaggtcttctgactcctctttcagttctctttccacttagaccatagctgcttccttttcttattttttagcttccatctaaccattgcctatcttgcctgtcctaatgttctccatcttctctcacccctaatcccactcactgcttctctaccactttgctttttggtggatgctagcaatgtgctttgagagtcagtcctattttggttctctttctagttggtttgtacatcattatttctcctgaattgcaattaaactccttcctgggagatttgataatgactgtaaatcaataaggtactgtgatcaccagcctacttccaatctccacccacctccctgtctcttcccataatcctacgaaagacccagactagatgtctgtttctctggaagctttatctggcatgatgttgcttattaaagggcttagaagagttctcaagggctattaatatcactttagaaaccccatctgttgtcttggtgctggatatttcccatgtctgatcctcaataacacaattcactaaaggccaagcttggctcaatctgattttcccattcttactacttcacagccatgaatgtgattgctcaatccagttggccctgagagcaccttgccctgctgaccttcactgtcacctcggtcttgaatcagagccccaacccaaacactccctgcctgtccctaccccagcctttattctcaccacttgtttaacggcatgaccttttagtttctccattcccagacacccacacacccagacttccttctgagttgcaggtttctccttagatgtccaactagaaatattactaggaaagttacttttcaaagcaggaatgtgctgggaagtaggagacagcaactccctcctctctccccaaaattattggatcaaaaaagaaattccatccatctcagaatctgtgagtcctcctcacataaatctgagggaaaaggctgtgtcactgcatctttgcaggaagaaagagaagcaagagctagacacacttcagaatatatcttagtttcccctttcccagtttaacatgaaaatgaaaaaagaaaaaaatgaaaaacaaaaacaaaagaagccttcctctcacctcattttgtaaatgaaaaatccctaattcagtgaattcacctagtcactgcaaatgtatctgaatagtgcttggtgtgcttgccagtctgatcatccactcattctactaacatctttttgcacccactctgtcaagctctagcctagacctttagtgtgccatgcagtcacaggtctgaaaagcagcatcatccaaaccttacttaatctctaaaatctcagctggtggacagctcatgattagttcagcccacttcctcccccttagttgagtttgcagcaggacgcaggagataagcacttccaagcaagtctgatttatatatcaaactcggtctccatcccaggccagctgaccctcagagccagcaatgctctgtgcttcctccctgcgtcacggcttggcaagagctgcctctgctgagcagtgtgtgtgatggagacggaggccgctgaaggccgagtgcttgcaggcttgtgaactgccatcgaacacaatccaaactctggaaatgttcctgaccacctaagccctcaacaacgtaatgcctgtatgtgctgtttttcagtaaactccttgttcatgtcaataaagtatccctgaaaacc

SEQ ID NO: 28451 - DNA, 566 bp, Homo sapiens
  source 1..566: mol_type = unassigned DNA
gagaactggaaggcatggggtctgggaggcgaagccaggaaccgcgtacggcgcgccttgcagatgacatcattgcctgaaagagctctggcccttctcttcccggagctacacccgccttggaagccgccagccccagaagatgcctgccttcaatagattgtttcccctggcttctctcgtgcttatctactgggtcagtgtctgcttccctgtgtgtgtggaagtgccctcggagacggaggccgtgcagggcaaccccatgaagctgcgctgcatctcctgcatgaagagagaggaggtggaggccaccacggtggtggaatggttctacaggcccgagggcggtaaagatttccttatttacgagtatcggaatggccaccaggaggtggagagcccctttcaggggcgcctgcagtggaatggcagcaaggacctgcaggacgtgtccatcactgtgctcaacgtcactctgaacgactctggcctctacacctgcaatgtgtcccgggagtttgagtttgaggcgcatcggccctttgtgaagacgacgcggctgatcc

SEQ ID NO: 28452 - DNA, 3984 bp, Homo sapiens
  source 1..3984: mol_type = unassigned DNA
tgtcagggctgacagcacacacggcctgggggcctagagaagggttgctgatcacctgccacccagggtcggggccccgcaccatccgggggcgagctcccgggaaggggctccgcctctacacccaccccccaacctctgacatcgccggccgaacgggagctgccgcttccttcccggccccgctgcacctccccagggagccgagggcgggcgtggacgggaccgacgtggaacgcattctgtagcccagacgggcggccccggcggcttcgggagtggggtcacgcccagctggagaagcagttagggcggacgaagcaggagccgcggggctgggaggattccagtcggaacgcaaccgatcctggggaggcgagagccttggaagccgccagccccagaagatgcctgccttcaatagattgtttcccctggcttctctcgtgcttatctactgggtcagtgtctgcttccctgtgtgtgtggaagtgccctcggagacggaggccgtgcagggcaaccccatgaagctgcgctgcatctcctgcatgaagagagaggaggtggaggccaccacggtggtggaatggttctacaggcccgagggcggtaaagatttccttatttacgagtatcggaatggccaccaggaggtggagagcccctttcaggggcgcctgcagtggaatggcagcaaggacctgcaggacgtgtccatcactgtgctcaacgtcactctgaacgactctggcctctacacctgcaatgtgtcccgggagtttgagtttgaggcgcatcggccctttgtgaagacgacgcggctgatccccctaagagtcaccgaggaggctggagaggacttcacctctgtggtctcagaaatcatgatgtacatccttctggtcttcctcaccttgtggctgctcatcgagatgatatattgctacagaaaggtctcaaaagccgaagaggcagcccaagaaaacgcgtctgactaccttgccatcccatctgagaacaaggagaactctgcggtaccagtggaggaatagaacaggagcagtgtgacatgaggtgacctacaggaacatgggaggggaaggcagatgtggatggcaggttgtacaagtgactttgttgcccacaactgaagtgactttaaatttggtcccttaggtcactgtctaccctgcctggggtccccgccctcagggtaattctttaagtcagaaagctctgtatgatgtcagcgcttcggaaggtgaactgctttgacctgagtgtcgaggcaatctgaacttgcccatggtaacagaggcacaggattctccaactcccttctttggtcaaagaatttttgggctgggctgggctggactgggtgggaaattctcagtgagttattttatctttggtaggtggcctgaacacctgagggactggacatcccatgttcagcaatgtcaatggcatcaggagggcgccccaagggccccatcgcttcccttcatgcatccattgttctgttcattcattcatccatacatccacctgcctctgagctttcacctctgactccctaactccatcagacctctacgcaccataagactctgccagaactgagaagccaacatttctacatagactcaacctcaccctctcctagttttccaacaagacactccaaagccaactggatttctcccctgtgctccaaatgactttgtacaagtgctggagttagcacctccctctgcccttaactggctggaactggttcattctccattactgcaagagaatggaagtcttaatagaaggaagcaggagtgattagttcgggttaaagcaaaagtgtgtcatgaacttggattccctgaagtcagttttgtcaggttcatggcccactttgctacagcatcagagtgaagcacgcctgtctaggttctccagtgacagaaagatcctgaagcatggactaacatgctctctggagcttagtactccagagctagatcctgatgggtctctaaggttccctccaagaagacaaggacaggagacttgggaaggaccaatggtaatttaagtggctcttaaaaagtcatgcaacatgtttctggacacgttcctgatcctattgcgataatgtatgtgtgccctccctgtgggcacaccacctgggcattaggactgaaattcctgagttcttcctctcaaaatttctgtgcaccagtattattcctcattttacatacaggaggcaactaagactcatacagggctcaactgaataagaggcttaagaggataaactggagcagaaataagccttaggtgctgcccagtttacacttcctgggatggatgtttttgtttgttttgttttttgttttttttgtttgagatggagtctcactctgtcacctaggctagagtgcagtggtgtgatctcggctcactgcaacctctgcctcttgggttcaagcaattctcatgcctcggcctctccagtagctgggattacaggtgtgcaccaccacgcctggctaaattttgtatttttagtacagacagggtttgactatgttggccaggctagtcttgaactcctgacctcaaatgacccacccacctcagcctcccaaagtgctgagattacaggcgtgaggcactgcgcccggtggataactttgtttctgaaaagactgacattgaacttgtctatggcaatgcttctttcacaagcacggactgggctgaggtcaactctgatagattcagatgactagaaattggccaaaaaagcagggagaagaacatgaggtagacttaaagaacttcctttatgtaaagatctgtgactctgaaatatcctccaaaaggagagtgcatctgagactgatatttaaactaagaaaaatgtttagtctgagatggatcataagtaaatgagcagtgtgagaggggagggatgggtaggtgctttccaaatacttcgcctatgaatgcataattttcagatttttttcccctagattttgagggagcagagaaactggaaaaaactttagtcaatatctcgtgtttcattttaattaagtgacaggtccaagtgtgacatccttcagcacccagggacaagagaggggaaagatgctttatggaatgtaagaagatgaaggtgactgggattcagcgagagagaggtccctcagacctgggacctccctttatagggaaagaccatattccataggtttagggctttaccttaaaagctcatttttttcattcttccatccctaggaaagtacttaaaaccagacttttaaatttttatttatttattattatttttttgagacagattctcactctgtctcccaggctagagtgcagtggtgcaatctcagctcactgcagcctcaactgccccaggtttaagcaatcctcccacctcagcccccaggtaactgggactacaggcatgcaccaccatgcctggctaatttttgtattttatgtagagacaggggtcttgccatgtcgcccaggctgatcttgaactcctgggctcaagcaatctgccagcctcagcctctcaaagtgctgggattacaggcctgagcaactgtgcctggcccaaaaccagaccgttaacacattaaagagtctgattttgttgaagaaaatatttgcaataaattcaagactcttcttattggtaattttccacacaatccctctgaaataagggagaggatatagacctttttaactttatagttagaaaaattggcctcagtgtgaaatttttccagtcccatagctcatggatgccaccagcttgcggtagtagcaagatgcttactaccacaccgttttcctcggtggcccaatagctcgtgtatctaagttgaacccggcagtatgcatgattgcctttttctcttctttttaaaaaaacccaactca

SEQ ID NO: 28453 - DNA, 7805 bp, Homo sapiens
  source 1..7805: mol_type = unassigned DNA
ccagcaccccggggctgcgcactgcagctccccaggccacccaccacccttctggtctctgagcccaggatgcgaggatggccagaccatctctgtgcaccctggtgcctctgggccctgagtgcttgcgccccttcacccgggagtcactggcagccatagaacagcgggcggtggaggaggaggcccggctgcagcggaataagcagatggagattgaggagcccgaacggaagccacgaagtgacttggaggctggcaagaacctacccatgatctacggagaccccccgccggaggtcatcggcatccccctggaggacctggatccctactacagcaataagaagaccttcatcgtactcaacaagggcaaggccatcttccgcttctccgccacacctgctctctacctgctgagccccttcagcgtagtcaggcgcggggccatcaaggtgctcatccatgcgctgttcagcatgttcatcatgatcaccatcttgaccaactgcgtattcatgaccatgagtgacccgcctccctggtccaagaatgtggagtacaccttcacagggatctacacctttgagtccctcatcaagatactggcccgaggcttctgtgtcgacgacttcacattcctccgggacccctggaactggctggacttcagtgtcatcatgatggcgtacctgacagagtttgtggacttgggcaacatctcagccctgaggaccttccgggtgctgcgggccctcaaaaccatcacggtcatcccagggctgaagacgatcgtgggggccctgatccagtcggtgaaaaagctgtcggatgtgatgatcctcactgtcttctgcctgagcgtctttgcgctggtaggactgcagctcttcatgggaaacctgaggcagaagtgtgtgcgctggcccccgccgttcaacgacaccaacaccacgtggtacagcaatgacacgtggtacggcaatgacacatggtatggcaatgagatgtggtacggcaatgactcatggtatgccaacgacacgtggaacagccatgcaagctgggccaccaacgatacctttgattgggacgcctacatcagtgatgaagggaacttctacttcctggagggctccaacgatgccctgctctgtgggaacagcagtgatgctgggcactgccctgagggttatgagtgcatcaagaccgggcggaaccccaactatggctacaccagctatgacaccttcagctgggccttcttggctctcttccgcctcatgacacaggactattgggagaacctcttccagctgacccttcgagcagctggcaagacctacatgatcttcttcgtggtcatcatcttcctgggctctttctacctcatcaatctgatcctggccgtggtggccatggcatatgccgagcagaatgaggccaccctggccgaggataaggagaaagaggaggagtttcagcagatgcttgagaagttcaaaaagcaccaggaggagctggagaaggccaaggccgcccaagctctggaaggtggggaggcagatggggacccagcccatggcaaagactgcaatggcagcctggacacatcgcaaggggagaagggagccccgaggcagagcagcagcggagacagcggcatctccgacgccatggaagaactggaagaggcccaccaaaagtgcccaccatggtggtacaagtgcgcccacaaagtgctcatatggaactgctgcgccccgtggctgaagttcaagaacatcatccacctgatcgtcatggacccgttcgtggacctgggcatcaccatctgcatcgtgctcaacaccctcttcatggccatggaacattaccccatgacggagcactttgacaacgtgctcactgtgggcaacctggtcttcacaggcatcttcacagcagagatggttctgaagctgattgccatggacccctacgagtatttccagcagggttggaatatcttcgacagcatcatcgtcaccctcagcctggtagagctaggcctggccaacgtacagggactgtctgtgctacgctccttccgtctgctgcgggtcttcaagctggccaagtcgtggccaacgctgaacatgctcatcaagatcattggcaattcagtgggggcgctgggtaacctgacgctggtgctggctatcatcgtgttcatcttcgccgtggtgggcatgcagctgtttggcaagagctacaaggagtgcgtgtgcaagattgccttggactgcaacctgccgcgctggcacatgcatgatttcttccactccttcctcatcgtcttccgcatcctgtgcggggagtggatcgagaccatgtgggactgcatggaggtggccggccaagccatgtgcctcaccgtcttcctcatggtcatggtcatcggcaatcttgtggtcctgaacctgttcctggctctgctgctgagctccttcagcgccgacagtctggcagcctcggatgaggatggcgagatgaacaacctgcagattgccatcgggcgcatcaagttgggcatcggctttgccaaggccttcctcctggggctgctgcatggcaagatcctgagccccaaggacatcatgctcagcctcggggaggctgacggggccggggaggctggagaggcgggggagactgcccccgaggatgagaagaaggagccgcccgaggaggacctgaagaaggacaatcacatcctgaaccacatgggcctggctgacggccccccatccagcctcgagctggaccaccttaacttcatcaacaacccctacctgaccatacaggtgcccatcgcctccgaggagtccgacctggagatgcccaccgaggaggaaaccgacactttctcagagcctgaggatagcaagaagccgccgcagcctctctatgatgggaactcgtccgtctgcagcacagctgactacaagccccccgaggaggaccctgaggagcaggcagaggagaaccccgagggggagcagcctgaggagtgcttcactgaggcctgcgtgcagcgctggccctgcctctacgtggacatctcccagggccgtgggaagaagtggtggactctgcgcagggcctgcttcaagattgtcgagcacaactggttcgagaccttcattgtcttcatgatcctgctcagcagtggggctctggccttcgaggacatctacattgagcagcggcgagtcattcgcaccatcctagaatatgccgacaaggtcttcacctacatcttcatcatggagatgctgctcaaatgggtggcctacggctttaaggtgtacttcaccaacgcctggtgctggctcgacttcctcatcgtggatgtctccatcatcagcttggtggccaactggctgggctactcggagctgggacccatcaaatccctgcggacactgcgggccctgcgtcccctgagggcactgtcccgattcgagggcatgagggtggtggtgaacgccctcctaggcgccatcccctccatcatgaatgtgctgcttgtctgcctcatcttctggctgatcttcagcatcatgggtgtcaacctgtttgccggcaagttctactactgcatcaacaccaccacctctgagaggttcgacatctccgaggtcaacaacaagtctgagtgcgagagcctcatgcacacaggccaggtccgctggctcaatgtcaaggtcaactacgacaacgtgggtctgggctacctctccctcctgcaggtggccaccttcaagggttggatggacatcatgtatgcagccgtggactcccgggagaaggaggagcagccgcagtacgaggtgaacctctacatgtacctctactttgtcatcttcatcatctttggctccttcttcaccctcaacctcttcattggcgtcatcattgacaacttcaaccagcagaagaagaagttaggggggaaagacatctttatgacggaggaacagaagaaatactataacgccatgaagaagcttggctccaagaagcctcagaagccaattccccggccccagaacaagatccagggcatggtgtatgacctcgtgacgaagcaggccttcgacatcaccatcatgatcctcatctgcctcaacatggtcaccatgatggtggagacagacaaccagagccagctcaaggtggacatcctgtacaacatcaacatgatcttcatcatcatcttcacaggggagtgcgtgctcaagatgctcgccctgcgccagtactacttcaccgttggctggaacatctttgacttcgtggtcgtcatcctgtccattgtgggccttgccctctctgacctgatccagaagtacttcgtgtcacccacgctgttccgtgtgatccgcctggcgcggattgggcgtgtcctgcggctgatccgcggggccaagggcatccggacgctgctgttcgccctcatgatgtcgctgcctgccctcttcaacatcggcctcctcctcttcctggtcatgttcatctactccatcttcggcatgtccaactttgcctacgtcaagaaggagtcgggcatcgatgatatgttcaacttcgagaccttcggcaacagcatcatctgcctgttcgagatcaccacgtcggccggctgggacgggctcctcaaccccatcctcaacagcgggcccccagactgtgaccccaacctggagaacccgggcaccagtgtcaagggtgactgcggcaacccctccatcggcatctgcttcttctgcagctatatcatcatctccttcctcatcgtggtcaacatgtacatcgccatcatcctggagaacttcaatgtggccacagaggagagcagcgagccccttggtgaagatgactttgagatgttctacgagacatgggagaagttcgaccccgacgccacccagttcatcgcctacagccgcctctcagacttcgtggacaccctgcaggaaccgctgaggattgccaagcccaacaagatcaagctcatcacactggacttgcccatggtgccaggggacaagatccactgcctggacatcctctttgccctgaccaaagaggtcctgggtgactctggggaaatggacgccctcaagcagaccatggaggagaagttcatggcagccaacccctccaaggtgtcctacgagcccatcaccaccaccctcaagaggaagcacgaggaggtgtgcgccatcaagatccagagggcctaccgccggcacctgctacagcgctccatgaagcaggcatcctacatgtaccgccacagccacgacggcagcggggatgacgcccctgagaaggaggggctgcttgccaacaccatgagcaagatgtatggccacgagaatgggaacagcagctcgccaagcccggaggagaagggcgaggcaggggacgccggacccactatggggctgatgcccatcagcccctcagacactgcctggcctcccgcccctcccccagggcagactgtgcgcccaggtgtcaaggagtctcttgtctagcaggcagcatcggggtggcccactgagtctcggcatagtccccagagctcccccgtggtgcctgcacacagagtgagggaggagggctttgaatctgggactgtgcctggctccctgatgggggacaggatttggccacactggggctgacacccaggcccgagcgcctgcgttcccagaccatgggaaatgggaattgcgctcaggggctccatgctgggtctgaggcccctgcctccaagatttaacctgcaagttgctctgacctcctctgggccctgtcgcccctccttttggcctgggggaggtcagaacattcgaatctctgcccctcacttgaggaggagctggcctgcggtggagggatcagttgccccccatcaccagagtcttaagggtcactggcctctccccaggaagtggctcagacccctcagccccagcccagacaaagatgtcttaacctcagggagtgcagacacctaaccccagggcactgccagcccaccccctttgactctggggtgcagcttcacccaccaggccagctcaggaattccctggaaaagggaaatgtgactggttcagaaatagctcctcaaagcctcaaaacctgattggccactggatcctgctgctttgggctgggatggtgactcctgaaacctcttcctaggccacgtccaggtccgtagctcccctggctggctcctaggggaagagcagaaggaaggatgccacttgggaatgaattgtccttttctaggaagcacgggggagtgagacaggctgggtcctgccagctggatcgctgcacatggcctgagcatccagacctgagcgggagtcagggacctgctgctcagtaagaagattctcgccccttccctctctccctgcctcactcctccgtgagcaccaccagggctccaggagcctcatccagcctcagagatctcccttctcatctccccacgcccgtctctttctcacctttcccacctctctccccaaagtgatcctaagaatgtacagttgagctcaggttagatatttcgaccctggggcgtgcagcagggaaggcccaactggttcaggctcaaccttccaacttcctgtggcctgaagaagcacttctgctgcatcgctgttctgggcatggcagggccaggcctctgctggctcaggaggaggggtgagagacctgctcaggcgtcgctggatttattcacttgtgtgtgtacctgtggctgtgtgtctgcttgtatgcttttataggcctgtgtgtatagctgtgtgtgtgttcaagtgcgtgactgtatgtgtgtgtgtgaaccactgtgtactggagcctgcattatgcacgtgtctgggtatctttgtatatatgtgtatatatgtgtgccctggactgtttcaaggtccatggagtacggctggtgtgtcatactgtgcaggcctgtccctgggagtgttcccgtgcctgggagagtggacctgtgctgtgagtgtgtggatgcgtgtgaacgcatgtggtaaggtgtgtactcagggcattctgttggcctaagtgcctcttctttttcttcttgtttctcatgaaaagtttgattaaaattcaggaagcagcaaaaccttcaaaacaagacatgtatgtgtgcttgagtgtgtgaacacgtgtgtgtgtgtgcacatctacatgccatgcctatgggccagagttgtctttattgtccaccatgctctctcacctgctcccagtcctgcctgaacagccctctctctcactcccctctcctccccttcctgtttctcgttgtcacacccatggcctcagccctgctccctgcctcctgcctatgtctcctctatggaaggaggcctccactccttccatctcttccttcagaagtttcgtctaatgggggcagtctccccttcctggcacattgcccctctgccttgccctcctgggccctgggctggcacagcccctggagcctcagaaatctgtttgattggatattctcctcggactgtgtgcaggttgcagaggaagagtagatgagccgggtccggcctctccctgcctgtggcccctcccctgcagacggatgcccattcctgcctggtccagtggggaacaggtcccacgccaggccagcaggcgggctcctttgtacagttcttacaataaaccctccttggtgcctctgg

SEQ ID NO: 28454 - DNA, 4484 bp, Homo sapiens
  source 1..4484: mol_type = unassigned DNA
ctctgcccgctaactttcccgagccccgaccggcggcgcagagctccggggtagctttgtggccgaacgccgacctcgggcggagagcgcggctgtgcccagtatcccatccccgcgacccccgcgcgctccggagagaacaggactatgcccggggctggggacggaggcaaagccccggcgagatggctgggcactgggcttttgggcctcttcctgctccccgtaaccctgtcgctggaggtgtctgtgggaaaggccaccgacatctacgctgtcaatggcacggagatcctgctgccctgcaccttctccagctgctttggcttcgaggacctccacttccggtggacctacaacagcagtgacgcattcaagattctcatagaggggactgtgaagaatgagaagtctgaccccaaggtgacgttgaaagacgatgaccgcatcactctggtaggctctactaaggagaagatgaacaacatttccattgtgctgagggacctggagttcagcgacacgggcaaatacacctgccatgtgaagaaccccaaggagaataatctccagcaccacgccaccatcttcctccaagtcgttgatagactggaagaagtggacaacacagtgacactcatcatcctggctgtcgtgggcggggtcatcgggctcctcatcctcatcctgctgatcaagaaactcatcatcttcatcctgaagaagactcgggagaagaagaaggagtgtctcgtgagctcctcggggaatgacaacacggagaacggcttgcctggctccaaggcagaggagaaaccaccttcaaaagtgtgagccctgcttcgggctgagcagctgcagggagccccctttctgatgatgaaactgatgcttgagccccgaccgtagaacccacgtgcctgagacatctgctgcttggctcaaactgtagtctttccgggcacaagaaaccagagtcctgcccagcctgcccatccccttcccagtcagggctccccagggacaagggatggccaggggagggggtctgtggaagattcaggagaaagaaaggagaggctagggtggtgtggaggggctggtcccctgacacctgggcagatggggtctccttcagtctccctaccctgcacaagcagggccttgattttcctccaggcttctcttcacaagagactgggaggatccgtaagggatgtcctaagagctgcaccctggagatggggtgtaggaagaagtggcttcctttggaggtgggagtgggctggaggcctctggagaagacctggggtgggggctgatgggggcaggcccacagtgagagactgcctctgcttcataggataccagatcccccacagtcttccaagtaggaaacttcctttcccctgccccgggaccctatctgcctatcccctcccctgctcagagtttttaagccctctcaaccagggctggccaccctggtcttgagggttcctggccacctagcctgctcctctgctctctgggttactgaggggctcaggaaggggcccctcgagccttcctggagtacccgagtgctccctatgcctttccaagcatttctacttggggaattgggccacagaggtagtgagccagtgtcctgggcctctgggatgcccgccccattgctgccaatgctggcagcccctcccctggcatggcaggaccatcgccactctgggcactcctgagcccagctctcccctgcttctccccctcctacctgagaggctgcaccctccaacctcccattggctcgctcccccccccccaccgtgccctccatcacgccctgcccccagggtggttcatttcccagccctgggtcaagggcctgccttcgcctcagggactctcttcctttggatgagggggtccttgggtttcccagctgcttcctgctcagctgggccaccccctcccaccctggggttggggaggagcagggagtgggtgcccacagttttcctttgcttctcccagagctggtttgcacagcccttgtgtgtggggctagaatgtgccttagtcctgaatcctagcccttacccccatcctctctagacggtatgtcctgacataacagcagagtctggtgtggtgctggtgagggttcgccagccctcccctccccagggtcatagagggggccatgaggctggaattggccagtgactgaatcttggagatgtcggccaggtgctcccattggggtttctagcctgccctagggggaggtggtgatgttgggagtgggatctcctgagtccttgttgggcagaattggtgaggccagggatggcagggaaaagtggtaacaagcctctctgcccatctacttccaatccctctctcccttactgattttttgatgccctgtcttctgggcccctaggagggatgagagaggagtagccccctttttcagagagtttggggtctacctcagagctctccctgtcaaaaagcagctgcaagcctcgcaagggtggagtggggggagactgaggaccagtagtacctgcagggtgcccgtggctgtggccagtgtcccttagccaacctgctgggctcaccagttccccgtctgatctgcctgtgcgcctcccattcttctctacccagaacctgtcatgggctggggctcagattttcctggctttgggagcagacagaccagagccaccagccattcagaaaacttcttatagctaccttcatgcaaaactgttttcttcttccttctcaatggtgacatttgaagaggcagagcaccttggggctcctccttctgtcttaagagaaagccaaggcacgtagagtagggagaagaagggcaccatcctctctttcctccccagggtctactgctgatttctagatggatcatgcagcttctctcagctcagctctttccatctaccaaatgggtgtaataatacttacctacctcacaggactgttgtgaggcttggcaagttttgtctaaaaacatctttttggcttggaaagggatctgggaagccaggtattaattgcagggatagttccaagtctgtcctgtcttcatctctgtgtcccatctctacaacccacatacagacacacacactctctctctctttctttccatcccaccccccttggaattatttagtctttgcaatattagaaaccttgactctgatgcttaaagcttcttgtccatggcttttgtttgatggttttcaatagaggtgactgagattgtagggggggcatttttggttgcccccatgcgtgggggcactactaagaatgctaaacttagtccccacaacaaagaatcatcctgtcccatgtcaacattatacccatggagaaacactggcatggatttgcactaggatgtatatgggcaaagctatcttccccaagtggaacctcagtgcatgcaaatctctgatggtggcttccagggcttgtgggctagagagagccacttacaaagtcgatcttgagagacctggccacatgcagctgggctgagtgatgtcagcgagactaaagacaaagttctgagctcctcatcaactacaaaatatgaaatcagcattccaggttctgggcttctccccatgtcgtaattgaacagaaggcagcccgaataaacccctgatgttagagaggcctggggagagcagccgatggggctcagactacatatggcaggccgatcagagctcttgtggagcgagggcttgagagcatgcttgtgagatggcaggaggtggggtgtgcttgtgtggagtgtgcgtgtgcaggcagtgtgggtgcatggcagcgtaactgtggagtggatgggctctgcatgtaaggggtgatgcatgatgggcagatgctggacatttgaggagccgtctttcttggcctgagctatgcctgttgaggcatctggagactgagaaagaatcaaaggcagagaagaccagccgtgctcctgcattccgtcactccatgacttcatctcagtgtcacagacagctgccatcagagggctggcagtagggagttccaggagcggggacttctcgggaaaatcctataacttgctttactttactttgtcccaggttggagtccctaccctcccacctcccacctgatatgcagtgcttttgactatcttatgcatggtttattcctctggcttggatgacaacaatacccatagtcaattttcctatgtaactatagatcaaatgatgcaacaacaggccttgggaggcctcaggtgtgcgagtgcctctgggaggcgcagatgcccacacagccagcactgacttgtgttcgagcacagaacggatataatcagtctggcctctacaacaagttttgcattgtagaattgtatttagctttgccttggatgaaataaaaattatgtttaataa

SEQ ID NO: 28455 - DNA, 566 bp, Homo sapiens
  source 1..566: mol_type = unassigned DNA
agcagccggctcccagcagcgggcgagcgcgcctccccctccgctccctccctccccctcctctcgctctctgcccgctaactttcccgagccccgaccggcggcgcagagctccggggtagctttgtggccgaacgccgacctcgggcggagagcgcggctgtgcccagtatcccatccccgcgacccccgcgcgctccggagagaacaggactatgcccggggctggggacggaggcaaagccccggcgagatggctgggcactgggcttttggtggaagaagtggacaacacagtgacactcatcatcctggctgtcgtgggcggggtcatcgggctcctcatcctcatcctgctgatcaagaaactcatcatcttcatcctgaagaagactcgggagaagaagaaggagtgtctcgtgagctcctcggggaatgacaacacggagaacggcttgcctggctccaaggcagaggagaaaccaccttcaaaagtgtgagccctgcttcgggctgagcagctgcagggagccccctttctgatgatgaaactgatgcttgagccc

SEQ ID NO: 28456 - DNA, 9787 bp, Homo sapiens
  source 1..9787: mol_type = unassigned DNA
cggggctgctacctccacgggcgcgccctggcaggaggggcgcagtctgcttgcaggcggtcgccagcgctccagcggcggctgtcggctttccaattccgccagctcggctgaggctgggctagcctgggtgccagtggctgctagcggcaggcgtcccctgagcaacaggagcccagagaaaaagaagcagccctgagagagcgccggggaaggagaggcccgcgccctctcctggagccagattctgcaggtgcactgggtggggatgatcggcgggctaggttgcaagcctcttatgtgaggagctgaagaggaattaaaatatacaggatgaaaagatggcaatgttgcctcccccaggacctcagagctttgtccatttcacaaaacagtctcttgccctcattgaacaacgcattgctgaaagaaaatcaaaggaacccaaagaagaaaagaaagatgatgatgaagaagccccaaagccaagcagtgacttggaagctggcaaacagctgcccttcatctatggggacattcctcccggcatggtgtcagagcccctggaggacttggacccctactatgcagacaaaaagactttcatagtattgaacaaagggaaaacaatcttccgtttcaatgccacacctgctttatatatgctttctcctttcagtcctctaagaagaatatctattaagattttagtacactctaccttattcagcatgctcatcatgtgcactattctgacaaactgcatatttatgaccatgaataacccaccggactggaccaaaaatgtcgagtacacttttactggaatatatacttttgaatcacttgtaaaaatccttgcaagaggcttctgtgtaggagaattcacttttcttcgtgacccgtggaactggctggattttgtcgtcattgtttttgcgtatttaacagaatttgtaaacctaggcaatgtttcagctcttcgaactttcagagtattgagagctttgaaaactatttctgtaatcccaggcctgaagacaattgtaggggctttgatccagtcagtgaagaagctttctgatgtcatgatcctgactgtgttctgtctgagtgtgtttgcactaattggactacagctgttcatgggaaacctgaagcataaatgttttcgaaattcacttgaaaataatgaaacattagaaagcataatgaataccctagagagtgaagaagactttagaaaatatttttattacttggaaggatccaaagatgctctcctttgtggtttcagcacagattcaggtcagtgtccagaggggtacacctgtgtgaaaattggcagaaaccctgattatggctacacgagctttgacactttcagctgggccttcttagccttgtttaggctaatgacccaagattactgggaaaacctttaccaacagacgctgcgtgctgctggcaaaacctacatgatcttctttgtcgtagtgattttcctgggctccttttatctaataaacttgatcctggctgtggttgccatggcatatgaagaacagaaccaggcaaacattgaagaagctaaacagaaagaattagaatttcaacagatgttagaccgtcttaaaaaagagcaagaagaagctgaggcaattgcagcggcagcggctgaatatacaagtattaggagaagcagaattatgggcctctcagagagttcttctgaaacatccaaactgagctctaaaagtgctaaagaaagaagaaacagaagaaagaaaaagaatcaaaagaagctctccagtggagaggaaaagggagatgctgagaaattgtcgaaatcagaatcagaggacagcatcagaagaaaaagtttccaccttggtgtcgaagggcataggcgagcacatgaaaagaggttgtctacccccaatcagtcaccactcagcattcgtggctccttgttttctgcaaggcgaagcagcagaacaagtctttttagtttcaaaggcagaggaagagatataggatctgagactgaatttgccgatgatgagcacagcatttttggagacaatgagagcagaaggggctcactgtttgtgccccacagaccccaggagcgacgcagcagtaacatcagccaagccagtaggtccccaccaatgctgccggtgaacgggaaaatgcacagtgctgtggactgcaacggtgtggtctccctggttgatggacgctcagccctcatgctccccaatggacagcttctgccagaggtgataatagataaggcaacttctgatgacagcggcacgaccaatcaaatacacaagaaaaggcgttgtagttcctatctcctttcagaggatatgctgaatgatcccaacctcagacagagagcaatgagtagagcaagcatattaacaaacactgtggaagaacttgaagagtccagacaaaaatgtccaccttggtggtacagatttgcacacaaattcttgatctggaattgctctccatattggataaaattcaaaaagtgtatctattttattgtaatggatccttttgtagatcttgcaattaccatttgcatagttttaaacacattatttatggctatggaacaccacccaatgactgaggaattcaaaaatgtacttgctataggaaatttggtctttactggaatctttgcagctgaaatggtattaaaactgattgccatggatccatatgagtatttccaagtaggctggaatatttttgacagccttattgtgactttaagtttagtggagctctttctagcagatgtggaaggattgtcagttctgcgatcattcagactgctccgagtcttcaagttggcaaaatcctggccaacattgaacatgctgattaagatcattggtaactcagtaggggctctaggtaacctcaccttagtgttggccatcatcgtcttcatttttgctgtggtcggcatgcagctctttggtaagagctacaaagaatgtgtctgcaagatcaatgatgactgtacgctcccacggtggcacatgaacgacttcttccactccttcctgattgtgttccgcgtgctgtgtggagagtggatagagaccatgtgggactgtatggaggtcgctggtcaagctatgtgccttattgtttacatgatggtcatggtcattggaaacctggtggtcctaaacctatttctggccttattattgagctcatttagttcagacaatcttacagcaattgaagaagaccctgatgcaaacaacctccagattgcagtgactagaattaaaaagggaataaattatgtgaaacaaaccttacgtgaatttattctaaaagcattttccaaaaagccaaagatttccagggagataagacaagcagaagatctgaatactaagaaggaaaactatatttctaaccatacacttgctgaaatgagcaaaggtcacaatttcctcaaggaaaaagataaaatcagtggttttggaagcagcgtggacaaacacttgatggaagacagtgatggtcaatcatttattcacaatcccagcctcacagtgacagtgccaattgcacctggggaatccgatttggaaaatatgaatgctgaggaacttagcagtgattcggatagtgaatacagcaaagtgagattaaaccggtcaagctcctcagagtgcagcacagttgataaccctttgcctggagaaggagaagaagcagaggctgaacctatgaattccgatgagccagaggcctgtttcacagatggttgtgtatggaggttctcatgctgccaagttaacatagagtcagggaaaggaaaaatctggtggaacatcaggaaaacctgctacaagattgttgaacacagttggtttgaaagcttcattgtcctcatgatcctgctcagcagtggtgccctggcttttgaagatatttatattgaaaggaaaaagaccattaagattatcctggagtatgcagacaagatcttcacttacatcttcattctggaaatgcttctaaaatggatagcatatggttataaaacatatttcaccaatgcctggtgttggctggatttcctaattgttgatgtttctttggttactttagtggcaaacactcttggctactcagatcttggccccattaaatcccttcggacactgagagctttaagacctctaagagccttatctagatttgaaggaatgagggtcgttgtgaatgcactcataggagcaattccttccatcatgaatgtgctacttgtgtgtcttatattctggctgatattcagcatcatgggagtaaatttgtttgctggcaagttctatgagtgtattaacaccacagatgggtcacggtttcctgcaagtcaagttccaaatcgttccgaatgttttgcccttatgaatgttagtcaaaatgtgcgatggaaaaacctgaaagtgaactttgataatgtcggacttggttacctatctctgcttcaagttgcaacttttaagggatggacgattattatgtatgcagcagtggattctgttaatgtagacaagcagcccaaatatgaatatagcctctacatgtatatttattttgtcgtctttatcatctttgggtcattcttcactttgaacttgttcattggtgtcatcatagataatttcaaccaacagaaaaagaagcttggaggtcaagacatctttatgacagaagaacagaagaaatactataatgcaatgaaaaagctggggtccaagaagccacaaaagccaattcctcgaccagggaacaaaatccaaggatgtatatttgacctagtgacaaatcaagcctttgatattagtatcatggttcttatctgtctcaacatggtaaccatgatggtagaaaaggagggtcaaagtcaacatatgactgaagttttatattggataaatgtggtttttataatccttttcactggagaatgtgtgctaaaactgatctccctcagacactactacttcactgtaggatggaatatttttgattttgtggttgtgattatctccattgtaggtatgtttctagctgatttgattgaaacgtattttgtgtcccctaccctgttccgagtgatccgtcttgccaggattggccgaatcctacgtctagtcaaaggagcaaaggggatccgcacgctgctctttgctttgatgatgtcccttcctgcgttgtttaacatcggcctcctgctcttcctggtcatgttcatctacgccatctttggaatgtccaactttgcctatgttaaaaaggaagatggaattaatgacatgttcaattttgagacctttggcaacagtatgatttgcctgttccaaattacaacctctgctggctgggatggattgctagcacctattcttaacagtaagccacccgactgtgacccaaaaaaagttcatcctggaagttcagttgaaggagactgtggtaacccatctgttggaatattctactttgttagttatatcatcatatccttcctggttgtggtgaacatgtacattgcagtcatactggagaattttagtgttgccactgaagaaagtactgaacctctgagtgaggatgactttgagatgttctatgaggtttgggagaagtttgatcccgatgcgacccagtttatagagttctctaaactctctgattttgcagctgccctggatcctcctcttctcatagcaaaacccaacaaagtccagctcattgccatggatctgcccatggttagtggtgaccggatccattgtcttgacatcttatttgcttttacaaagcgtgttttgggtgagagtggggagatggattctcttcgttcacagatggaagaaaggttcatgtctgcaaatccttccaaagtgtcctatgaacccatcacaaccacactaaaacggaaacaagaggatgtgtctgctactgtcattcagcgtgcttatagacgttaccgcttaaggcaaaatgtcaaaaatatatcaagtatatacataaaagatggagacagagatgatgatttactcaataaaaaagatatggcttttgataatgttaatgagaactcaagtccagaaaaaacagatgccacttcatccaccacctctccaccttcatatgatagtgtaacaaagccagacaaagagaaatatgaacaagacagaacagaaaaggaagacaaagggaaagacagcaaggaaagcaaaaaatagagcttcatttttgatatattgtttacagcctgtgaaagtgatttatttgtgttaataaaactcttttgaggaagtctatgccaaaatcctttttatcaaaatattctcgaaggcagtgcagtcactaactctgatttcctaagaaaggtgggcagcattagcagatggttatttttgcactgatgattctttaagaatcgtaagagaactctgtaggaattattgattatagcatacaaaagtgattcagttttttggtttttaataaatcagaagaccatgtagaaaacttttacatctgccttgtcatcttttcacaggattgtaattagtcttgtttcccatgtaaataaacaacacacgcatacagaaaaatctattatttatctattatttggaaatcaacaaaagtatttgccttggctttgcaatgaaatgcttgatagaagtaatggacattagttatgaatgtttagttaaaatgcattattagggagcttgactttttatcaatgtacagaggttattctatattttgaggtgcttaaatttattctacattgcatcagaaccaatttatatgtgcctataaaatgccatgggattaaaaatatatgtaggctattcatttctacaaatgtttttcattcatcttgactcacatgccaacaaggataagacttacctttagagtattgtgtttcatagcctttcttctttcatatccctttttgttcatagaataaccacagaacttgaaaaattattctaagtacatattacactcctcaaaaaaaacaaagataactgagaaaaaagttattgacagaagttctatttgctattatttacatagcctaacatttgactgtgctgcccaaaatactgataatagtctcttaaactcttttgtcaaattttcctgctttcttatgcagtattgtttagtcatcctttcgctgtaagcaaagttgatgaaatccttcctgatatgcagttagttgtttgaccacggtacatacttgagcagataataacttgggcacagtatttattgcatcacttgtatacaatcccgtgtttggcaagctttcaaatcatgtaatatgacagactttacacagatatgtgtttagtatgaataaaaaagcattgaaatagggattcttgccaacttgctctcttgccaccaacttactttcctaaattatggaagtaatcttttttggatatacttcaatgtatacaatgaggaagatgtcaccttctccttaaaattctatgatgtgaaatatattttgcctcaatcaacacagtaccatgggcttctaatttatcaagcacatattcattttgcattagctgtagacatctagttttttgaaaacacctattaatagtaatttgaaaagaaataaccataatgctttttttcgtgagtttatttcaggaatatgagatctttcttctataaagttattcatgcacaggcaaaaattgagctacacaggtagaatgtagttttacttagaagatttttgtgggaggttttgaagcaaatatataaaacaactttcactaatttgctttccatatttaaaaaataataaattacatttatataataaatgtttaaagcacatattttttgttgttctggcaatttaaaaagaaagaggatttaaacgtacctatagaaacaaagatttatggttaaagaatgagatcagaagtctagaatgtttttaaattgtgatatattttacaacatccgttattactttgagacatttgtcctaatctacgtataaaactcaatctagggctaaagattctttataccatcttaggttcattcatcttaggctatttgaaccactttttaatttaatatgaaagacaccatgcagtgttttccgagactacatagatcattttatcacatacctaccaagcctgttggaaataggttttgataatttaagtagggacctatacaaaatatattacatttatcagatttttaaatacattcaattaagaatttaacatcaccttaaatttgaattcaatctaccgttatttcaaactcacaaatataactgcattatgaatacttacataatgtagtaagacaagatgtttgacaggttcgtgtgtaattttctattaatgtttttacattgccttgtttttatgtaaaataaaaaatatgggcaactggtttgttaacaacacaatttcttcttagcatttcaaaaatatatataaagttgttctttttcctatttcatgaactatgtttttttttaaaataacatggttaagttttatatatatttacgtttgtttcaggaatgtctacttgtgactttttatcaattaaaaataatatttggaagaaagagcttattaagtataagcttgaagtaaaattagacctctctttccatgtagattactgtttgtactgatggtttcacccttcagaaggcactgtcatattaatatttaaattttataatcgctgaacttattacacccaacaatacagaaaggcagttacactgaagaacttaacttagaataaaatggaagcaaacaggttttctaaaaacttttttaagtgaccaggtctcgctctgtcacccaggctagagtgcaatggcatgatcatagctctctgcagcctcaactctgggctcaagcaaccctcctgcctcagcctcccaagtagctaagactacaggtacatgccaccatgcctggctaatatttaaatttttgtagataaggggtcttgctatgttgcccaggctagtctcaaactcctggcttcaagtgttcctactgtcatgacctgccaacatgctggggttacaggcatgagccaccatgccccaaacaggtttgaacacaaatctttcggatgaaaattagagaacctaattttagctttttgatagttacctagtttgcaaaagatttgggtgacttgtgagctgtttttaaatgctgattgttgaacatcacaacccaaaatacttagcatgattttatagagttttgatagctttattaaaaagagtgaaaataaaatgcatatgtaaataaagcagttctaaatagctatttcagagaaatgttaatagaagtgctgaaagaagggccaactaaattaggatggccagggaattggcctgggtttaggacctatgtatgaaggccaccaattttttaaaaatatctgtggtttattatgttattatcttcttgaggaaaacaatcaagaattgcttcatgaaaataaataaatagccatgaatatcataaagctgtttacataggattctttacaaatttcatagatctatgaatgctcaaaatgtttgagtttgccataaattatattgtagttatattgtagttatacttgagactgacacattgtaatataatctaagaataaaagttat

SEQ ID NO: 28457 - DNA, 9787 bp, Homo sapiens
  source 1..9787: mol_type = unassigned DNA
cggggctgctacctccacgggcgcgccctggcaggaggggcgcagtctgcttgcaggcggtcgccagcgctccagcggcggctgtcggctttccaattccgccagctcggctgaggctgggctagcctgggtgccagtggctgctagcggcaggcgtcccctgagcaacaggagcccagagaaaaagaagcagccctgagagagcgccggggaaggagaggcccgcgccctctcctggagccagattctgcaggtgcactgggtggggatgatcggcgggctaggttgcaagcctcttatgtgaggagctgaagaggaattaaaatatacaggatgaaaagatggcaatgttgcctcccccaggacctcagagctttgtccatttcacaaaacagtctcttgccctcattgaacaacgcattgctgaaagaaaatcaaaggaacccaaagaagaaaagaaagatgatgatgaagaagccccaaagccaagcagtgacttggaagctggcaaacagctgcccttcatctatggggacattcctcccggcatggtgtcagagcccctggaggacttggacccctactatgcagacaaaaagactttcatagtattgaacaaagggaaaacaatcttccgtttcaatgccacacctgctttatatatgctttctcctttcagtcctctaagaagaatatctattaagattttagtacactctaccttattcagcatgctcatcatgtgcactattctgacaaactgcatatttatgaccatgaataacccaccggactggaccaaaaatgtcgagtacacttttactggaatatatacttttgaatcacttgtaaaaatccttgcaagaggcttctgtgtaggagaattcacttttcttcgtgacccgtggaactggctggattttgtcgtcattgtttttgcatatgtgacagagtttgtggacctgggcaatgtctcagcattgagaacattcagagttctccgagcattgaaaacaatttcagtcattccaggcctgaagacaattgtaggggctttgatccagtcagtgaagaagctttctgatgtcatgatcctgactgtgttctgtctgagtgtgtttgcactaattggactacagctgttcatgggaaacctgaagcataaatgttttcgaaattcacttgaaaataatgaaacattagaaagcataatgaataccctagagagtgaagaagactttagaaaatatttttattacttggaaggatccaaagatgctctcctttgtggtttcagcacagattcaggtcagtgtccagaggggtacacctgtgtgaaaattggcagaaaccctgattatggctacacgagctttgacactttcagctgggccttcttagccttgtttaggctaatgacccaagattactgggaaaacctttaccaacagacgctgcgtgctgctggcaaaacctacatgatcttctttgtcgtagtgattttcctgggctccttttatctaataaacttgatcctggctgtggttgccatggcatatgaagaacagaaccaggcaaacattgaagaagctaaacagaaagaattagaatttcaacagatgttagaccgtcttaaaaaagagcaagaagaagctgaggcaattgcagcggcagcggctgaatatacaagtattaggagaagcagaattatgggcctctcagagagttcttctgaaacatccaaactgagctctaaaagtgctaaagaaagaagaaacagaagaaagaaaaagaatcaaaagaagctctccagtggagaggaaaagggagatgctgagaaattgtcgaaatcagaatcagaggacagcatcagaagaaaaagtttccaccttggtgtcgaagggcataggcgagcacatgaaaagaggttgtctacccccaatcagtcaccactcagcattcgtggctccttgttttctgcaaggcgaagcagcagaacaagtctttttagtttcaaaggcagaggaagagatataggatctgagactgaatttgccgatgatgagcacagcatttttggagacaatgagagcagaaggggctcactgtttgtgccccacagaccccaggagcgacgcagcagtaacatcagccaagccagtaggtccccaccaatgctgccggtgaacgggaaaatgcacagtgctgtggactgcaacggtgtggtctccctggttgatggacgctcagccctcatgctccccaatggacagcttctgccagaggtgataatagataaggcaacttctgatgacagcggcacgaccaatcaaatacacaagaaaaggcgttgtagttcctatctcctttcagaggatatgctgaatgatcccaacctcagacagagagcaatgagtagagcaagcatattaacaaacactgtggaagaacttgaagagtccagacaaaaatgtccaccttggtggtacagatttgcacacaaattcttgatctggaattgctctccatattggataaaattcaaaaagtgtatctattttattgtaatggatccttttgtagatcttgcaattaccatttgcatagttttaaacacattatttatggctatggaacaccacccaatgactgaggaattcaaaaatgtacttgctataggaaatttggtctttactggaatctttgcagctgaaatggtattaaaactgattgccatggatccatatgagtatttccaagtaggctggaatatttttgacagccttattgtgactttaagtttagtggagctctttctagcagatgtggaaggattgtcagttctgcgatcattcagactgctccgagtcttcaagttggcaaaatcctggccaacattgaacatgctgattaagatcattggtaactcagtaggggctctaggtaacctcaccttagtgttggccatcatcgtcttcatttttgctgtggtcggcatgcagctctttggtaagagctacaaagaatgtgtctgcaagatcaatgatgactgtacgctcccacggtggcacatgaacgacttcttccactccttcctgattgtgttccgcgtgctgtgtggagagtggatagagaccatgtgggactgtatggaggtcgctggtcaagctatgtgccttattgtttacatgatggtcatggtcattggaaacctggtggtcctaaacctatttctggccttattattgagctcatttagttcagacaatcttacagcaattgaagaagaccctgatgcaaacaacctccagattgcagtgactagaattaaaaagggaataaattatgtgaaacaaaccttacgtgaatttattctaaaagcattttccaaaaagccaaagatttccagggagataagacaagcagaagatctgaatactaagaaggaaaactatatttctaaccatacacttgctgaaatgagcaaaggtcacaatttcctcaaggaaaaagataaaatcagtggttttggaagcagcgtggacaaacacttgatggaagacagtgatggtcaatcatttattcacaatcccagcctcacagtgacagtgccaattgcacctggggaatccgatttggaaaatatgaatgctgaggaacttagcagtgattcggatagtgaatacagcaaagtgagattaaaccggtcaagctcctcagagtgcagcacagttgataaccctttgcctggagaaggagaagaagcagaggctgaacctatgaattccgatgagccagaggcctgtttcacagatggttgtgtatggaggttctcatgctgccaagttaacatagagtcagggaaaggaaaaatctggtggaacatcaggaaaacctgctacaagattgttgaacacagttggtttgaaagcttcattgtcctcatgatcctgctcagcagtggtgccctggcttttgaagatatttatattgaaaggaaaaagaccattaagattatcctggagtatgcagacaagatcttcacttacatcttcattctggaaatgcttctaaaatggatagcatatggttataaaacatatttcaccaatgcctggtgttggctggatttcctaattgttgatgtttctttggttactttagtggcaaacactcttggctactcagatcttggccccattaaatcccttcggacactgagagctttaagacctctaagagccttatctagatttgaaggaatgagggtcgttgtgaatgcactcataggagcaattccttccatcatgaatgtgctacttgtgtgtcttatattctggctgatattcagcatcatgggagtaaatttgtttgctggcaagttctatgagtgtattaacaccacagatgggtcacggtttcctgcaagtcaagttccaaatcgttccgaatgttttgcccttatgaatgttagtcaaaatgtgcgatggaaaaacctgaaagtgaactttgataatgtcggacttggttacctatctctgcttcaagttgcaacttttaagggatggacgattattatgtatgcagcagtggattctgttaatgtagacaagcagcccaaatatgaatatagcctctacatgtatatttattttgtcgtctttatcatctttgggtcattcttcactttgaacttgttcattggtgtcatcatagataatttcaaccaacagaaaaagaagcttggaggtcaagacatctttatgacagaagaacagaagaaatactataatgcaatgaaaaagctggggtccaagaagccacaaaagccaattcctcgaccagggaacaaaatccaaggatgtatatttgacctagtgacaaatcaagcctttgatattagtatcatggttcttatctgtctcaacatggtaaccatgatggtagaaaaggagggtcaaagtcaacatatgactgaagttttatattggataaatgtggtttttataatccttttcactggagaatgtgtgctaaaactgatctccctcagacactactacttcactgtaggatggaatatttttgattttgtggttgtgattatctccattgtaggtatgtttctagctgatttgattgaaacgtattttgtgtcccctaccctgttccgagtgatccgtcttgccaggattggccgaatcctacgtctagtcaaaggagcaaaggggatccgcacgctgctctttgctttgatgatgtcccttcctgcgttgtttaacatcggcctcctgctcttcctggtcatgttcatctacgccatctttggaatgtccaactttgcctatgttaaaaaggaagatggaattaatgacatgttcaattttgagacctttggcaacagtatgatttgcctgttccaaattacaacctctgctggctgggatggattgctagcacctattcttaacagtaagccacccgactgtgacccaaaaaaagttcatcctggaagttcagttgaaggagactgtggtaacccatctgttggaatattctactttgttagttatatcatcatatccttcctggttgtggtgaacatgtacattgcagtcatactggagaattttagtgttgccactgaagaaagtactgaacctctgagtgaggatgactttgagatgttctatgaggtttgggagaagtttgatcccgatgcgacccagtttatagagttctctaaactctctgattttgcagctgccctggatcctcctcttctcatagcaaaacccaacaaagtccagctcattgccatggatctgcccatggttagtggtgaccggatccattgtcttgacatcttatttgcttttacaaagcgtgttttgggtgagagtggggagatggattctcttcgttcacagatggaagaaaggttcatgtctgcaaatccttccaaagtgtcctatgaacccatcacaaccacactaaaacggaaacaagaggatgtgtctgctactgtcattcagcgtgcttatagacgttaccgcttaaggcaaaatgtcaaaaatatatcaagtatatacataaaagatggagacagagatgatgatttactcaataaaaaagatatggcttttgataatgttaatgagaactcaagtccagaaaaaacagatgccacttcatccaccacctctccaccttcatatgatagtgtaacaaagccagacaaagagaaatatgaacaagacagaacagaaaaggaagacaaagggaaagacagcaaggaaagcaaaaaatagagcttcatttttgatatattgtttacagcctgtgaaagtgatttatttgtgttaataaaactcttttgaggaagtctatgccaaaatcctttttatcaaaatattctcgaaggcagtgcagtcactaactctgatttcctaagaaaggtgggcagcattagcagatggttatttttgcactgatgattctttaagaatcgtaagagaactctgtaggaattattgattatagcatacaaaagtgattcagttttttggtttttaataaatcagaagaccatgtagaaaacttttacatctgccttgtcatcttttcacaggattgtaattagtcttgtttcccatgtaaataaacaacacacgcatacagaaaaatctattatttatctattatttggaaatcaacaaaagtatttgccttggctttgcaatgaaatgcttgatagaagtaatggacattagttatgaatgtttagttaaaatgcattattagggagcttgactttttatcaatgtacagaggttattctatattttgaggtgcttaaatttattctacattgcatcagaaccaatttatatgtgcctataaaatgccatgggattaaaaatatatgtaggctattcatttctacaaatgtttttcattcatcttgactcacatgccaacaaggataagacttacctttagagtattgtgtttcatagcctttcttctttcatatccctttttgttcatagaataaccacagaacttgaaaaattattctaagtacatattacactcctcaaaaaaaacaaagataactgagaaaaaagttattgacagaagttctatttgctattatttacatagcctaacatttgactgtgctgcccaaaatactgataatagtctcttaaactcttttgtcaaattttcctgctttcttatgcagtattgtttagtcatcctttcgctgtaagcaaagttgatgaaatccttcctgatatgcagttagttgtttgaccacggtacatacttgagcagataataacttgggcacagtatttattgcatcacttgtatacaatcccgtgtttggcaagctttcaaatcatgtaatatgacagactttacacagatatgtgtttagtatgaataaaaaagcattgaaatagggattcttgccaacttgctctcttgccaccaacttactttcctaaattatggaagtaatcttttttggatatacttcaatgtatacaatgaggaagatgtcaccttctccttaaaattctatgatgtgaaatatattttgcctcaatcaacacagtaccatgggcttctaatttatcaagcacatattcattttgcattagctgtagacatctagttttttgaaaacacctattaatagtaatttgaaaagaaataaccataatgctttttttcgtgagtttatttcaggaatatgagatctttcttctataaagttattcatgcacaggcaaaaattgagctacacaggtagaatgtagttttacttagaagatttttgtgggaggttttgaagcaaatatataaaacaactttcactaatttgctttccatatttaaaaaataataaattacatttatataataaatgtttaaagcacatattttttgttgttctggcaatttaaaaagaaagaggatttaaacgtacctatagaaacaaagatttatggttaaagaatgagatcagaagtctagaatgtttttaaattgtgatatattttacaacatccgttattactttgagacatttgtcctaatctacgtataaaactcaatctagggctaaagattctttataccatcttaggttcattcatcttaggctatttgaaccactttttaatttaatatgaaagacaccatgcagtgttttccgagactacatagatcattttatcacatacctaccaagcctgttggaaataggttttgataatttaagtagggacctatacaaaatatattacatttatcagatttttaaatacattcaattaagaatttaacatcaccttaaatttgaattcaatctaccgttatttcaaactcacaaatataactgcattatgaatacttacataatgtagtaagacaagatgtttgacaggttcgtgtgtaattttctattaatgtttttacattgccttgtttttatgtaaaataaaaaatatgggcaactggtttgttaacaacacaatttcttcttagcatttcaaaaatatatataaagttgttctttttcctatttcatgaactatgtttttttttaaaataacatggttaagttttatatatatttacgtttgtttcaggaatgtctacttgtgactttttatcaattaaaaataatatttggaagaaagagcttattaagtataagcttgaagtaaaattagacctctctttccatgtagattactgtttgtactgatggtttcacccttcagaaggcactgtcatattaatatttaaattttataatcgctgaacttattacacccaacaatacagaaaggcagttacactgaagaacttaacttagaataaaatggaagcaaacaggttttctaaaaacttttttaagtgaccaggtctcgctctgtcacccaggctagagtgcaatggcatgatcatagctctctgcagcctcaactctgggctcaagcaaccctcctgcctcagcctcccaagtagctaagactacaggtacatgccaccatgcctggctaatatttaaatttttgtagataaggggtcttgctatgttgcccaggctagtctcaaactcctggcttcaagtgttcctactgtcatgacctgccaacatgctggggttacaggcatgagccaccatgccccaaacaggtttgaacacaaatctttcggatgaaaattagagaacctaattttagctttttgatagttacctagtttgcaaaagatttgggtgacttgtgagctgtttttaaatgctgattgttgaacatcacaacccaaaatacttagcatgattttatagagttttgatagctttattaaaaagagtgaaaataaaatgcatatgtaaataaagcagttctaaatagctatttcagagaaatgttaatagaagtgctgaaagaagggccaactaaattaggatggccagggaattggcctgggtttaggacctatgtatgaaggccaccaattttttaaaaatatctgtggtttattatgttattatcttcttgaggaaaacaatcaagaattgcttcatgaaaataaataaatagccatgaatatcataaagctgtttacataggattctttacaaatttcatagatctatgaatgctcaaaatgtttgagtttgccataaattatattgtagttatattgtagttatacttgagactgacacattgtaatataatctaagaataaaagttat

SEQ ID NO: 28458 - DNA, 5967 bp, Homo sapiens
  source 1..5967: mol_type = unassigned DNA
atggcaatgttgcctcccccaggacctcagagctttgtccatttcacaaaacagtctcttgccctcattgaacaacgcattgctgaaagaaaatcaaaggaacccaaagaagaaaagaaagatgatgatgaagaagccccaaagccaagcagtgacttggaagctggcaaacagctgcccttcatctatggggacattcctcccggcatggtgtcagagcccctggaggacttggacccctactatgcagacaaaaagactttcatagtattgaacaaagggaaaacaatcttccgtttcaatgccacacctgctttatatatgctttctcctttcagtcctctaagaagaatatctattaagattttagtacactccttattcagcatgctcatcatgtgcactattctgacaaactgcatatttatgaccatgaataacccaccggactggaccaaaaatgtcgagtacacttttactggaatatatacttttgaatcacttgtaaaaatccttgcaagaggcttctgtgtaggagaattcacttttcttcgtgacccgtggaactggctggattttgtcgtcattgtttttgcgtatttaacagaatttgtaaacctaggcaatgtttcagctcttcgaactttcagagtattgagagctttgaaaactatttctgtaatcccaggcctgaagacaattgtaggggctttgatccagtcagtgaagaagctttctgatgtcatgatcctgactgtgttctgtctgagtgtgtttgcactaattggactacagctgttcatgggaaacctgaagcataaatgttttcgaaattcacttgaaaataatgaaacattagaaagcataatgaataccctagagagtgaagaagactttagaaaatatttttattacttggaaggatccaaagatgctctcctttgtggtttcagcacagattcaggtcagtgtccagaggggtacacctgtgtgaaaattggcagaaaccctgattatggctacacgagctttgacactttcagctgggccttcttagccttgtttaggctaatgacccaagattactgggaaaacctttaccaacagacgctgcgtgctgctggcaaaacctacatgatcttctttgtcgtagtgattttcctgggctccttttatctaataaacttgatcctggctgtggttgccatggcatatgaagaacagaaccaggcaaacattgaagaagctaaacagaaagaattagaatttcaacagatgttagaccgtcttaaaaaagagcaagaagaagctgaggcaattgcagcggcagcggctgaatatacaagtattaggagaagcagaattatgggcctctcagagagttcttctgaaacatccaaactgagctctaaaagtgctaaagaaagaagaaacagaagaaagaaaaagaatcaaaagaagctctccagtggagaggaaaagggagatgctgagaaattgtcgaaatcagaatcagaggacagcatcagaagaaaaagtttccaccttggtgtcgaagggcataggcgagcacatgaaaagaggttgtctacccccaatcagtcaccactcagcattcgtggctccttgttttctgcaaggcgaagcagcagaacaagtctttttagtttcaaaggcagaggaagagatataggatctgagactgaatttgccgatgatgagcacagcatttttggagacaatgagagcagaaggggctcactgtttgtgccccacagaccccaggagcgacgcagcagtaacatcagccaagccagtaggtccccaccaatgctgccggtgaacgggaaaatgcacagtgctgtggactgcaacggtgtggtctccctggttgatggacgctcagccctcatgctccccaatggacagcttctgccagaggtgataatagataaggcaacttctgatgacagcggcacgaccaatcaaatacacaagaaaaggcgttgtagttcctatctcctttcagaggatatgctgaatgatcccaacctcagacagagagcaatgagtagagcaagcatattaacaaacactgtggaagaacttgaagagtccagacaaaaatgtccaccttggtggtacagatttgcacacaaattcttgatctggaattgctctccatattggataaaattcaaaaagtgtatctattttattgtaatggatccttttgtagatcttgcaattaccatttgcatagttttaaacacattatttatggctatggaacaccacccaatgactgaggaattcaaaaatgtacttgctataggaaatttggtctttactggaatctttgcagctgaaatggtattaaaactgattgccatggatccatatgagtatttccaagtaggctggaatatttttgacagccttattgtgactttaagtttagtggagctctttctagcagatgtggaaggattgtcagttctgcgatcattcagactgctccgagtcttcaagttggcaaaatcctggccaacattgaacatgctgattaagatcattggtaactcagtaggggctctaggtaacctcaccttagtgttggccatcatcgtcttcatttttgctgtggtcggcatgcagctctttggtaagagctacaaagaatgtgtctgcaagatcaatgatgactgtacgctcccacggtggcacatgaacgacttcttccactccttcctgattgtgttccgcgtgctgtgtggagagtggatagagaccatgtgggactgtatggaggtcgctggtcaagctatgtgccttattgtttacatgatggtcatggtcattggaaacctggtggtcctaaacctatttctggccttattattgagctcatttagttcagacaatcttacagcaattgaagaagaccctgatgcaaacaacctccagattgcagtgactagaattaaaaagggaataaattatgtgaaacaaaccttacgtgaatttattctaaaagcattttccaaaaagccaaagatttccagggagataagacaagcagaagatctgaatactaagaaggaaaactatatttctaaccatacacttgctgaaatgagcaaaggtcacaatttcctcaaggaaaaagataaaatcagtggttttggaagcagcgtggacaaacacttgatggaagacagtgatggtcaatcatttattcacaatcccagcctcacagtgacagtgccaattgcacctggggaatccgatttggaaaatatgaatgctgaggaacttagcagtgattcggatagtgaatacagcaaagtgagattaaaccggtcaagctcctcagagtgcagcacagttgataaccctttgcctggagaaggagaagaagcagaggctgaacctatgaattccgatgagccagaggcctgtttcacagatggttgtgtatggaggttctcatgctgccaagttaacatagagtcagggaaaggaaaaatctggtggaacatcaggaaaacctgctacaagattgttgaacacagttggtttgaaagcttcattgtcctcatgatcctgctcagcagtggtgccctggcttttgaagatatttatattgaaaggaaaaagaccattaagattatcctggagtatgcagacaagatcttcacttacatcttcattctggaaatgcttctaaaatggatagcatatggttataaaacatatttcaccaatgcctggtgttggctggatttcctaattgttgatgtttctttggttactttagtggcaaacactcttggctactcagatcttggccccattaaatcccttcggacactgagagctttaagacctctaagagccttatctagatttgaaggaatgagggtcgttgtgaatgcactcataggagcaattccttccatcatgaatgtgctacttgtgtgtcttatattctggctgatattcagcatcatgggagtaaatttgtttgctggcaagttctatgagtgtattaacaccacagatgggtcacggtttcctgcaagtcaagttccaaatcgttccgaatgttttgcccttatgaatgttagtcaaaatgtgcgatggaaaaacctgaaagtgaactttgataatgtcggacttggttacctatctctgcttcaagttgcaacttttaagggatggacgattattatgtatgcagcagtggattctgttaatgtagacaagcagcccaaatatgaatatagcctctacatgtatatttattttgtcgtctttatcatctttgggtcattcttcactttgaacttgttcattggtgtcatcatagataatttcaaccaacagaaaaagaagcttggaggtcaagacatctttatgacagaagaacagaagaaatactataatgcaatgaaaaagctggggtccaagaagccacaaaagccaattcctcgaccagggaacaaaatccaaggatgtatatttgacctagtgacaaatcaagcctttgatattagtatcatggttcttatctgtctcaacatggtaaccatgatggtagaaaaggagggtcaaagtcaacatatgactgaagttttatattggataaatgtggtttttataatccttttcactggagaatgtgtgctaaaactgatctccctcagacactactacttcactgtaggatggaatatttttgattttgtggttgtgattatctccattgtaggtatgtttctagctgatttgattgaaacgtattttgtgtcccctaccctgttccgagtgatccgtcttgccaggattggccgaatcctacgtctagtcaaaggagcaaaggggatccgcacgctgctctttgctttgatgatgtcccttcctgcgttgtttaacatcggcctcctgctcttcctggtcatgttcatctacgccatctttggaatgtccaactttgcctatgttaaaaaggaagatggaattaatgacatgttcaattttgagacctttggcaacagtatgatttgcctgttccaaattacaacctctgctggctgggatggattgctagcacctattcttaacagtaagccacccgactgtgacccaaaaaaagttcatcctggaagttcagttgaaggagactgtggtaacccatctgttggaatattctactttgttagttatatcatcatatccttcctggttgtggtgaacatgtacattgcagtcatactggagaattttagtgttgccactgaagaaagtactgaacctctgagtgaggatgactttgagatgttctatgaggtttgggagaagtttgatcccgatgcgacccagtttatagagttctctaaactctctgattttgcagctgccctggatcctcctcttctcatagcaaaacccaacaaagtccagctcattgccatggatctgcccatggttagtggtgaccggatccattgtcttgacatcttatttgcttttacaaagcgtgttttgggtgagagtggggagatggattctcttcgttcacagatggaagaaaggttcatgtctgcaaatccttccaaagtgtcctatgaacccatcacaaccacactaaaacggaaacaagaggatgtgtctgctactgtcattcagcgtgcttatagacgttaccgcttaaggcaaaatgtcaaaaatatatcaagtatatacataaaagatggagacagagatgatgatttactcaataaaaaagatatggcttttgataatgttaatgagaactcaagtccagaaaaaacagatgccacttcatccaccacctctccaccttcatatgatagtgtaacaaagccagacaaagagaaatatgaacaagacagaacagaaaaggaagacaaagggaaagacagcaaggaaagcaaaaaatag

SEQ ID NO: 28459 - DNA, 9768 bp, Homo sapiens
  source 1..9768: mol_type = unassigned DNA
gggaggcggggctgctacctccacgggcgcgccctggcaggaggggcgcagtctgcttgcaggcggtcgccagcgctccagcggcggctgtcggctttccaattccgccagctcggctgaggctgggctagcctgggtgccagtggctgctagcggcaggcgtcccctgagcaacaggagcccagagaaaaagaagcagccctgagagagcgccggggaaggagaggcccgcgccctctcctggagccagattctgcaggtgcactgggtggggatgatcggcgggctaggttgcaagcctcttatgtgaggagctgaagaggaattaaaatatacaggatgaaaagatggcaatgttgcctcccccaggacctcagagctttgtccatttcacaaaacagtctcttgccctcattgaacaacgcattgctgaaagaaaatcaaaggaacccaaagaagaaaagaaagatgatgatgaagaagccccaaagccaagcagtgacttggaagctggcaaacagctgcccttcatctatggggacattcctcccggcatggtgtcagagcccctggaggacttggacccctactatgcagacaaaaagactttcatagtattgaacaaagggaaaacaatcttccgtttcaatgccacacctgctttatatatgctttctcctttcagtcctctaagaagaatatctattaagattttagtacactccttattcagcatgctcatcatgtgcactattctgacaaactgcatatttatgaccatgaataacccaccggactggaccaaaaatgtcgagtacacttttactggaatatatacttttgaatcacttgtaaaaatccttgcaagaggcttctgtgtaggagaattcacttttcttcgtgacccgtggaactggctggattttgtcgtcattgtttttgcgtatttaacagaatttgtaaacctaggcaatgtttcagctcttcgaactttcagagtattgagagctttgaaaactatttctgtaatcccaggcctgaagacaattgtaggggctttgatccagtcagtgaagaagctttctgatgtcatgatcctgactgtgttctgtctgagtgtgtttgcactaattggactacagctgttcatgggaaacctgaagcataaatgttttcgaaattcacttgaaaataatgaaacattagaaagcataatgaataccctagagagtgaagaagactttagaaaatatttttattacttggaaggatccaaagatgctctcctttgtggtttcagcacagattcaggtcagtgtccagaggggtacacctgtgtgaaaattggcagaaaccctgattatggctacacgagctttgacactttcagctgggccttcttagccttgtttaggctaatgacccaagattactgggaaaacctttaccaacagacgctgcgtgctgctggcaaaacctacatgatcttctttgtcgtagtgattttcctgggctccttttatctaataaacttgatcctggctgtggttgccatggcatatgaagaacagaaccaggcaaacattgaagaagctaaacagaaagaattagaatttcaacagatgttagaccgtcttaaaaaagagcaagaagaagctgaggcaattgcagcggcagcggctgaatatacaagtattaggagaagcagaattatgggcctctcagagagttcttctgaaacatccaaactgagctctaaaagtgctaaagaaagaagaaacagaagaaagaaaaagaatcaaaagaagctctccagtggagaggaaaagggagatgctgagaaattgtcgaaatcagaatcagaggacagcatcagaagaaaaagtttccaccttggtgtcgaagggcataggcgagcacatgaaaagaggttgtctacccccaatcagtcaccactcagcattcgtggctccttgttttctgcaaggcgaagcagcagaacaagtctttttagtttcaaaggcagaggaagagatataggatctgagactgaatttgccgatgatgagcacagcatttttggagacaatgagagcagaaggggctcactgtttgtgccccacagaccccaggagcgacgcagcagtaacatcagccaagccagtaggtccccaccaatgctgccggtgaacgggaaaatgcacagtgctgtggactgcaacggtgtggtctccctggttgatggacgctcagccctcatgctccccaatggacagcttctgccagagggcacgaccaatcaaatacacaagaaaaggcgttgtagttcctatctcctttcagaggatatgctgaatgatcccaacctcagacagagagcaatgagtagagcaagcatattaacaaacactgtggaagaacttgaagagtccagacaaaaatgtccaccttggtggtacagatttgcacacaaattcttgatctggaattgctctccatattggataaaattcaaaaagtgtatctattttattgtaatggatccttttgtagatcttgcaattaccatttgcatagttttaaacacattatttatggctatggaacaccacccaatgactgaggaattcaaaaatgtacttgctataggaaatttggtctttactggaatctttgcagctgaaatggtattaaaactgattgccatggatccatatgagtatttccaagtaggctggaatatttttgacagccttattgtgactttaagtttagtggagctctttctagcagatgtggaaggattgtcagttctgcgatcattcagactgctccgagtcttcaagttggcaaaatcctggccaacattgaacatgctgattaagatcattggtaactcagtaggggctctaggtaacctcaccttagtgttggccatcatcgtcttcatttttgctgtggtcggcatgcagctctttggtaagagctacaaagaatgtgtctgcaagatcaatgatgactgtacgctcccacggtggcacatgaacgacttcttccactccttcctgattgtgttccgcgtgctgtgtggagagtggatagagaccatgtgggactgtatggaggtcgctggtcaagctatgtgccttattgtttacatgatggtcatggtcattggaaacctggtggtcctaaacctatttctggccttattattgagctcatttagttcagacaatcttacagcaattgaagaagaccctgatgcaaacaacctccagattgcagtgactagaattaaaaagggaataaattatgtgaaacaaaccttacgtgaatttattctaaaagcattttccaaaaagccaaagatttccagggagataagacaagcagaagatctgaatactaagaaggaaaactatatttctaaccatacacttgctgaaatgagcaaaggtcacaatttcctcaaggaaaaagataaaatcagtggttttggaagcagcgtggacaaacacttgatggaagacagtgatggtcaatcatttattcacaatcccagcctcacagtgacagtgccaattgcacctggggaatccgatttggaaaatatgaatgctgaggaacttagcagtgattcggatagtgaatacagcaaagtgagattaaaccggtcaagctcctcagagtgcagcacagttgataaccctttgcctggagaaggagaagaagcagaggctgaacctatgaattccgatgagccagaggcctgtttcacagatggttgtgtatggaggttctcatgctgccaagttaacatagagtcagggaaaggaaaaatctggtggaacatcaggaaaacctgctacaagattgttgaacacagttggtttgaaagcttcattgtcctcatgatcctgctcagcagtggtgccctggcttttgaagatatttatattgaaaggaaaaagaccattaagattatcctggagtatgcagacaagatcttcacttacatcttcattctggaaatgcttctaaaatggatagcatatggttataaaacatatttcaccaatgcctggtgttggctggatttcctaattgttgatgtttctttggttactttagtggcaaacactcttggctactcagatcttggccccattaaatcccttcggacactgagagctttaagacctctaagagccttatctagatttgaaggaatgagggtcgttgtgaatgcactcataggagcaattccttccatcatgaatgtgctacttgtgtgtcttatattctggctgatattcagcatcatgggagtaaatttgtttgctggcaagttctatgagtgtattaacaccacagatgggtcacggtttcctgcaagtcaagttccaaatcgttccgaatgttttgcccttatgaatgttagtcaaaatgtgcgatggaaaaacctgaaagtgaactttgataatgtcggacttggttacctatctctgcttcaagttgcaacttttaagggatggacgattattatgtatgcagcagtggattctgttaatgtagacaagcagcccaaatatgaatatagcctctacatgtatatttattttgtcgtctttatcatctttgggtcattcttcactttgaacttgttcattggtgtcatcatagataatttcaaccaacagaaaaagaagcttggaggtcaagacatctttatgacagaagaacagaagaaatactataatgcaatgaaaaagctggggtccaagaagccacaaaagccaattcctcgaccagggaacaaaatccaaggatgtatatttgacctagtgacaaatcaagcctttgatattagtatcatggttcttatctgtctcaacatggtaaccatgatggtagaaaaggagggtcaaagtcaacatatgactgaagttttatattggataaatgtggtttttataatccttttcactggagaatgtgtgctaaaactgatctccctcagacactactacttcactgtaggatggaatatttttgattttgtggttgtgattatctccattgtaggtatgtttctagctgatttgattgaaacgtattttgtgtcccctaccctgttccgagtgatccgtcttgccaggattggccgaatcctacgtctagtcaaaggagcaaaggggatccgcacgctgctctttgctttgatgatgtcccttcctgcgttgtttaacatcggcctcctgctcttcctggtcatgttcatctacgccatctttggaatgtccaactttgcctatgttaaaaaggaagatggaattaatgacatgttcaattttgagacctttggcaacagtatgatttgcctgttccaaattacaacctctgctggctgggatggattgctagcacctattcttaacagtaagccacccgactgtgacccaaaaaaagttcatcctggaagttcagttgaaggagactgtggtaacccatctgttggaatattctactttgttagttatatcatcatatccttcctggttgtggtgaacatgtacattgcagtcatactggagaattttagtgttgccactgaagaaagtactgaacctctgagtgaggatgactttgagatgttctatgaggtttgggagaagtttgatcccgatgcgacccagtttatagagttctctaaactctctgattttgcagctgccctggatcctcctcttctcatagcaaaacccaacaaagtccagctcattgccatggatctgcccatggttagtggtgaccggatccattgtcttgacatcttatttgcttttacaaagcgtgttttgggtgagagtggggagatggattctcttcgttcacagatggaagaaaggttcatgtctgcaaatccttccaaagtgtcctatgaacccatcacaaccacactaaaacggaaacaagaggatgtgtctgctactgtcattcagcgtgcttatagacgttaccgcttaaggcaaaatgtcaaaaatatatcaagtatatacataaaagatggagacagagatgatgatttactcaataaaaaagatatggcttttgataatgttaatgagaactcaagtccagaaaaaacagatgccacttcatccaccacctctccaccttcatatgatagtgtaacaaagccagacaaagagaaatatgaacaagacagaacagaaaaggaagacaaagggaaagacagcaaggaaagcaaaaaatagagcttcatttttgatatattgtttacagcctgtgaaagtgatttatttgtgttaataaaactcttttgaggaagtctatgccaaaatcctttttatcaaaatattctcgaaggcagtgcagtcactaactctgatttcctaagaaaggtgggcagcattagcagatggttatttttgcactgatgattctttaagaatcgtaagagaactctgtaggaattattgattatagcatacaaaagtgattcagttttttggtttttaataaatcagaagaccatgtagaaaacttttacatctgccttgtcatcttttcacaggattgtaattagtcttgtttcccatgtaaataaacaacacacgcatacagaaaaatctattatttatctattatttggaaatcaacaaaagtatttgccttggctttgcaatgaaatgcttgatagaagtaatggacattagttatgaatgtttagttaaaatgcattattagggagcttgactttttatcaatgtacagaggttattctatattttgaggtgcttaaatttattctacattgcatcagaaccaatttatatgtgcctataaaatgccatgggattaaaaatatatgtaggctattcatttctacaaatgtttttcattcatcttgactcacatgccaacaaggataagacttacctttagagtattgtgtttcatagcctttcttctttcatatccctttttgttcatagaataaccacagaacttgaaaaattattctaagtacatattacactcctcaaaaaaaacaaagataactgagaaaaaagttattgacagaagttctatttgctattatttacatagcctaacatttgactgtgctgcccaaaatactgataatagtctcttaaactcttttgtcaaattttcctgctttcttatgcagtattgtttagtcatcctttcgctgtaagcaaagttgatgaaatccttcctgatatgcagttagttgtttgaccacggtacatacttgagcagataataacttgggcacagtatttattgcatcacttgtatacaatcccgtgtttggcaagctttcaaatcatgtaatatgacagactttacacagatatgtgtttagtatgaataaaaaagcattgaaatagggattcttgccaacttgctctcttgccaccaacttactttcctaaattatggaagtaatcttttttggatatacttcaatgtatacaatgaggaagatgtcaccttctccttaaaattctatgatgtgaaatatattttgcctcaatcaacacagtaccatgggcttctaatttatcaagcacatattcattttgcattagctgtagacatctagttttttgaaaacacctattaatagtaatttgaaaagaaataaccataatgctttttttcgtgagtttatttcaggaatatgagatctttcttctataaagttattcatgcacaggcaaaaattgagctacacaggtagaatgtagttttacttagaagatttttgtgggaggttttgaagcaaatatataaaacaactttcactaatttgctttccatatttaaaaaataataaattacatttatataataaatgtttaaagcacatattttttgttgttctggcaatttaaaaagaaagaggatttaaacgtacctatagaaacaaagatttatggttaaagaatgagatcagaagtctagaatgtttttaaattgtgatatattttacaacatccgttattactttgagacatttgtcctaatctacgtataaaactcaatctagggctaaagattctttataccatcttaggttcattcatcttaggctatttgaaccactttttaatttaatatgaaagacaccatgcagtgttttccgagactacatagatcattttatcacatacctaccaagcctgttggaaataggttttgataatttaagtagggacctatacaaaatatattacatttatcagatttttaaatacattcaattaagaatttaacatcaccttaaatttgaattcaatctaccgttatttcaaactcacaaatataactgcattatgaatacttacataatgtagtaagacaagatgtttgacaggttcgtgtgtaattttctattaatgtttttacattgccttgtttttatgtaaaataaaaaatatgggcaactggtttgttaacaacacaatttcttcttagcatttcaaaaatatatataaagttgttctttttcctatttcatgaactatgtttttttttaaaataacatggttaagttttatatatatttacgtttgtttcaggaatgtctacttgtgactttttatcaattaaaaataatatttggaagaaagagcttattaagtataagcttgaagtaaaattagacctctctttccatgtagattactgtttgtactgatggtttcacccttcagaaggcactgtcatattaatatttaaattttataatcgctgaacttattacacccaacaatacagaaaggcagttacactgaagaacttaacttagaataaaatggaagcaaacaggttttctaaaaacttttttaagtgaccaggtctcgctctgtcacccaggctagagtgcaatggcatgatcatagctctctgcagcctcaactctgggctcaagcaaccctcctgcctcagcctcccaagtagctaagactacaggtacatgccaccatgcctggctaatatttaaatttttgtagataaggggtcttgctatgttgcccaggctagtctcaaactcctggcttcaagtgttcctactgtcatgacctgccaacatgctggggttacaggcatgagccaccatgccccaaacaggtttgaacacaaatctttcggatgaaaattagagaacctaattttagctttttgatagttacctagtttgcaaaagatttgggtgacttgtgagctgtttttaaatgctgattgttgaacatcacaacccaaaatacttagcatgattttatagagttttgatagctttattaaaaagagtgaaaataaaatgcatatgtaaataaagcagttctaaatagctatttcagagaaatgttaatagaagtgctgaaagaagggccaactaaattaggatggccagggaattggcctgggtttaggacctatgtatgaaggccaccaattttttaaaaatatctgtggtttattatgttattatcttcttgaggaaaacaatcaagaattgcttcatgaaaataaataaatagccatgaatatcataaagctgtttacataggattctttacaaatttcatagatctatgaatgctcaaaatgtttgagtttgccataaattatattgtagttatattgtagttatacttgagactgacacattgtaatataatctaagaataaaagttatacaaaataaaa

SEQ ID NO: 28460 - DNA, 1618 bp, Homo sapiens
  source 1..1618: mol_type = unassigned DNA
attctgacaaactgcatatttatgaccatgaataacccaccggactggaccaaaaatgtcgagtacacttttactggaatatatacttttgaatcacttgtaaaaatccttgcaagaggcttctgtgtaggagaattcacttttcttcgtgacccgtggaactggctggattttgtcgtcattgtttttgcatatgtgacagagtttgtggacctgggcaatgtctcagcattgagaacattcagagttctccgagcattgaaaacaatttcagtcattccaggcctgaagacaattgtaggggctttgatccagtcagtgaagaagctttctgatgtcatgatcctgactgtgttctgtctgagtgtgtttgcactaattggactacagctgttcatgggaaacctgaagcataaatgttttcgaaattcacttgaaaataatgaaacattagaaagcataatgaataccctagagagtgaagaagactttagaaaatatttttattacttggaaggatccaaagatgctctcctttgtggtttcagcacagattcaggtcagtgtccagaggggtacacctgtgtgaaaattggcagaaaccctgattatggctacacgagctttgacactttcagctgggccttcttagccttgtttaggctaatgacccaagattactgggaaaacctttaccaacagacgctgcgtgctgctggcaaaacctacatgatcttctttgtcgtagtgattttcctgggctccttttatctaataaacttgatcctggctgtggttgccatggcatatgaagaacagaaccaggcaaacattgaagaagctaaacagaaagaattagaatttcaacagatgttagaccgtcttaaaaaagagcaagaagaagctgaggcaattgcagcggcagcggctgaatatacaagtattaggagaagcagaattatgggcctctcagagagttcttctgaaacatccaaactgagctctaaaagtgctaaagaaagaagaaacagaagaaagaaaaagaatcaaaagaagctctccagtggagaggaaaagggagatgctgagaaattgtcgaaatcagaatcagaggacagcatcagaagaaaaagtttccaccttggtgtcgaagggcataggcgagcacatgaaaagaggttgtctacccccaatcagtcaccactcagcattcgtggctccttgttttctgcaaggcgaagcagcagaacaagtctttttagtttcaaaggcagaggaagagatataggatctgagactgaatttgccgatgatgagcacagcatttttggagacaatgagagcagaaggggctcactgtttgtgccccacagaccccaggagcgacgcagcagtaacatcagccaagccagtaggtccccaccaatgctgccggtgaacgggaaaatgcacagtgctgtggactgcaacggtgtggtctccctggttgatggacgctcagccctcatgctccccaatggacagcttctgccagaggtgataatagataaggcaacttctgatgacagcggcacgaccaatcaaatacacaagaaaaggcgttgtagttcctatctcc

SEQ ID NO: 28461 - DNA, 335 bp, Homo sapiens
  source 1..335: mol_type = unassigned DNA
agtggacactgtgggcatgcgtgtccgtgcagcacatcgccatgcaggagcctgggggaaggcctttccctcagtgagggctgcagcttccccacaggcaacgtgaggagagcctgtgcccagaagcaggatgagaagatggcaaacttcctattacctcggggcaccagcagcttccgcaggttcacacgggagtccctggcagccatcgagaagcgcatggcagagaagcaagcccgcggctcaaccaccttgcaggagagccgagaggggctgcccgaggaggaggctccccggccccagctggacctgcaggcctccaaaaagctgccaga

SEQ ID NO: 28462 - DNA, 8456 bp, Homo sapiens
  source 1..8456: mol_type = unassigned DNA
gccgctgagcctgcgcccagtgccccgagccccgcgccgagccgagtccgcgccaagcagcagccgcccaccccggggcccggccgggggaccagcagcttccccacaggcaacgtgaggagagcctgtgcccagaagcaggatgagaagatggcaaacttcctattacctcggggcaccagcagcttccgcaggttcacacgggagtccctggcagccatcgagaagcgcatggcagagaagcaagcccgcggctcaaccaccttgcaggagagccgagaggggctgcccgaggaggaggctccccggccccagctggacctgcaggcctccaaaaagctgccagatctctatggcaatccaccccaagagctcatcggagagcccctggaggacctggaccccttctatagcacccaaaagactttcatcgtactgaataaaggcaagaccatcttccggttcagtgccaccaacgccttgtatgtcctcagtcccttccaccccatccggagagcggctgtgaagattctggttcactcgctcttcaacatgctcatcatgtgcaccatcctcaccaactgcgtgttcatggcccagcacgaccctccaccctggaccaagtatgtcgagtacaccttcaccgccatttacacctttgagtctctggtcaagattctggctcgaggcttctgcctgcacgcgttcactttccttcgggacccatggaactggctggactttagtgtgattatcatggcatacacaactgaatttgtggacctgggcaatgtctcagccttacgcaccttccgagtcctccgggccctgaaaactatatcagtcatttcagggctgaagaccatcgtgggggccctgatccagtctgtgaagaagctggctgatgtgatggtcctcacagtcttctgcctcagcgtctttgccctcatcggcctgcagctcttcatgggcaacctaaggcacaagtgcgtgcgcaacttcacagcgctcaacggcaccaacggctccgtggaggccgacggcttggtctgggaatccctggacctttacctcagtgatccagaaaattacctgctcaagaacggcacctctgatgtgttactgtgtgggaacagctctgacgctgggacatgtccggagggctaccggtgcctaaaggcaggcgagaaccccgaccacggctacaccagcttcgattcctttgcctgggcctttcttgcactcttccgcctgatgacgcaggactgctgggagcgcctctatcagcagaccctcaggtccgcagggaagatctacatgatcttcttcatgcttgtcatcttcctggggtccttctacctggtgaacctgatcctggccgtggtcgcaatggcctatgaggagcaaaaccaagccaccatcgctgagaccgaggagaaggaaaagcgcttccaggaggccatggaaatgctcaagaaagaacacgaggccctcaccatcaggggtgtggataccgtgtcccgtagctccttggagatgtcccctttggccccagtaaacagccatgagagaagaagcaagaggagaaaacggatgtcttcaggaactgaggagtgtggggaggacaggctccccaagtctgactcagaagatggtcccagagcaatgaatcatctcagcctcacccgtggcctcagcaggacttctatgaagccacgttccagccgcgggagcattttcacctttcgcaggcgagacctgggttctgaagcagattttgcagatgatgaaaacagcacagcgggggagagcgagagccaccacacatcactgctggtgccctggcccctgcgccggaccagtgcccagggacagcccagtcccggaacctcggctcctggccacgccctccatggcaaaaagaacagcactgtggactgcaatggggtggtctcattactgggggcaggcgacccagaggccacatccccaggaagccacctcctccgccctgtgatgctagagcacccgccagacacgaccacgccatcggaggagccaggcgggccccagatgctgacctcccaggctccgtgtgtagatggcttcgaggagccaggagcacggcagcgggccctcagcgcagtcagcgtcctcaccagcgcactggaagagttagaggagtctcgccacaagtgtccaccatgctggaaccgtctcgcccagcgctacctgatctgggagtgctgcccgctgtggatgtccatcaagcagggagtgaagttggtggtcatggacccgtttactgacctcaccatcactatgtgcatcgtactcaacacactcttcatggcgctggagcactacaacatgacaagtgaattcgaggagatgctgcaggtcggaaacctggtcttcacagggattttcacagcagagatgaccttcaagatcattgccctcgacccctactactacttccaacagggctggaacatcttcgacagcatcatcgtcatccttagcctcatggagctgggcctgtcccgcatgagcaacttgtcggtgctgcgctccttccgcctgctgcgggtcttcaagctggccaaatcatggcccaccctgaacacactcatcaagatcatcgggaactcagtgggggcactggggaacctgacactggtgctagccatcatcgtgttcatctttgctgtggtgggcatgcagctctttggcaagaactactcggagctgagggacagcgactcaggcctgctgcctcgctggcacatgatggacttctttcatgccttcctcatcatcttccgcatcctctgtggagagtggatcgagaccatgtgggactgcatggaggtgtcggggcagtcattatgcctgctggtcttcttgcttgttatggtcattggcaaccttgtggtcctgaatctcttcctggccttgctgctcagctccttcagtgcagacaacctcacagcccctgatgaggacagagagatgaacaacctccagctggccctggcccgcatccagaggggcctgcgctttgtcaagcggaccacctgggatttctgctgtggtctcctgcggcagcggcctcagaagcccgcagcccttgccgcccagggccagctgcccagctgcattgccaccccctactccccgccacccccagagacggagaaggtgcctcccacccgcaaggaaacacggtttgaggaaggcgagcaaccaggccagggcacccccggggatccagagcccgtgtgtgtgcccatcgctgtggccgagtcagacacagatgaccaagaagaagatgaggagaacagcctgggcacggaggaggagtccagcaagcagcaggaatcccagcctgtgtccggtggcccagaggcccctccggattccaggacctggagccaggtgtcagcgactgcctcctctgaggccgaggccagtgcatctcaggccgactggcggcagcagtggaaagcggaaccccaggccccagggtgcggtgagaccccagaggacagttgctccgagggcagcacagcagacatgaccaacaccgctgagctcctggagcagatccctgacctcggccaggatgtcaaggacccagaggactgcttcactgaaggctgtgtccggcgctgtccctgctgtgcggtggacaccacacaggccccagggaaggtctggtggcggttgcgcaagacctgctaccacatcgtggagcacagctggttcgagacattcatcatcttcatgatcctactcagcagtggagcgctggccttcgaggacatctacctagaggagcggaagaccatcaaggttctgcttgagtatgccgacaagatgttcacatatgtcttcgtgctggagatgctgctcaagtgggtggcctacggcttcaagaagtacttcaccaatgcctggtgctggctcgacttcctcatcgtagacgtctctctggtcagcctggtggccaacaccctgggctttgccgagatgggccccatcaagtcactgcggacgctgcgtgcactccgtcctctgagagctctgtcacgatttgagggcatgagggtggtggtcaatgccctggtgggcgccatcccgtccatcatgaacgtcctcctcgtctgcctcatcttctggctcatcttcagcatcatgggcgtgaacctctttgcggggaagtttgggaggtgcatcaaccagacagagggagacttgcctttgaactacaccatcgtgaacaacaagagccagtgtgagtccttgaacttgaccggagaattgtactggaccaaggtgaaagtcaactttgacaacgtgggggccgggtacctggcccttctgcaggtggcaacatttaaaggctggatggacattatgtatgcagctgtggactccagggggtatgaagagcagcctcagtgggaatacaacctctacatgtacatctattttgtcattttcatcatctttgggtctttcttcaccctgaacctctttattggtgtcatcattgacaacttcaaccaacagaagaaaaagttagggggccaggacatcttcatgacagaggagcagaagaagtactacaatgccatgaagaagctgggctccaagaagccccagaagcccatcccacggcccctgaacaagtaccagggcttcatattcgacattgtgaccaagcaggcctttgacgtcaccatcatgtttctgatctgcttgaatatggtgaccatgatggtggagacagatgaccaaagtcctgagaaaatcaacatcttggccaagatcaacctgctctttgtggccatcttcacaggcgagtgtattgtcaagctggctgccctgcgccactactacttcaccaacagctggaatatcttcgacttcgtggttgtcatcctctccatcgtgggcactgtgctctcggacatcatccagaagtacttcttctccccgacgctcttccgagtcatccgcctggcccgaataggccgcatcctcagactgatccgaggggccaaggggatccgcacgctgctctttgccctcatgatgtccctgcctgccctcttcaacatcgggctgctgctcttcctcgtcatgttcatctactccatctttggcatggccaacttcgcttatgtcaagtgggaggctggcatcgacgacatgttcaacttccagaccttcgccaacagcatgctgtgcctcttccagatcaccacgtcggccggctgggatggcctcctcagccccatcctcaacactgggccgccctactgcgaccccactctgcccaacagcaatggctctcggggggactgcgggagcccagccgtgggcatcctcttcttcaccacctacatcatcatctccttcctcatcgtggtcaacatgtacattgccatcatcctggagaacttcagcgtggccacggaggagagcaccgagcccctgagtgaggacgacttcgatatgttctatgagatctgggagaaatttgacccagaggccactcagtttattgagtattcggtcctgtctgactttgccgatgccctgtctgagccactccgtatcgccaagcccaaccagataagcctcatcaacatggacctgcccatggtgagtggggaccgcatccattgcatggacattctctttgccttcaccaaaagggtcctgggggagtctggggagatggacgccctgaagatccagatggaggagaagttcatggcagccaacccatccaagatctcctacgagcccatcaccaccacactccggcgcaagcacgaagaggtgtcggccatggttatccagagagccttccgcaggcacctgctgcaacgctctttgaagcatgcctccttcctcttccgtcagcaggcgggcagcggcctctccgaagaggatgcccctgagcgagagggcctcatcgcctacgtgatgagtgagaacttctcccgaccccttggcccaccctccagctcctccatctcctccacttccttcccaccctcctatgacagtgtcactagagccaccagcgataacctccaggtgcgggggtctgactacagccacagtgaagatctcgccgacttccccccttctccggacagggaccgtgagtccatcgtgtgagcctcggcctggctggccaggacacactgaaaagcagcctttttcaccatggcaaacctaaatgcagtcagtcacaaaccagcctggggccttcctggctttgggagtaagaaatgggcctcagccccgcggatcaaccaggcagagttctgtggcgccgcgtggacagccggagcagttggcctgtgcttggaggcctcagatagacctgtgacctggtctggtcaggcaatgccctgcggctctggaaagcaacttcatcccagctgctgaggcgaaatataaaactgagactgtatatgttgtgaatgggctttcataaatttattatatttgatatttttttacttgagcaaagaactaaggatttttccatggacatgggcagcaattcacgctgtctcttcttaaccctgaacaagagtgtctatggagcagccggaagtctgttctcaaagcagaagtggaatccagtgtggctcccacaggtcttcactgcccaggggtcgaatggggtccccctcccacttgacctgagatgctgggagggctgaacccccactcacacaagcacacacacacagtcctcacacacggaggccagacacaggccgtgggacccaggctcccagcctaagggagacaggcctttccctgccggccccccaaggatggggttcttgtccacggggctcactctggccccctattgtctccaaggtcccattttccccctgtgttttcacgcaggtcatattgtcagtcctacaaaaataaaaggcttccagaggagagtggcctgggtcccagggctggccctaggcactgatagttgccttttcttcccctcctgtaagagtattaacaaaaccaaaggacacaagggtgcaagccccattcacggcctggcatgcagcttgtccttgctcctggaacctggcaggccctgcccagccagccatcggaagagagggctgagccatgggggtttggggctaagaagttcaccagccctgagccatggcggcccctcagcctgcctgaagagaggaaactggcgatctcccagggctctctggaccatacgcggaggagttttctgtgtggtctccagctcctctccagacacagagacatgggagtggggagcggagcttggccctgcgccctgtgcagggaaagggatggtcaggcccagttctcgtgcccttagaggggaatgaaccatggcacctttgagagagggggcactgtggtcaggcccagcctctctggctcagcccgggatcctgatggcacccacacagaggacctctttggggcaagatccaggtggtcccataggtcttgtgaaaaggctttttcagggaaaaatattttactagtccaatcacccccaggacctcttcagctgctgacaatcctatttagcatatgcaaatcttttaacatagagaactgtcaccctgaggtaacagggtcaactggcgaagcctgagcaggcaggggcttggctgccccattccagctctcccatggagcccctccaccgggcgcatgcctcccaggccacctcagtctcacctgccggctctgggctggctgctcctaacctacctcgccgagctgtcggagggctggacatttgtggcagtgctgaagggggcattgccggcgagtaaagtattatgtttcttcttgtcaccccagttcccttggtggcaaccccagacccaacccatgcccctgacagatctagttctcttctcctgtgttccctttgagtccagtgtgggacacggtttaactgtcccagcgacatttctccaagtggaaatcctatttttgtagatctccatgctttgctctcaaggcttggagaggtatgtgcccctcctgggtgctcaccgcctgctacacaggcaggaatgcggttgggaggcaggtcgggctgccagcccagctggccggaaggagactgtggtttttgtgtgtgtggacagcccgggagctttgagacaggtgcctggggctggctgcagacggtgtggttgggggtgggaggtgagctagacccaacccttagcttttagcctggctgtcacctttttaatttccagaactgcacaatgaccagcaggagggaaggacagacatcaagtgccagatgttgtctgaactaatcgagcacttctcaccaaacttcatgtataaataaaatacatatttttaaaacaaaccaataaatggcttac

SEQ ID NO: 28463 - DNA, 341 bp, Homo sapiens
  source 1..341: mol_type = unassigned DNA
tcatggcccagcacgaccctccaccctggaccaagtatgtcgagtatgtatcagaaaatataaaactaggcaatttgtcggctcttcgaactttcagagtcctgagagctctaaaaactatttcagttatcccagggctgaagaccatcgtgggggccctgatccagtctgtgaagaagctggctgatgtgatggtcctcacagtcttctgcctcagcgtctttgccctcatcggcctgcagctcttcatgggcaacctaaggcacaagtgcgtgcgcaacttcacagcgctcaacggcaccaacggctccgtggaggccgacggcttggtctgggaatcc

SEQ ID NO: 28464 - DNA, 8504 bp, Homo sapiens
  source 1..8504: mol_type = unassigned DNA
agacggcggcggcgcccgtaggatgcagggatcgctcccccggggccgctgagcctgcgcccagtgccccgagccccgcgccgagccgagtccgcgccaagcagcagccgcccaccccggggcccggccgggggaccagcagcttccccacaggcaacgtgaggagagcctgtgcccagaagcaggatgagaagatggcaaacttcctattacctcggggcaccagcagcttccgcaggttcacacgggagtccctggcagccatcgagaagcgcatggcagagaagcaagcccgcggctcaaccaccttgcaggagagccgagaggggctgcccgaggaggaggctccccggccccagctggacctgcaggcctccaaaaagctgccagatctctatggcaatccaccccaagagctcatcggagagcccctggaggacctggaccccttctatagcacccaaaagactttcatcgtactgaataaaggcaagaccatcttccggttcagtgccaccaacgccttgtatgtcctcagtcccttccaccccatccggagagcggctgtgaagattctggttcactcgctcttcaacatgctcatcatgtgcaccatcctcaccaactgcgtgttcatggcccagcacgaccctccaccctggaccaagtatgtcgagtacaccttcaccgccatttacacctttgagtctctggtcaagattctggctcgaggcttctgcctgcacgcgttcactttccttcgggacccatggaactggctggactttagtgtgattatcatggcgtatgtatcagaaaatataaaactaggcaatttgtcggctcttcgaactttcagagtcctgagagctctaaaaactatttcagttatcccagggctgaagaccatcgtgggggccctgatccagtctgtgaagaagctggctgatgtgatggtcctcacagtcttctgcctcagcgtctttgccctcatcggcctgcagctcttcatgggcaacctaaggcacaagtgcgtgcgcaacttcacagcgctcaacggcaccaacggctccgtggaggccgacggcttggtctgggaatccctggacctttacctcagtgatccagaaaattacctgctcaagaacggcacctctgatgtgttactgtgtgggaacagctctgacgctgggacatgtccggagggctaccggtgcctaaaggcaggcgagaaccccgaccacggctacaccagcttcgattcctttgcctgggcctttcttgcactcttccgcctgatgacgcaggactgctgggagcgcctctatcagcagaccctcaggtccgcagggaagatctacatgatcttcttcatgcttgtcatcttcctggggtccttctacctggtgaacctgatcctggccgtggtcgcaatggcctatgaggagcaaaaccaagccaccatcgctgagaccgaggagaaggaaaagcgcttccaggaggccatggaaatgctcaagaaagaacacgaggccctcaccatcaggggtgtggataccgtgtcccgtagctccttggagatgtcccctttggccccagtaaacagccatgagagaagaagcaagaggagaaaacggatgtcttcaggaactgaggagtgtggggaggacaggctccccaagtctgactcagaagatggtcccagagcaatgaatcatctcagcctcacccgtggcctcagcaggacttctatgaagccacgttccagccgcgggagcattttcacctttcgcaggcgagacctgggttctgaagcagattttgcagatgatgaaaacagcacagcgggggagagcgagagccaccacacatcactgctggtgccctggcccctgcgccggaccagtgcccagggacagcccagtcccggaacctcggctcctggccacgccctccatggcaaaaagaacagcactgtggactgcaatggggtggtctcattactgggggcaggcgacccagaggccacatccccaggaagccacctcctccgccctgtgatgctagagcacccgccagacacgaccacgccatcggaggagccaggcgggccccagatgctgacctcccaggctccgtgtgtagatggcttcgaggagccaggagcacggcagcgggccctcagcgcagtcagcgtcctcaccagcgcactggaagagttagaggagtctcgccacaagtgtccaccatgctggaaccgtctcgcccagcgctacctgatctgggagtgctgcccgctgtggatgtccatcaagcagggagtgaagttggtggtcatggacccgtttactgacctcaccatcactatgtgcatcgtactcaacacactcttcatggcgctggagcactacaacatgacaagtgaattcgaggagatgctgcaggtcggaaacctggtcttcacagggattttcacagcagagatgaccttcaagatcattgccctcgacccctactactacttccaacagggctggaacatcttcgacagcatcatcgtcatccttagcctcatggagctgggcctgtcccgcatgagcaacttgtcggtgctgcgctccttccgcctgctgcgggtcttcaagctggccaaatcatggcccaccctgaacacactcatcaagatcatcgggaactcagtgggggcactggggaacctgacactggtgctagccatcatcgtgttcatctttgctgtggtgggcatgcagctctttggcaagaactactcggagctgagggacagcgactcaggcctgctgcctcgctggcacatgatggacttctttcatgccttcctcatcatcttccgcatcctctgtggagagtggatcgagaccatgtgggactgcatggaggtgtcggggcagtcattatgcctgctggtcttcttgcttgttatggtcattggcaaccttgtggtcctgaatctcttcctggccttgctgctcagctccttcagtgcagacaacctcacagcccctgatgaggacagagagatgaacaacctccagctggccctggcccgcatccagaggggcctgcgctttgtcaagcggaccacctgggatttctgctgtggtctcctgcggcagcggcctcagaagcccgcagcccttgccgcccagggccagctgcccagctgcattgccaccccctactccccgccacccccagagacggagaaggtgcctcccacccgcaaggaaacacggtttgaggaaggcgagcaaccaggccagggcacccccggggatccagagcccgtgtgtgtgcccatcgctgtggccgagtcagacacagatgaccaagaagaagatgaggagaacagcctgggcacggaggaggagtccagcaagcagcaggaatcccagcctgtgtccggtggcccagaggcccctccggattccaggacctggagccaggtgtcagcgactgcctcctctgaggccgaggccagtgcatctcaggccgactggcggcagcagtggaaagcggaaccccaggccccagggtgcggtgagaccccagaggacagttgctccgagggcagcacagcagacatgaccaacaccgctgagctcctggagcagatccctgacctcggccaggatgtcaaggacccagaggactgcttcactgaaggctgtgtccggcgctgtccctgctgtgcggtggacaccacacaggccccagggaaggtctggtggcggttgcgcaagacctgctaccacatcgtggagcacagctggttcgagacattcatcatcttcatgatcctactcagcagtggagcgctggccttcgaggacatctacctagaggagcggaagaccatcaaggttctgcttgagtatgccgacaagatgttcacatatgtcttcgtgctggagatgctgctcaagtgggtggcctacggcttcaagaagtacttcaccaatgcctggtgctggctcgacttcctcatcgtagacgtctctctggtcagcctggtggccaacaccctgggctttgccgagatgggccccatcaagtcactgcggacgctgcgtgcactccgtcctctgagagctctgtcacgatttgagggcatgagggtggtggtcaatgccctggtgggcgccatcccgtccatcatgaacgtcctcctcgtctgcctcatcttctggctcatcttcagcatcatgggcgtgaacctctttgcggggaagtttgggaggtgcatcaaccagacagagggagacttgcctttgaactacaccatcgtgaacaacaagagccagtgtgagtccttgaacttgaccggagaattgtactggaccaaggtgaaagtcaactttgacaacgtgggggccgggtacctggcccttctgcaggtggcaacatttaaaggctggatggacattatgtatgcagctgtggactccagggggtatgaagagcagcctcagtgggaatacaacctctacatgtacatctattttgtcattttcatcatctttgggtctttcttcaccctgaacctctttattggtgtcatcattgacaacttcaaccaacagaagaaaaagttagggggccaggacatcttcatgacagaggagcagaagaagtactacaatgccatgaagaagctgggctccaagaagccccagaagcccatcccacggcccctgaacaagtaccagggcttcatattcgacattgtgaccaagcaggcctttgacgtcaccatcatgtttctgatctgcttgaatatggtgaccatgatggtggagacagatgaccaaagtcctgagaaaatcaacatcttggccaagatcaacctgctctttgtggccatcttcacaggcgagtgtattgtcaagctggctgccctgcgccactactacttcaccaacagctggaatatcttcgacttcgtggttgtcatcctctccatcgtgggcactgtgctctcggacatcatccagaagtacttcttctccccgacgctcttccgagtcatccgcctggcccgaataggccgcatcctcagactgatccgaggggccaaggggatccgcacgctgctctttgccctcatgatgtccctgcctgccctcttcaacatcgggctgctgctcttcctcgtcatgttcatctactccatctttggcatggccaacttcgcttatgtcaagtgggaggctggcatcgacgacatgttcaacttccagaccttcgccaacagcatgctgtgcctcttccagatcaccacgtcggccggctgggatggcctcctcagccccatcctcaacactgggccgccctactgcgaccccactctgcccaacagcaatggctctcggggggactgcgggagcccagccgtgggcatcctcttcttcaccacctacatcatcatctccttcctcatcgtggtcaacatgtacattgccatcatcctggagaacttcagcgtggccacggaggagagcaccgagcccctgagtgaggacgacttcgatatgttctatgagatctgggagaaatttgacccagaggccactcagtttattgagtattcggtcctgtctgactttgccgatgccctgtctgagccactccgtatcgccaagcccaaccagataagcctcatcaacatggacctgcccatggtgagtggggaccgcatccattgcatggacattctctttgccttcaccaaaagggtcctgggggagtctggggagatggacgccctgaagatccagatggaggagaagttcatggcagccaacccatccaagatctcctacgagcccatcaccaccacactccggcgcaagcacgaagaggtgtcggccatggttatccagagagccttccgcaggcacctgctgcaacgctctttgaagcatgcctccttcctcttccgtcagcaggcgggcagcggcctctccgaagaggatgcccctgagcgagagggcctcatcgcctacgtgatgagtgagaacttctcccgaccccttggcccaccctccagctcctccatctcctccacttccttcccaccctcctatgacagtgtcactagagccaccagcgataacctccaggtgcgggggtctgactacagccacagtgaagatctcgccgacttccccccttctccggacagggaccgtgagtccatcgtgtgagcctcggcctggctggccaggacacactgaaaagcagcctttttcaccatggcaaacctaaatgcagtcagtcacaaaccagcctggggccttcctggctttgggagtaagaaatgggcctcagccccgcggatcaaccaggcagagttctgtggcgccgcgtggacagccggagcagttggcctgtgcttggaggcctcagatagacctgtgacctggtctggtcaggcaatgccctgcggctctggaaagcaacttcatcccagctgctgaggcgaaatataaaactgagactgtatatgttgtgaatgggctttcataaatttattatatttgatatttttttacttgagcaaagaactaaggatttttccatggacatgggcagcaattcacgctgtctcttcttaaccctgaacaagagtgtctatggagcagccggaagtctgttctcaaagcagaagtggaatccagtgtggctcccacaggtcttcactgcccaggggtcgaatggggtccccctcccacttgacctgagatgctgggagggctgaacccccactcacacaagcacacacacacagtcctcacacacggaggccagacacaggccgtgggacccaggctcccagcctaagggagacaggcctttccctgccggccccccaaggatggggttcttgtccacggggctcactctggccccctattgtctccaaggtcccattttccccctgtgttttcacgcaggtcatattgtcagtcctacaaaaataaaaggcttccagaggagagtggcctgggtcccagggctggccctaggcactgatagttgccttttcttcccctcctgtaagagtattaacaaaaccaaaggacacaagggtgcaagccccattcacggcctggcatgcagcttgtccttgctcctggaacctggcaggccctgcccagccagccatcggaagagagggctgagccatgggggtttggggctaagaagttcaccagccctgagccatggcggcccctcagcctgcctgaagagaggaaactggcgatctcccagggctctctggaccatacgcggaggagttttctgtgtggtctccagctcctctccagacacagagacatgggagtggggagcggagcttggccctgcgccctgtgcagggaaagggatggtcaggcccagttctcgtgcccttagaggggaatgaaccatggcacctttgagagagggggcactgtggtcaggcccagcctctctggctcagcccgggatcctgatggcacccacacagaggacctctttggggcaagatccaggtggtcccataggtcttgtgaaaaggctttttcagggaaaaatattttactagtccaatcacccccaggacctcttcagctgctgacaatcctatttagcatatgcaaatcttttaacatagagaactgtcaccctgaggtaacagggtcaactggcgaagcctgagcaggcaggggcttggctgccccattccagctctcccatggagcccctccaccgggcgcatgcctcccaggccacctcagtctcacctgccggctctgggctggctgctcctaacctacctcgccgagctgtcggagggctggacatttgtggcagtgctgaagggggcattgccggcgagtaaagtattatgtttcttcttgtcaccccagttcccttggtggcaaccccagacccaacccatgcccctgacagatctagttctcttctcctgtgttccctttgagtccagtgtgggacacggtttaactgtcccagcgacatttctccaagtggaaatcctatttttgtagatctccatgctttgctctcaaggcttggagaggtatgtgcccctcctgggtgctcaccgcctgctacacaggcaggaatgcggttgggaggcaggtcgggctgccagcccagctggccggaaggagactgtggtttttgtgtgtgtggacagcccgggagctttgagacaggtgcctggggctggctgcagacggtgtggttgggggtgggaggtgagctagacccaacccttagcttttagcctggctgtcacctttttaatttccagaactgcacaatgaccagcaggagggaaggacagacatcaagtgccagatgttgtctgaactaatcgagcacttctcaccaaacttcatgtataaataaaatacatatttttaaaacaaaccaataaatggcttacatga

SEQ ID NO: 28465 - DNA, 8303 bp, Homo sapiens
  source 1..8303: mol_type = unassigned DNA
ggcaacgtgaggagagcctgtgcccagaagcaggatgagaagatggcaaacttcctattacctcggggcaccagcagcttccgcaggttcacacgggagtccctggcagccatcgagaagcgcatggcagagaagcaagcccgcggctcaaccaccttgcaggagagccgagaggggctgcccgaggaggaggctccccggccccagctggacctgcaggcctccaaaaagctgccagatctctatggcaatccaccccaagagctcatcggagagcccctggaggacctggaccccttctatagcacccaaaagactttcatcgtactgaataaaggcaagaccatcttccggttcagtgccaccaacgccttgtatgtcctcagtcccttccaccccatccggagagcggctgtgaagattctggttcactcgctcttcaacatgctcatcatgtgcaccatcctcaccaactgcgtgttcatggcccagcacgaccctccaccctggaccaagtatgtcgagtacaccttcaccgccatttacacctttgagtctctggtcaagattctggctcgaggcttctgcctgcacgcgttcactttccttcgggacccatggaactggctggactttagtgtgattatcatggcgtatgtatcagaaaatataaaactaggcaatttgtcggctcttcgaactttcagagtcctgagagctctaaaaactatttcagttatcccagggctgaagaccatcgtgggggccctgatccagtctgtgaagaagctggctgatgtgatggtcctcacagtcttctgcctcagcgtctttgccctcatcggcctgcagctcttcatgggcaacctaaggcacaagtgcgtgcgcaacttcacagcgctcaacggcaccaacggctccgtggaggccgacggcttggtctgggaatccctggacctttacctcagtgatccagaaaattacctgctcaagaacggcacctctgatgtgttactgtgtgggaacagctctgacgctgggacatgtccggagggctaccggtgcctaaaggcaggcgagaaccccgaccacggctacaccagcttcgattcctttgcctgggcctttcttgcactcttccgcctgatgacgcaggactgctgggagcgcctctatcagcagaccctcaggtccgcagggaagatctacatgatcttcttcatgcttgtcatcttcctggggtccttctacctggtgaacctgatcctggccgtggtcgcaatggcctatgaggagcaaaaccaagccaccatcgctgagaccgaggagaaggaaaagcgcttccaggaggccatggaaatgctcaagaaagaacacgaggccctcaccatcaggggtgtggataccgtgtcccgtagctccttggagatgtcccctttggccccagtaaacagccatgagagaagaagcaagaggagaaaacggatgtcttcaggaactgaggagtgtggggaggacaggctccccaagtctgactcagaagatggtcccagagcaatgaatcatctcagcctcacccgtggcctcagcaggacttctatgaagccacgttccagccgcgggagcattttcacctttcgcaggcgagacctgggttctgaagcagattttgcagatgatgaaaacagcacagcgggggagagcgagagccaccacacatcactgctggtgccctggcccctgcgccggaccagtgcccagggacagcccagtcccggaacctcggctcctggccacgccctccatggcaaaaagaacagcactgtggactgcaatggggtggtctcattactgggggcaggcgacccagaggccacatccccaggaagccacctcctccgccctgtgatgctagagcacccgccagacacgaccacgccatcggaggagccaggcgggccccagatgctgacctcccaggctccgtgtgtagatggcttcgaggagccaggagcacggcagcgggccctcagcgcagtcagcgtcctcaccagcgcactggaagagttagaggagtctcgccacaagtgtccaccatgctggaaccgtctcgcccagcgctacctgatctgggagtgctgcccgctgtggatgtccatcaagcagggagtgaagttggtggtcatggacccgtttactgacctcaccatcactatgtgcatcgtactcaacacactcttcatggcgctggagcactacaacatgacaagtgaattcgaggagatgctgcaggtcggaaacctggtcttcacagggattttcacagcagagatgaccttcaagatcattgccctcgacccctactactacttccaacagggctggaacatcttcgacagcatcatcgtcatccttagcctcatggagctgggcctgtcccgcatgagcaacttgtcggtgctgcgctccttccgcctgctgcgggtcttcaagctggccaaatcatggcccaccctgaacacactcatcaagatcatcgggaactcagtgggggcactggggaacctgacactggtgctagccatcatcgtgttcatctttgctgtggtgggcatgcagctctttggcaagaactactcggagctgagggacagcgactcaggcctgctgcctcgctggcacatgatggacttctttcatgccttcctcatcatcttccgcatcctctgtggagagtggatcgagaccatgtgggactgcatggaggtgtcggggcagtcattatgcctgctggtcttcttgcttgttatggtcattggcaaccttgtggtcctgaatctcttcctggccttgctgctcagctccttcagtgcagacaacctcacagcccctgatgaggacagagagatgaacaacctccagctggccctggcccgcatccagaggggcctgcgctttgtcaagcggaccacctgggatttctgctgtggtctcctgcggcagcggcctcagaagcccgcagcccttgccgcccagggccagctgcccagctgcattgccaccccctactccccgccacccccagagacggagaaggtgcctcccacccgcaaggaaacacggtttgaggaaggcgagcaaccaggccagggcacccccggggatccagagcccgtgtgtgtgcccatcgctgtggccgagtcagacacagatgaccaagaagaagatgaggagaacagcctgggcacggaggaggagtccagcaagcagcaggaatcccagcctgtgtccggtggcccagaggcccctccggattccaggacctggagccaggtgtcagcgactgcctcctctgaggccgaggccagtgcatctcaggccgactggcggcagcagtggaaagcggaaccccaggccccagggtgcggtgagaccccagaggacagttgctccgagggcagcacagcagacatgaccaacaccgctgagctcctggagcagatccctgacctcggccaggatgtcaaggacccagaggactgcttcactgaaggctgtgtccggcgctgtccctgctgtgcggtggacaccacacaggccccagggaaggtctggtggcggttgcgcaagacctgctaccacatcgtggagcacagctggttcgagacattcatcatcttcatgatcctactcagcagtggagcgctggccttcgaggacatctacctagaggagcggaagaccatcaaggttctgcttgagtatgccgacaagatgttcacatatgtcttcgtgctggagatgctgctcaagtgggtggcctacggcttcaagaagtacttcaccaatgcctggtgctggctcgacttcctcatcgtagacgtctctctggtcagcctggtggccaacaccctgggctttgccgagatgggccccatcaagtcactgcggacgctgcgtgcactccgtcctctgagagctctgtcacgatttgagggcatgagggtggtggtcaatgccctggtgggcgccatcccgtccatcatgaacgtcctcctcgtctgcctcatcttctggctcatcttcagcatcatgggcgtgaacctctttgcggggaagtttgggaggtgcatcaaccagacagagggagacttgcctttgaactacaccatcgtgaacaacaagagccagtgtgagtccttgaacttgaccggagaattgtactggaccaaggtgaaagtcaactttgacaacgtgggggccgggtacctggcccttctgcaggtgtatgaagagcagcctcagtgggaatacaacctctacatgtacatctattttgtcattttcatcatctttgggtctttcttcaccctgaacctctttattggtgtcatcattgacaacttcaaccaacagaagaaaaagttagggggccaggacatcttcatgacagaggagcagaagaagtactacaatgccatgaagaagctgggctccaagaagccccagaagcccatcccacggcccctgaacaagtaccagggcttcatattcgacattgtgaccaagcaggcctttgacgtcaccatcatgtttctgatctgcttgaatatggtgaccatgatggtggagacagatgaccaaagtcctgagaaaatcaacatcttggccaagatcaacctgctctttgtggccatcttcacaggcgagtgtattgtcaagctggctgccctgcgccactactacttcaccaacagctggaatatcttcgacttcgtggttgtcatcctctccatcgtgggcactgtgctctcggacatcatccagaagtacttcttctccccgacgctcttccgagtcatccgcctggcccgaataggccgcatcctcagactgatccgaggggccaaggggatccgcacgctgctctttgccctcatgatgtccctgcctgccctcttcaacatcgggctgctgctcttcctcgtcatgttcatctactccatctttggcatggccaacttcgcttatgtcaagtgggaggctggcatcgacgacatgttcaacttccagaccttcgccaacagcatgctgtgcctcttccagatcaccacgtcggccggctgggatggcctcctcagccccatcctcaacactgggccgccctactgcgaccccactctgcccaacagcaatggctctcggggggactgcgggagcccagccgtgggcatcctcttcttcaccacctacatcatcatctccttcctcatcgtggtcaacatgtacattgccatcatcctggagaacttcagcgtggccacggaggagagcaccgagcccctgagtgaggacgacttcgatatgttctatgagatctgggagaaatttgacccagaggccactcagtttattgagtattcggtcctgtctgactttgccgatgccctgtctgagccactccgtatcgccaagcccaaccagataagcctcatcaacatggacctgcccatggtgagtggggaccgcatccattgcatggacattctctttgccttcaccaaaagggtcctgggggagtctggggagatggacgccctgaagatccagatggaggagaagttcatggcagccaacccatccaagatctcctacgagcccatcaccaccacactccggcgcaagcacgaagaggtgtcggccatggttatccagagagccttccgcaggcacctgctgcaacgctctttgaagcatgcctccttcctcttccgtcagcaggcgggcagcggcctctccgaagaggatgcccctgagcgagagggcctcatcgcctacgtgatgagtgagaacttctcccgaccccttggcccaccctccagctcctccatctcctccacttccttcccaccctcctatgacagtgtcactagagccaccagcgataacctccaggtgcgggggtctgactacagccacagtgaagatctcgccgacttccccccttctccggacagggaccgtgagtccatcgtgtgagcctcggcctggctggccaggacacactgaaaagcagcctttttcaccatggcaaacctaaatgcagtcagtcacaaaccagcctggggccttcctggctttgggagtaagaaatgggcctcagccccgcggatcaaccaggcagagttctgtggcgccgcgtggacagccggagcagttggcctgtgcttggaggcctcagatagacctgtgacctggtctggtcaggcaatgccctgcggctctggaaagcaacttcatcccagctgctgaggcgaaatataaaactgagactgtatatgttgtgaatgggctttcataaatttattatatttgatatttttttacttgagcaaagaactaaggatttttccatggacatgggcagcaattcacgctgtctcttcttaaccctgaacaagagtgtctatggagcagccggaagtctgttctcaaagcagaagtggaatccagtgtggctcccacaggtcttcactgcccaggggtcgaatggggtccccctcccacttgacctgagatgctgggagggctgaacccccactcacacaagcacacacacacagtcctcacacacggaggccagacacaggccgtgggacccaggctcccagcctaagggagacaggcctttccctgccggccccccaaggatggggttcttgtccacggggctcactctggccccctattgtctccaaggtcccattttccccctgtgttttcacgcaggtcatattgtcagtcctacaaaaataaaaggcttccagaggagagtggcctgggtcccagggctggccctaggcactgatagttgccttttcttcccctcctgtaagagtattaacaaaaccaaaggacacaagggtgcaagccccattcacggcctggcatgcagcttgtccttgctcctggaacctggcaggccctgcccagccagccatcggaagagagggctgagccatgggggtttggggctaagaagttcaccagccctgagccatggcggcccctcagcctgcctgaagagaggaaactggcgatctcccagggctctctggaccatacgcggaggagttttctgtgtggtctccagctcctctccagacacagagacatgggagtggggagcggagcttggccctgcgccctgtgcagggaaagggatggtcaggcccagttctcgtgcccttagaggggaatgaaccatggcacctttgagagagggggcactgtggtcaggcccagcctctctggctcagcccgggatcctgatggcacccacacagaggacctctttggggcaagatccaggtggtcccataggtcttgtgaaaaggctttttcagggaaaaatattttactagtccaatcacccccaggacctcttcagctgctgacaatcctatttagcatatgcaaatcttttaacatagagaactgtcaccctgaggtaacagggtcaactggcgaagcctgagcaggcaggggcttggctgccccattccagctctcccatggagcccctccaccgggcgcatgcctcccaggccacctcagtctcacctgccggctctgggctggctgctcctaacctacctcgccgagctgtcggagggctggacatttgtggcagtgctgaagggggcattgccggcgagtaaagtattatgtttcttcttgtcaccccagttcccttggtggcaaccccagacccaacccatgcccctgacagatctagttctcttctcctgtgttccctttgagtccagtgtgggacacggtttaactgtcccagcgacatttctccaagtggaaatcctatttttgtagatctccatgctttgctctcaaggcttggagaggtatgtgcccctcctgggtgctcaccgcctgctacacaggcaggaatgcggttgggaggcaggtcgggctgccagcccagctggccggaaggagactgtggtttttgtgtgtgtggacagcccgggagctttgagacaggtgcctggggctggctgcagacggtgtggttgggggtgggaggtgagctagacccaacccttagcttttagcctggctgtcacctttttaatttccagaactgcacaatgaccagcaggagggaaggacagacatcaagtgccagatgttgtctgaactaatcgagcacttctcaccaaacttcatgtataaataaaatacatatttttaaaacaaaccaataaatggcttacatgacctgg

SEQ ID NO: 28466 - DNA, 8362 bp, Homo sapiens
  source 1..8362: mol_type = unassigned DNA
cagcttccccacaggcaacgtgaggagagcctgtgcccagaagcaggatgagaagatggcaaacttcctattacctcggggcaccagcagcttccgcaggttcacacgggagtccctggcagccatcgagaagcgcatggcagagaagcaagcccgcggctcaaccaccttgcaggagagccgagaggggctgcccgaggaggaggctccccggccccagctggacctgcaggcctccaaaaagctgccagatctctatggcaatccaccccaagagctcatcggagagcccctggaggacctggaccccttctatagcacccaaaagactttcatcgtactgaataaaggcaagaccatcttccggttcagtgccaccaacgccttgtatgtcctcagtcccttccaccccatccggagagcggctgtgaagattctggttcactcgctcttcaacatgctcatcatgtgcaccatcctcaccaactgcgtgttcatggcccagcacgaccctccaccctggaccaagtatgtcgagtacaccttcaccgccatttacacctttgagtctctggtcaagattctggctcgaggcttctgcctgcacgcgttcactttccttcgggacccatggaactggctggactttagtgtgattatcatggcatacacaactgaatttgtggacctgggcaatgtctcagccttacgcaccttccgagtcctccgggccctgaaaactatatcagtcatttcagggctgaagaccatcgtgggggccctgatccagtctgtgaagaagctggctgatgtgatggtcctcacagtcttctgcctcagcgtctttgccctcatcggcctgcagctcttcatgggcaacctaaggcacaagtgcgtgcgcaacttcacagcgctcaacggcaccaacggctccgtggaggccgacggcttggtctgggaatccctggacctttacctcagtgatccagaaaattacctgctcaagaacggcacctctgatgtgttactgtgtgggaacagctctgacgctgggacatgtccggagggctaccggtgcctaaaggcaggcgagaaccccgaccacggctacaccagcttcgattcctttgcctgggcctttcttgcactcttccgcctgatgacgcaggactgctgggagcgcctctatcagcagaccctcaggtccgcagggaagatctacatgatcttcttcatgcttgtcatcttcctggggtccttctacctggtgaacctgatcctggccgtggtcgcaatggcctatgaggagcaaaaccaagccaccatcgctgagaccgaggagaaggaaaagcgcttccaggaggccatggaaatgctcaagaaagaacacgaggccctcaccatcaggggtgtggataccgtgtcccgtagctccttggagatgtcccctttggccccagtaaacagccatgagagaagaagcaagaggagaaaacggatgtcttcaggaactgaggagtgtggggaggacaggctccccaagtctgactcagaagatggtcccagagcaatgaatcatctcagcctcacccgtggcctcagcaggacttctatgaagccacgttccagccgcgggagcattttcacctttcgcaggcgagacctgggttctgaagcagattttgcagatgatgaaaacagcacagcgggggagagcgagagccaccacacatcactgctggtgccctggcccctgcgccggaccagtgcccagggacagcccagtcccggaacctcggctcctggccacgccctccatggcaaaaagaacagcactgtggactgcaatggggtggtctcattactgggggcaggcgacccagaggccacatccccaggaagccacctcctccgccctgtgatgctagagcacccgccagacacgaccacgccatcggaggagccaggcgggccccagatgctgacctcccaggctccgtgtgtagatggcttcgaggagccaggagcacggcagcgggccctcagcgcagtcagcgtcctcaccagcgcactggaagagttagaggagtctcgccacaagtgtccaccatgctggaaccgtctcgcccagcgctacctgatctgggagtgctgcccgctgtggatgtccatcaagcagggagtgaagttggtggtcatggacccgtttactgacctcaccatcactatgtgcatcgtactcaacacactcttcatggcgctggagcactacaacatgacaagtgaattcgaggagatgctgcaggtcggaaacctggtcttcacagggattttcacagcagagatgaccttcaagatcattgccctcgacccctactactacttccaacagggctggaacatcttcgacagcatcatcgtcatccttagcctcatggagctgggcctgtcccgcatgagcaacttgtcggtgctgcgctccttccgcctgctgcgggtcttcaagctggccaaatcatggcccaccctgaacacactcatcaagatcatcgggaactcagtgggggcactggggaacctgacactggtgctagccatcatcgtgttcatctttgctgtggtgggcatgcagctctttggcaagaactactcggagctgagggacagcgactcaggcctgctgcctcgctggcacatgatggacttctttcatgccttcctcatcatcttccgcatcctctgtggagagtggatcgagaccatgtgggactgcatggaggtgtcggggcagtcattatgcctgctggtcttcttgcttgttatggtcattggcaaccttgtggtcctgaatctcttcctggccttgctgctcagctccttcagtgcagacaacctcacagcccctgatgaggacagagagatgaacaacctccagctggccctggcccgcatccagaggggcctgcgctttgtcaagcggaccacctgggatttctgctgtggtctcctgcggcagcggcctcagaagcccgcagcccttgccgcccagggccagctgcccagctgcattgccaccccctactccccgccacccccagagacggagaaggtgcctcccacccgcaaggaaacacggtttgaggaaggcgagcaaccaggccagggcacccccggggatccagagcccgtgtgtgtgcccatcgctgtggccgagtcagacacagatgaccaagaagaagatgaggagaacagcctgggcacggaggaggagtccagcaagcaggaatcccagcctgtgtccggtggcccagaggcccctccggattccaggacctggagccaggtgtcagcgactgcctcctctgaggccgaggccagtgcatctcaggccgactggcggcagcagtggaaagcggaaccccaggccccagggtgcggtgagaccccagaggacagttgctccgagggcagcacagcagacatgaccaacaccgctgagctcctggagcagatccctgacctcggccaggatgtcaaggacccagaggactgcttcactgaaggctgtgtccggcgctgtccctgctgtgcggtggacaccacacaggccccagggaaggtctggtggcggttgcgcaagacctgctaccacatcgtggagcacagctggttcgagacattcatcatcttcatgatcctactcagcagtggagcgctggccttcgaggacatctacctagaggagcggaagaccatcaaggttctgcttgagtatgccgacaagatgttcacatatgtcttcgtgctggagatgctgctcaagtgggtggcctacggcttcaagaagtacttcaccaatgcctggtgctggctcgacttcctcatcgtagacgtctctctggtcagcctggtggccaacaccctgggctttgccgagatgggccccatcaagtcactgcggacgctgcgtgcactccgtcctctgagagctctgtcacgatttgagggcatgagggtggtggtcaatgccctggtgggcgccatcccgtccatcatgaacgtcctcctcgtctgcctcatcttctggctcatcttcagcatcatgggcgtgaacctctttgcggggaagtttgggaggtgcatcaaccagacagagggagacttgcctttgaactacaccatcgtgaacaacaagagccagtgtgagtccttgaacttgaccggagaattgtactggaccaaggtgaaagtcaactttgacaacgtgggggccgggtacctggcccttctgcaggtggcaacatttaaaggctggatggacattatgtatgcagctgtggactccagggggtatgaagagcagcctcagtgggaatacaacctctacatgtacatctattttgtcattttcatcatctttgggtctttcttcaccctgaacctctttattggtgtcatcattgacaacttcaaccaacagaagaaaaagttagggggccaggacatcttcatgacagaggagcagaagaagtactacaatgccatgaagaagctgggctccaagaagccccagaagcccatcccacggcccctgaacaagtaccagggcttcatattcgacattgtgaccaagcaggcctttgacgtcaccatcatgtttctgatctgcttgaatatggtgaccatgatggtggagacagatgaccaaagtcctgagaaaatcaacatcttggccaagatcaacctgctctttgtggccatcttcacaggcgagtgtattgtcaagctggctgccctgcgccactactacttcaccaacagctggaatatcttcgacttcgtggttgtcatcctctccatcgtgggcactgtgctctcggacatcatccagaagtacttcttctccccgacgctcttccgagtcatccgcctggcccgaataggccgcatcctcagactgatccgaggggccaaggggatccgcacgctgctctttgccctcatgatgtccctgcctgccctcttcaacatcgggctgctgctcttcctcgtcatgttcatctactccatctttggcatggccaacttcgcttatgtcaagtgggaggctggcatcgacgacatgttcaacttccagaccttcgccaacagcatgctgtgcctcttccagatcaccacgtcggccggctgggatggcctcctcagccccatcctcaacactgggccgccctactgcgaccccactctgcccaacagcaatggctctcggggggactgcgggagcccagccgtgggcatcctcttcttcaccacctacatcatcatctccttcctcatcgtggtcaacatgtacattgccatcatcctggagaacttcagcgtggccacggaggagagcaccgagcccctgagtgaggacgacttcgatatgttctatgagatctgggagaaatttgacccagaggccactcagtttattgagtattcggtcctgtctgactttgccgatgccctgtctgagccactccgtatcgccaagcccaaccagataagcctcatcaacatggacctgcccatggtgagtggggaccgcatccattgcatggacattctctttgccttcaccaaaagggtcctgggggagtctggggagatggacgccctgaagatccagatggaggagaagttcatggcagccaacccatccaagatctcctacgagcccatcaccaccacactccggcgcaagcacgaagaggtgtcggccatggttatccagagagccttccgcaggcacctgctgcaacgctctttgaagcatgcctccttcctcttccgtcagcaggcgggcagcggcctctccgaagaggatgcccctgagcgagagggcctcatcgcctacgtgatgagtgagaacttctcccgaccccttggcccaccctccagctcctccatctcctccacttccttcccaccctcctatgacagtgtcactagagccaccagcgataacctccaggtgcgggggtctgactacagccacagtgaagatctcgccgacttccccccttctccggacagggaccgtgagtccatcgtgtgagcctcggcctggctggccaggacacactgaaaagcagcctttttcaccatggcaaacctaaatgcagtcagtcacaaaccagcctggggccttcctggctttgggagtaagaaatgggcctcagccccgcggatcaaccaggcagagttctgtggcgccgcgtggacagccggagcagttggcctgtgcttggaggcctcagatagacctgtgacctggtctggtcaggcaatgccctgcggctctggaaagcaacttcatcccagctgctgaggcgaaatataaaactgagactgtatatgttgtgaatgggctttcataaatttattatatttgatatttttttacttgagcaaagaactaaggatttttccatggacatgggcagcaattcacgctgtctcttcttaaccctgaacaagagtgtctatggagcagccggaagtctgttctcaaagcagaagtggaatccagtgtggctcccacaggtcttcactgcccaggggtcgaatggggtccccctcccacttgacctgagatgctgggagggctgaacccccactcacacaagcacacacacacagtcctcacacacggaggccagacacaggccgtgggacccaggctcccagcctaagggagacaggcctttccctgccggccccccaaggatggggttcttgtccacggggctcactctggccccctattgtctccaaggtcccattttccccctgtgttttcacgcaggtcatattgtcagtcctacaaaaataaaaggcttccagaggagagtggcctgggtcccagggctggccctaggcactgatagttgccttttcttcccctcctgtaagagtattaacaaaaccaaaggacacaagggtgcaagccccattcacggcctggcatgcagcttgtccttgctcctggaacctggcaggccctgcccagccagccatcggaagagagggctgagccatgggggtttggggctaagaagttcaccagccctgagccatggcggcccctcagcctgcctgaagagaggaaactggcgatctcccagggctctctggaccatacgcggaggagttttctgtgtggtctccagctcctctccagacacagagacatgggagtggggagcggagcttggccctgcgccctgtgcagggaaagggatggtcaggcccagttctcgtgcccttagaggggaatgaaccatggcacctttgagagagggggcactgtggtcaggcccagcctctctggctcagcccgggatcctgatggcacccacacagaggacctctttggggcaagatccaggtggtcccataggtcttgtgaaaaggctttttcagggaaaaatattttactagtccaatcacccccaggacctcttcagctgctgacaatcctatttagcatatgcaaatcttttaacatagagaactgtcaccctgaggtaacagggtcaactggcgaagcctgagcaggcaggggcttggctgccccattccagctctcccatggagcccctccaccgggcgcatgcctcccaggccacctcagtctcacctgccggctctgggctggctgctcctaacctacctcgccgagctgtcggagggctggacatttgtggcagtgctgaagggggcattgccggcgagtaaagtattatgtttcttcttgtcaccccagttcccttggtggcaaccccagacccaacccatgcccctgacagatctagttctcttctcctgtgttccctttgagtccagtgtgggacacggtttaactgtcccagcgacatttctccaagtggaaatcctatttttgtagatctccatgctttgctctcaaggcttggagaggtatgtgcccctcctgggtgctcaccgcctgctacacaggcaggaatgcggttgggaggcaggtcgggctgccagcccagctggccggaaggagactgtggtttttgtgtgtgtggacagcccgggagctttgagacaggtgcctggggctggctgcagacggtgtggttgggggtgggaggtgagctagacccaacccttagcttttagcctggctgtcacctttttaatttccagaactgcacaatgaccagcaggagggaaggacagacatcaagtgccagatgttgtctgaactaatcgagcacttctcaccaaacttcatgtataaataaaatacatatttttaaaacaaaccaataaatggcttacatga

SEQ ID NO: 28467 - DNA, 8450 bp, Homo sapiens
  source 1..8450: mol_type = unassigned DNA
agacggcggcggcgcccgtaggatgcagggatcgctcccccggggccgctgagcctgcgcccagtgccccgagccccgcgccgagccgagtccgcgccaagcagcagccgcccaccccggggcccggccgggggaccagcagcttccccacaggcaacgtgaggagagcctgtgcccagaagcaggatgagaagatggcaaacttcctattacctcggggcaccagcagcttccgcaggttcacacgggagtccctggcagccatcgagaagcgcatggcagagaagcaagcccgcggctcaaccaccttgcaggagagccgagaggggctgcccgaggaggaggctccccggccccagctggacctgcaggcctccaaaaagctgccagatctctatggcaatccaccccaagagctcatcggagagcccctggaggacctggaccccttctatagcacccaaaagactttcatcgtactgaataaaggcaagaccatcttccggttcagtgccaccaacgccttgtatgtcctcagtcccttccaccccatccggagagcggctgtgaagattctggttcactcgctcttcaacatgctcatcatgtgcaccatcctcaccaactgcgtgttcatggcccagcacgaccctccaccctggaccaagtatgtcgagtacaccttcaccgccatttacacctttgagtctctggtcaagattctggctcgaggcttctgcctgcacgcgttcactttccttcgggacccatggaactggctggactttagtgtgattatcatggcgtatgtatcagaaaatataaaactaggcaatttgtcggctcttcgaactttcagagtcctgagagctctaaaaactatttcagttatcccagggctgaagaccatcgtgggggccctgatccagtctgtgaagaagctggctgatgtgatggtcctcacagtcttctgcctcagcgtctttgccctcatcggcctgcagctcttcatgggcaacctaaggcacaagtgcgtgcgcaacttcacagcgctcaacggcaccaacggctccgtggaggccgacggcttggtctgggaatccctggacctttacctcagtgatccagaaaattacctgctcaagaacggcacctctgatgtgttactgtgtgggaacagctctgacgctgggacatgtccggagggctaccggtgcctaaaggcaggcgagaaccccgaccacggctacaccagcttcgattcctttgcctgggcctttcttgcactcttccgcctgatgacgcaggactgctgggagcgcctctatcagcagaccctcaggtccgcagggaagatctacatgatcttcttcatgcttgtcatcttcctggggtccttctacctggtgaacctgatcctggccgtggtcgcaatggcctatgaggagcaaaaccaagccaccatcgctgagaccgaggagaaggaaaagcgcttccaggaggccatggaaatgctcaagaaagaacacgaggccctcaccatcaggggtgtggataccgtgtcccgtagctccttggagatgtcccctttggccccagtaaacagccatgagagaagaagcaagaggagaaaacggatgtcttcaggaactgaggagtgtggggaggacaggctccccaagtctgactcagaagatggtcccagagcaatgaatcatctcagcctcacccgtggcctcagcaggacttctatgaagccacgttccagccgcgggagcattttcacctttcgcaggcgagacctgggttctgaagcagattttgcagatgatgaaaacagcacagcgggggagagcgagagccaccacacatcactgctggtgccctggcccctgcgccggaccagtgcccagggacagcccagtcccggaacctcggctcctggccacgccctccatggcaaaaagaacagcactgtggactgcaatggggtggtctcattactgggggcaggcgacccagaggccacatccccaggaagccacctcctccgccctgtgatgctagagcacccgccagacacgaccacgccatcggaggagccaggcgggccccagatgctgacctcccaggctccgtgtgtagatggcttcgaggagccaggagcacggcagcgggccctcagcgcagtcagcgtcctcaccagcgcactggaagagttagaggagtctcgccacaagtgtccaccatgctggaaccgtctcgcccagcgctacctgatctgggagtgctgcccgctgtggatgtccatcaagcagggagtgaagttggtggtcatggacccgtttactgacctcaccatcactatgtgcatcgtactcaacacactcttcatggcgctggagcactacaacatgacaagtgaattcgaggagatgctgcaggtcggaaacctggtcttcacagggattttcacagcagagatgaccttcaagatcattgccctcgacccctactactacttccaacagggctggaacatcttcgacagcatcatcgtcatccttagcctcatggagctgggcctgtcccgcatgagcaacttgtcggtgctgcgctccttccgcctgctgcgggtcttcaagctggccaaatcatggcccaccctgaacacactcatcaagatcatcgggaactcagtgggggcactggggaacctgacactggtgctagccatcatcgtgttcatctttgctgtggtgggcatgcagctctttggcaagaactactcggagctgagggacagcgactcaggcctgctgcctcgctggcacatgatggacttctttcatgccttcctcatcatcttccgcatcctctgtggagagtggatcgagaccatgtgggactgcatggaggtgtcggggcagtcattatgcctgctggtcttcttgcttgttatggtcattggcaaccttgtggtcctgaatctcttcctggccttgctgctcagctccttcagtgcagacaacctcacagcccctgatgaggacagagagatgaacaacctccagctggccctggcccgcatccagaggggcctgcgctttgtcaagcggaccacctgggatttctgctgtggtctcctgcggcagcggcctcagaagcccgcagcccttgccgcccagggccagctgcccagctgcattgccaccccctactccccgccacccccagagacggagaaggtgcctcccacccgcaaggaaacacggtttgaggaaggcgagcaaccaggccagggcacccccggggatccagagcccgtgtgtgtgcccatcgctgtggccgagtcagacacagatgaccaagaagaagatgaggagaacagcctgggcacggaggaggagtccagcaagcagcaggaatcccagcctgtgtccggtggcccagaggcccctccggattccaggacctggagccaggtgtcagcgactgcctcctctgaggccgaggccagtgcatctcaggccgactggcggcagcagtggaaagcggaaccccaggccccagggtgcggtgagaccccagaggacagttgctccgagggcagcacagcagacatgaccaacaccgctgagctcctggagcagatccctgacctcggccaggatgtcaaggacccagaggactgcttcactgaaggctgtgtccggcgctgtccctgctgtgcggtggacaccacacaggccccagggaaggtctggtggcggttgcgcaagacctgctaccacatcgtggagcacagctggttcgagacattcatcatcttcatgatcctactcagcagtggagcgctggccttcgaggacatctacctagaggagcggaagaccatcaaggttctgcttgagtatgccgacaagatgttcacatatgtcttcgtgctggagatgctgctcaagtgggtggcctacggcttcaagaagtacttcaccaatgcctggtgctggctcgacttcctcatcgtagacgtctctctggtcagcctggtggccaacaccctgggctttgccgagatgggccccatcaagtcactgcggacgctgcgtgcactccgtcctctgagagctctgtcacgatttgagggcatgagggtggtggtcaatgccctggtgggcgccatcccgtccatcatgaacgtcctcctcgtctgcctcatcttctggctcatcttcagcatcatgggcgtgaacctctttgcggggaagtttgggaggtgcatcaaccagacagagggagacttgcctttgaactacaccatcgtgaacaacaagagccagtgtgagtccttgaacttgaccggagaattgtactggaccaaggtgaaagtcaactttgacaacgtgggggccgggtacctggcccttctgcaggtgtatgaagagcagcctcagtgggaatacaacctctacatgtacatctattttgtcattttcatcatctttgggtctttcttcaccctgaacctctttattggtgtcatcattgacaacttcaaccaacagaagaaaaagttagggggccaggacatcttcatgacagaggagcagaagaagtactacaatgccatgaagaagctgggctccaagaagccccagaagcccatcccacggcccctgaacaagtaccagggcttcatattcgacattgtgaccaagcaggcctttgacgtcaccatcatgtttctgatctgcttgaatatggtgaccatgatggtggagacagatgaccaaagtcctgagaaaatcaacatcttggccaagatcaacctgctctttgtggccatcttcacaggcgagtgtattgtcaagctggctgccctgcgccactactacttcaccaacagctggaatatcttcgacttcgtggttgtcatcctctccatcgtgggcactgtgctctcggacatcatccagaagtacttcttctccccgacgctcttccgagtcatccgcctggcccgaataggccgcatcctcagactgatccgaggggccaaggggatccgcacgctgctctttgccctcatgatgtccctgcctgccctcttcaacatcgggctgctgctcttcctcgtcatgttcatctactccatctttggcatggccaacttcgcttatgtcaagtgggaggctggcatcgacgacatgttcaacttccagaccttcgccaacagcatgctgtgcctcttccagatcaccacgtcggccggctgggatggcctcctcagccccatcctcaacactgggccgccctactgcgaccccactctgcccaacagcaatggctctcggggggactgcgggagcccagccgtgggcatcctcttcttcaccacctacatcatcatctccttcctcatcgtggtcaacatgtacattgccatcatcctggagaacttcagcgtggccacggaggagagcaccgagcccctgagtgaggacgacttcgatatgttctatgagatctgggagaaatttgacccagaggccactcagtttattgagtattcggtcctgtctgactttgccgatgccctgtctgagccactccgtatcgccaagcccaaccagataagcctcatcaacatggacctgcccatggtgagtggggaccgcatccattgcatggacattctctttgccttcaccaaaagggtcctgggggagtctggggagatggacgccctgaagatccagatggaggagaagttcatggcagccaacccatccaagatctcctacgagcccatcaccaccacactccggcgcaagcacgaagaggtgtcggccatggttatccagagagccttccgcaggcacctgctgcaacgctctttgaagcatgcctccttcctcttccgtcagcaggcgggcagcggcctctccgaagaggatgcccctgagcgagagggcctcatcgcctacgtgatgagtgagaacttctcccgaccccttggcccaccctccagctcctccatctcctccacttccttcccaccctcctatgacagtgtcactagagccaccagcgataacctccaggtgcgggggtctgactacagccacagtgaagatctcgccgacttccccccttctccggacagggaccgtgagtccatcgtgtgagcctcggcctggctggccaggacacactgaaaagcagcctttttcaccatggcaaacctaaatgcagtcagtcacaaaccagcctggggccttcctggctttgggagtaagaaatgggcctcagccccgcggatcaaccaggcagagttctgtggcgccgcgtggacagccggagcagttggcctgtgcttggaggcctcagatagacctgtgacctggtctggtcaggcaatgccctgcggctctggaaagcaacttcatcccagctgctgaggcgaaatataaaactgagactgtatatgttgtgaatgggctttcataaatttattatatttgatatttttttacttgagcaaagaactaaggatttttccatggacatgggcagcaattcacgctgtctcttcttaaccctgaacaagagtgtctatggagcagccggaagtctgttctcaaagcagaagtggaatccagtgtggctcccacaggtcttcactgcccaggggtcgaatggggtccccctcccacttgacctgagatgctgggagggctgaacccccactcacacaagcacacacacacagtcctcacacacggaggccagacacaggccgtgggacccaggctcccagcctaagggagacaggcctttccctgccggccccccaaggatggggttcttgtccacggggctcactctggccccctattgtctccaaggtcccattttccccctgtgttttcacgcaggtcatattgtcagtcctacaaaaataaaaggcttccagaggagagtggcctgggtcccagggctggccctaggcactgatagttgccttttcttcccctcctgtaagagtattaacaaaaccaaaggacacaagggtgcaagccccattcacggcctggcatgcagcttgtccttgctcctggaacctggcaggccctgcccagccagccatcggaagagagggctgagccatgggggtttggggctaagaagttcaccagccctgagccatggcggcccctcagcctgcctgaagagaggaaactggcgatctcccagggctctctggaccatacgcggaggagttttctgtgtggtctccagctcctctccagacacagagacatgggagtggggagcggagcttggccctgcgccctgtgcagggaaagggatggtcaggcccagttctcgtgcccttagaggggaatgaaccatggcacctttgagagagggggcactgtggtcaggcccagcctctctggctcagcccgggatcctgatggcacccacacagaggacctctttggggcaagatccaggtggtcccataggtcttgtgaaaaggctttttcagggaaaaatattttactagtccaatcacccccaggacctcttcagctgctgacaatcctatttagcatatgcaaatcttttaacatagagaactgtcaccctgaggtaacagggtcaactggcgaagcctgagcaggcaggggcttggctgccccattccagctctcccatggagcccctccaccgggcgcatgcctcccaggccacctcagtctcacctgccggctctgggctggctgctcctaacctacctcgccgagctgtcggagggctggacatttgtggcagtgctgaagggggcattgccggcgagtaaagtattatgtttcttcttgtcaccccagttcccttggtggcaaccccagacccaacccatgcccctgacagatctagttctcttctcctgtgttccctttgagtccagtgtgggacacggtttaactgtcccagcgacatttctccaagtggaaatcctatttttgtagatctccatgctttgctctcaaggcttggagaggtatgtgcccctcctgggtgctcaccgcctgctacacaggcaggaatgcggttgggaggcaggtcgggctgccagcccagctggccggaaggagactgtggtttttgtgtgtgtggacagcccgggagctttgagacaggtgcctggggctggctgcagacggtgtggttgggggtgggaggtgagctagacccaacccttagcttttagcctggctgtcacctttttaatttccagaactgcacaatgaccagcaggagggaaggacagacatcaagtgccagatgttgtctgaactaatcgagcacttctcaccaaacttcatgtataaataaaatacatatttttaaaacaaaccaataaatggcttacatga

SEQ ID NO: 28468 - DNA, 8501 bp, Homo sapiens
  source 1..8501: mol_type = unassigned DNA
agacggcggcggcgcccgtaggatgcagggatcgctcccccggggccgctgagcctgcgcccagtgccccgagccccgcgccgagccgagtccgcgccaagcagcagccgcccaccccggggcccggccgggggaccagcagcttccccacaggcaacgtgaggagagcctgtgcccagaagcaggatgagaagatggcaaacttcctattacctcggggcaccagcagcttccgcaggttcacacgggagtccctggcagccatcgagaagcgcatggcagagaagcaagcccgcggctcaaccaccttgcaggagagccgagaggggctgcccgaggaggaggctccccggccccagctggacctgcaggcctccaaaaagctgccagatctctatggcaatccaccccaagagctcatcggagagcccctggaggacctggaccccttctatagcacccaaaagactttcatcgtactgaataaaggcaagaccatcttccggttcagtgccaccaacgccttgtatgtcctcagtcccttccaccccatccggagagcggctgtgaagattctggttcactcgctcttcaacatgctcatcatgtgcaccatcctcaccaactgcgtgttcatggcccagcacgaccctccaccctggaccaagtatgtcgagtacaccttcaccgccatttacacctttgagtctctggtcaagattctggctcgaggcttctgcctgcacgcgttcactttccttcgggacccatggaactggctggactttagtgtgattatcatggcatacacaactgaatttgtggacctgggcaatgtctcagccttacgcaccttccgagtcctccgggccctgaaaactatatcagtcatttcagggctgaagaccatcgtgggggccctgatccagtctgtgaagaagctggctgatgtgatggtcctcacagtcttctgcctcagcgtctttgccctcatcggcctgcagctcttcatgggcaacctaaggcacaagtgcgtgcgcaacttcacagcgctcaacggcaccaacggctccgtggaggccgacggcttggtctgggaatccctggacctttacctcagtgatccagaaaattacctgctcaagaacggcacctctgatgtgttactgtgtgggaacagctctgacgctgggacatgtccggagggctaccggtgcctaaaggcaggcgagaaccccgaccacggctacaccagcttcgattcctttgcctgggcctttcttgcactcttccgcctgatgacgcaggactgctgggagcgcctctatcagcagaccctcaggtccgcagggaagatctacatgatcttcttcatgcttgtcatcttcctggggtccttctacctggtgaacctgatcctggccgtggtcgcaatggcctatgaggagcaaaaccaagccaccatcgctgagaccgaggagaaggaaaagcgcttccaggaggccatggaaatgctcaagaaagaacacgaggccctcaccatcaggggtgtggataccgtgtcccgtagctccttggagatgtcccctttggccccagtaaacagccatgagagaagaagcaagaggagaaaacggatgtcttcaggaactgaggagtgtggggaggacaggctccccaagtctgactcagaagatggtcccagagcaatgaatcatctcagcctcacccgtggcctcagcaggacttctatgaagccacgttccagccgcgggagcattttcacctttcgcaggcgagacctgggttctgaagcagattttgcagatgatgaaaacagcacagcgggggagagcgagagccaccacacatcactgctggtgccctggcccctgcgccggaccagtgcccagggacagcccagtcccggaacctcggctcctggccacgccctccatggcaaaaagaacagcactgtggactgcaatggggtggtctcattactgggggcaggcgacccagaggccacatccccaggaagccacctcctccgccctgtgatgctagagcacccgccagacacgaccacgccatcggaggagccaggcgggccccagatgctgacctcccaggctccgtgtgtagatggcttcgaggagccaggagcacggcagcgggccctcagcgcagtcagcgtcctcaccagcgcactggaagagttagaggagtctcgccacaagtgtccaccatgctggaaccgtctcgcccagcgctacctgatctgggagtgctgcccgctgtggatgtccatcaagcagggagtgaagttggtggtcatggacccgtttactgacctcaccatcactatgtgcatcgtactcaacacactcttcatggcgctggagcactacaacatgacaagtgaattcgaggagatgctgcaggtcggaaacctggtcttcacagggattttcacagcagagatgaccttcaagatcattgccctcgacccctactactacttccaacagggctggaacatcttcgacagcatcatcgtcatccttagcctcatggagctgggcctgtcccgcatgagcaacttgtcggtgctgcgctccttccgcctgctgcgggtcttcaagctggccaaatcatggcccaccctgaacacactcatcaagatcatcgggaactcagtgggggcactggggaacctgacactggtgctagccatcatcgtgttcatctttgctgtggtgggcatgcagctctttggcaagaactactcggagctgagggacagcgactcaggcctgctgcctcgctggcacatgatggacttctttcatgccttcctcatcatcttccgcatcctctgtggagagtggatcgagaccatgtgggactgcatggaggtgtcggggcagtcattatgcctgctggtcttcttgcttgttatggtcattggcaaccttgtggtcctgaatctcttcctggccttgctgctcagctccttcagtgcagacaacctcacagcccctgatgaggacagagagatgaacaacctccagctggccctggcccgcatccagaggggcctgcgctttgtcaagcggaccacctgggatttctgctgtggtctcctgcggcagcggcctcagaagcccgcagcccttgccgcccagggccagctgcccagctgcattgccaccccctactccccgccacccccagagacggagaaggtgcctcccacccgcaaggaaacacggtttgaggaaggcgagcaaccaggccagggcacccccggggatccagagcccgtgtgtgtgcccatcgctgtggccgagtcagacacagatgaccaagaagaagatgaggagaacagcctgggcacggaggaggagtccagcaagcaggaatcccagcctgtgtccggtggcccagaggcccctccggattccaggacctggagccaggtgtcagcgactgcctcctctgaggccgaggccagtgcatctcaggccgactggcggcagcagtggaaagcggaaccccaggccccagggtgcggtgagaccccagaggacagttgctccgagggcagcacagcagacatgaccaacaccgctgagctcctggagcagatccctgacctcggccaggatgtcaaggacccagaggactgcttcactgaaggctgtgtccggcgctgtccctgctgtgcggtggacaccacacaggccccagggaaggtctggtggcggttgcgcaagacctgctaccacatcgtggagcacagctggttcgagacattcatcatcttcatgatcctactcagcagtggagcgctggccttcgaggacatctacctagaggagcggaagaccatcaaggttctgcttgagtatgccgacaagatgttcacatatgtcttcgtgctggagatgctgctcaagtgggtggcctacggcttcaagaagtacttcaccaatgcctggtgctggctcgacttcctcatcgtagacgtctctctggtcagcctggtggccaacaccctgggctttgccgagatgggccccatcaagtcactgcggacgctgcgtgcactccgtcctctgagagctctgtcacgatttgagggcatgagggtggtggtcaatgccctggtgggcgccatcccgtccatcatgaacgtcctcctcgtctgcctcatcttctggctcatcttcagcatcatgggcgtgaacctctttgcggggaagtttgggaggtgcatcaaccagacagagggagacttgcctttgaactacaccatcgtgaacaacaagagccagtgtgagtccttgaacttgaccggagaattgtactggaccaaggtgaaagtcaactttgacaacgtgggggccgggtacctggcccttctgcaggtggcaacatttaaaggctggatggacattatgtatgcagctgtggactccagggggtatgaagagcagcctcagtgggaatacaacctctacatgtacatctattttgtcattttcatcatctttgggtctttcttcaccctgaacctctttattggtgtcatcattgacaacttcaaccaacagaagaaaaagttagggggccaggacatcttcatgacagaggagcagaagaagtactacaatgccatgaagaagctgggctccaagaagccccagaagcccatcccacggcccctgaacaagtaccagggcttcatattcgacattgtgaccaagcaggcctttgacgtcaccatcatgtttctgatctgcttgaatatggtgaccatgatggtggagacagatgaccaaagtcctgagaaaatcaacatcttggccaagatcaacctgctctttgtggccatcttcacaggcgagtgtattgtcaagctggctgccctgcgccactactacttcaccaacagctggaatatcttcgacttcgtggttgtcatcctctccatcgtgggcactgtgctctcggacatcatccagaagtacttcttctccccgacgctcttccgagtcatccgcctggcccgaataggccgcatcctcagactgatccgaggggccaaggggatccgcacgctgctctttgccctcatgatgtccctgcctgccctcttcaacatcgggctgctgctcttcctcgtcatgttcatctactccatctttggcatggccaacttcgcttatgtcaagtgggaggctggcatcgacgacatgttcaacttccagaccttcgccaacagcatgctgtgcctcttccagatcaccacgtcggccggctgggatggcctcctcagccccatcctcaacactgggccgccctactgcgaccccactctgcccaacagcaatggctctcggggggactgcgggagcccagccgtgggcatcctcttcttcaccacctacatcatcatctccttcctcatcgtggtcaacatgtacattgccatcatcctggagaacttcagcgtggccacggaggagagcaccgagcccctgagtgaggacgacttcgatatgttctatgagatctgggagaaatttgacccagaggccactcagtttattgagtattcggtcctgtctgactttgccgatgccctgtctgagccactccgtatcgccaagcccaaccagataagcctcatcaacatggacctgcccatggtgagtggggaccgcatccattgcatggacattctctttgccttcaccaaaagggtcctgggggagtctggggagatggacgccctgaagatccagatggaggagaagttcatggcagccaacccatccaagatctcctacgagcccatcaccaccacactccggcgcaagcacgaagaggtgtcggccatggttatccagagagccttccgcaggcacctgctgcaacgctctttgaagcatgcctccttcctcttccgtcagcaggcgggcagcggcctctccgaagaggatgcccctgagcgagagggcctcatcgcctacgtgatgagtgagaacttctcccgaccccttggcccaccctccagctcctccatctcctccacttccttcccaccctcctatgacagtgtcactagagccaccagcgataacctccaggtgcgggggtctgactacagccacagtgaagatctcgccgacttccccccttctccggacagggaccgtgagtccatcgtgtgagcctcggcctggctggccaggacacactgaaaagcagcctttttcaccatggcaaacctaaatgcagtcagtcacaaaccagcctggggccttcctggctttgggagtaagaaatgggcctcagccccgcggatcaaccaggcagagttctgtggcgccgcgtggacagccggagcagttggcctgtgcttggaggcctcagatagacctgtgacctggtctggtcaggcaatgccctgcggctctggaaagcaacttcatcccagctgctgaggcgaaatataaaactgagactgtatatgttgtgaatgggctttcataaatttattatatttgatatttttttacttgagcaaagaactaaggatttttccatggacatgggcagcaattcacgctgtctcttcttaaccctgaacaagagtgtctatggagcagccggaagtctgttctcaaagcagaagtggaatccagtgtggctcccacaggtcttcactgcccaggggtcgaatggggtccccctcccacttgacctgagatgctgggagggctgaacccccactcacacaagcacacacacacagtcctcacacacggaggccagacacaggccgtgggacccaggctcccagcctaagggagacaggcctttccctgccggccccccaaggatggggttcttgtccacggggctcactctggccccctattgtctccaaggtcccattttccccctgtgttttcacgcaggtcatattgtcagtcctacaaaaataaaaggcttccagaggagagtggcctgggtcccagggctggccctaggcactgatagttgccttttcttcccctcctgtaagagtattaacaaaaccaaaggacacaagggtgcaagccccattcacggcctggcatgcagcttgtccttgctcctggaacctggcaggccctgcccagccagccatcggaagagagggctgagccatgggggtttggggctaagaagttcaccagccctgagccatggcggcccctcagcctgcctgaagagaggaaactggcgatctcccagggctctctggaccatacgcggaggagttttctgtgtggtctccagctcctctccagacacagagacatgggagtggggagcggagcttggccctgcgccctgtgcagggaaagggatggtcaggcccagttctcgtgcccttagaggggaatgaaccatggcacctttgagagagggggcactgtggtcaggcccagcctctctggctcagcccgggatcctgatggcacccacacagaggacctctttggggcaagatccaggtggtcccataggtcttgtgaaaaggctttttcagggaaaaatattttactagtccaatcacccccaggacctcttcagctgctgacaatcctatttagcatatgcaaatcttttaacatagagaactgtcaccctgaggtaacagggtcaactggcgaagcctgagcaggcaggggcttggctgccccattccagctctcccatggagcccctccaccgggcgcatgcctcccaggccacctcagtctcacctgccggctctgggctggctgctcctaacctacctcgccgagctgtcggagggctggacatttgtggcagtgctgaagggggcattgccggcgagtaaagtattatgtttcttcttgtcaccccagttcccttggtggcaaccccagacccaacccatgcccctgacagatctagttctcttctcctgtgttccctttgagtccagtgtgggacacggtttaactgtcccagcgacatttctccaagtggaaatcctatttttgtagatctccatgctttgctctcaaggcttggagaggtatgtgcccctcctgggtgctcaccgcctgctacacaggcaggaatgcggttgggaggcaggtcgggctgccagcccagctggccggaaggagactgtggtttttgtgtgtgtggacagcccgggagctttgagacaggtgcctggggctggctgcagacggtgtggttgggggtgggaggtgagctagacccaacccttagcttttagcctggctgtcacctttttaatttccagaactgcacaatgaccagcaggagggaaggacagacatcaagtgccagatgttgtctgaactaatcgagcacttctcaccaaacttcatgtataaataaaatacatatttttaaaacaaaccaataaatggcttacatga

SEQ ID NO: 28469 - DNA, 5898 bp, Homo sapiens
  source 1..5898: mol_type = unassigned DNA
gatgagaagatggcaaacttcctattacctcggggcaccagcagcttccgcaggttcacacgggagtccctggcagccatcgagaagcgcatggcagagaagcaagcccgcggctcaaccaccttgcaggagagccgagaggggctgcccgaggaggaggctccccggccccagctggacctgcaggcctccaaaaagctgccagatctctatggcaatccaccccaagagctcatcggagagcccctggaggacctggaccccttctatagcacccaaaagactttcatcgtactgaataaaggcaagaccatcttccggttcagtgccaccaacgccttgtatgtcctcagtcccttccaccccatccggagagcggctgtgaagattctggttcactcgctcttcaacatgctcatcatgtgcaccatcctcaccaactgcgtgttcatggcccagcacgaccctccaccctggaccaagtatgtcgagtacaccttcaccgccatttacacctttgagtctctggtcaagattctggctcgaggcttctgcctgcacgcgttcactttccttcgggacccatggaactggctggactttagtgtgattatcatggcatacacaactgaatttgtggacctgggcaatgtctcagccttacgcaccttccgagtcctccgggccctgaaaactatatcagtcatttcagggctgaagaccatcgtgggggccctgatccagtctgtgaagaagctggctgatgtgatggtcctcacagtcttctgcctcagcgtctttgccctcatcggcctgcagctcttcatgggcaacctaaggcacaagtgcgtgcgcaacttcacagcgctcaacggcaccaacggctccgtggaggccgacggcttggtctgggaatccctggacctttacctcagtgatccagaaaattacctgctcaagaacggcacctctgatgtgttactgtgtgggaacagctctgacgctgggacatgtccggagggctaccggtgcctaaaggcaggcgagaaccccgaccacggctacaccagcttcgattcctttgcctgggcctttcttgcactcttccgcctgatgacgcaggactgctgggagcgcctctatcagcagaccctcaggtccgcagggaagatctacatgatcttcttcatgcttgtcatcttcctggggtccttctacctggtgaacctgatcctggccgtggtcgcaatggcctatgaggagcaaaaccaagccaccatcgctgagaccgaggagaaggaaaagcgcttccaggaggccatggaaatgctcaagaaagaacacgaggccctcaccatcaggggtgtggataccgtgtcccgtagctccttggagatgtcccctttggccccagtaaacagccatgagagaagaagcaagaggagaaaacggatgtcttcaggaactgaggagtgtggggaggacaggctccccaagtctgactcagaagatggtcccagagcaatgaatcatctcagcctcacccgtggcctcagcaggacttctatgaagccacgttccagccgcgggagcattttcacctttcgcaggcgagacctgggttctgaagcagattttgcagatgatgaaaacagcacagcgggggagagcgagagccaccacacatcactgctggtgccctggcccctgcgccggaccagtgcccagggacagcccagtcccggaacctcggctcctggccacgccctccatggcaaaaagaacagcactgtggactgcaatggggtggtctcattactgggggcaggcgacccagaggccacatccccaggaagccacctcctccgccctgtgatgctagagcacccgccagacacgaccacgccatcggaggagccaggcgggccccagatgctgacctcccaggctccgtgtgtagatggcttcgaggagccaggagcacggcagcgggccctcagcgcagtcagcgtcctcaccagcgcactggaagagttagaggagtctcgccacaagtgtccaccatgctggaaccgtctcgcccagcgctacctgatctgggagtgctgcccgctgtggatgtccatcaagcagggagtgaagttggtggtcatggacccgtttactgacctcaccatcactatgtgcatcgtactcaacacactcttcatggcgctggagcactacaacatgacaagtgaattcgaggagatgctgcaggtcggaaacctggtcttcacagggattttcacagcagagatgaccttcaagatcattgccctcgacccctactactacttccaacagggctggaacatcttcgacagcatcatcgtcatccttagcctcatggagctgggcctgtcccgcatgagcaacttgtcggtgctgcgctccttccgcctgctgcgggtcttcaagctggccaaatcatggcccaccctgaacacactcatcaagatcatcgggaactcagtgggggcactggggaacctgacactggtgctagccatcatcgtgttcatctttgctgtggtgggcatgcagctctttggcaagaactactcggagctgagggacagcgactcaggcctgctgcctcgctggcacatgatggacttctttcatgccttcctcatcatcttccgcatcctctgtggagagtggatcgagaccatgtgggactgcatggaggtgtcggggcagtcattatgcctgctggtcttcttgcttgttatggtcattggcaaccttgtggtcctgaatctcttcctggccttgctgctcagctccttcagtgcagacaacctcacagcccctgatgaggacagagagatgaacaacctccagctggccctggcccgcatccagaggggcctgcgctttgtcaagcggaccacctgggatttctgctgtggtctcctgcggcagcggcctcagaagcccgcagcccttgccgcccagggccagctgcccagctgcattgccaccccctactccccgccacccccagagacggagaaggtgcctcccacccgcaaggaaacacggtttgaggaaggcgagcaaccaggccagggcacccccggggatccagagcccgtgtgtgtgcccatcgctgtggccgagtcagacacagatgaccaagaagaagatgaggagaacagcctgggcacggaggaggagtccagcaagcagaccccagaggacagttgctccgagggcagcacagcagacatgaccaacaccgctgagctcctggagcagatccctgacctcggccaggatgtcaaggacccagaggactgcttcactgaaggctgtgtccggcgctgtccctgctgtgcggtggacaccacacaggccccagggaaggtctggtggcggttgcgcaagacctgctaccacatcgtggagcacagctggttcgagacattcatcatcttcatgatcctactcagcagtggagcgctggccttcgaggacatctacctagaggagcggaagaccatcaaggttctgcttgagtatgccgacaagatgttcacatatgtcttcgtgctggagatgctgctcaagtgggtggcctacggcttcaagaagtacttcaccaatgcctggtgctggctcgacttcctcatcgtagacgtctctctggtcagcctggtggccaacaccctgggctttgccgagatgggccccatcaagtcactgcggacgctgcgtgcactccgtcctctgagagctctgtcacgatttgagggcatgagggtggtggtcaatgccctggtgggcgccatcccgtccatcatgaacgtcctcctcgtctgcctcatcttctggctcatcttcagcatcatgggcgtgaacctctttgcggggaagtttgggaggtgcatcaaccagacagagggagacttgcctttgaactacaccatcgtgaacaacaagagccagtgtgagtccttgaacttgaccggagaattgtactggaccaaggtgaaagtcaactttgacaacgtgggggccgggtacctggcccttctgcaggtggcaacatttaaaggctggatggacattatgtatgcagctgtggactccagggggtatgaagagcagcctcagtgggaatacaacctctacatgtacatctattttgtcattttcatcatctttgggtctttcttcaccctgaacctctttattggtgtcatcattgacaacttcaaccaacagaagaaaaagttagggggccaggacatcttcatgacagaggagcagaagaagtactacaatgccatgaagaagctgggctccaagaagccccagaagcccatcccacggcccctgaacaagtaccagggcttcatattcgacattgtgaccaagcaggcctttgacgtcaccatcatgtttctgatctgcttgaatatggtgaccatgatggtggagacagatgaccaaagtcctgagaaaatcaacatcttggccaagatcaacctgctctttgtggccatcttcacaggcgagtgtattgtcaagctggctgccctgcgccactactacttcaccaacagctggaatatcttcgacttcgtggttgtcatcctctccatcgtgggcactgtgctctcggacatcatccagaagtacttcttctccccgacgctcttccgagtcatccgcctggcccgaataggccgcatcctcagactgatccgaggggccaaggggatccgcacgctgctctttgccctcatgatgtccctgcctgccctcttcaacatcgggctgctgctcttcctcgtcatgttcatctactccatctttggcatggccaacttcgcttatgtcaagtgggaggctggcatcgacgacatgttcaacttccagaccttcgccaacagcatgctgtgcctcttccagatcaccacgtcggccggctgggatggcctcctcagccccatcctcaacactgggccgccctactgcgaccccactctgcccaacagcaatggctctcggggggactgcgggagcccagccgtgggcatcctcttcttcaccacctacatcatcatctccttcctcatcgtggtcaacatgtacattgccatcatcctggagaacttcagcgtggccacggaggagagcaccgagcccctgagtgaggacgacttcgatatgttctatgagatctgggagaaatttgacccagaggccactcagtttattgagtattcggtcctgtctgactttgccgatgccctgtctgagccactccgtatcgccaagcccaaccagataagcctcatcaacatggacctgcccatggtgagtggggaccgcatccattgcatggacattctctttgccttcaccaaaagggtcctgggggagtctggggagatggacgccctgaagatccagatggaggagaagttcatggcagccaacccatccaagatctcctacgagcccatcaccaccacactccggcgcaagcacgaagaggtgtcggccatggttatccagagagccttccgcaggcacctgctgcaacgctctttgaagcatgcctccttcctcttccgtcagcaggcgggcagcggcctctccgaagaggatgcccctgagcgagagggcctcatcgcctacgtgatgagtgagaacttctcccgaccccttggcccaccctccagctcctccatctcctccacttccttcccaccctcctatgacagtgtcactagagccaccagcgataacctccaggtgcgggggtctgactacagccacagtgaagatctcgccgacttccccccttctccggacagggaccgtgagtccatcgtgtga

SEQ ID NO: 28470 - DNA, 6284 bp, Homo sapiens
  source 1..6284: mol_type = unassigned DNA
ggcaacgtgaggagagcctgtgcccagaagcaggatgagaagatggcaaacttcctattacctcggggcaccagcagcttccgcaggttcacacgggagtccctggcagccatcgagaagcgcatggcagagaagcaagcccgcggctcaaccaccttgcaggagagccgagaggggctgcccgaggaggaggctccccggccccagctggacctgcaggcctccaaaaagctgccagatctctatggcaatccaccccaagagctcatcggagagcccctggaggacctggaccccttctatagcacccaaaagactttcatcgtactgaataaaggcaagaccatcttccggttcagtgccaccaacgccttgtatgtcctcagtcccttccaccccatccggagagcggctgtgaagattctggttcactcgctcttcaacatgctcatcatgtgcaccatcctcaccaactgcgtgttcatggcccagcacgaccctccaccctggaccaagtatgtcgagtacaccttcaccgccatttacacctttgagtctctggtcaagattctggctcgaggcttctgcctgcacgcgttcactttccttcgggacccatggaactggctggactttagtgtgattatcatggcgtatgtatcagaaaatataaaactaggcaatttgtcggctcttcgaactttcagagtcctgagagctctaaaaactatttcagttatcccagggctgaagaccatcgtgggggccctgatccagtctgtgaagaagctggctgatgtgatggtcctcacagtcttctgcctcagcgtctttgccctcatcggcctgcagctcttcatgggcaacctaaggcacaagtgcgtgcgcaacttcacagcgctcaacggcaccaacggctccgtggaggccgacggcttggtctgggaatccctggacctttacctcagtgatccagaaaattacctgctcaagaacggcacctctgatgtgttactgtgtgggaacagctctgacgctgggacatgtccggagggctaccggtgcctaaaggcaggcgagaaccccgaccacggctacaccagcttcgattcctttgcctgggcctttcttgcactcttccgcctgatgacgcaggactgctgggagcgcctctatcagcagaccctcaggtccgcagggaagatctacatgatcttcttcatgcttgtcatcttcctggggtccttctacctggtgaacctgatcctggccgtggtcgcaatggcctatgaggagcaaaaccaagccaccatcgctgagaccgaggagaaggaaaagcgcttccaggaggccatggaaatgctcaagaaagaacacgaggccctcaccatcaggggtgtggataccgtgtcccgtagctccttggagatgtcccctttggccccagtaaacagccatgagagaagaagcaagaggagaaaacggatgtcttcaggaactgaggagtgtggggaggacaggctccccaagtctgactcagaagatggtcccagagcaatgaatcatctcagcctcacccgtggcctcagcaggacttctatgaagccacgttccagccgcgggagcattttcacctttcgcaggcgagacctgggttctgaagcagattttgcagatgatgaaaacagcacagcgggggagagcgagagccaccacacatcactgctggtgccctggcccctgcgccggaccagtgcccagggacagcccagtcccggaacctcggctcctggccacgccctccatggcaaaaagaacagcactgtggactgcaatggggtggtctcattactgggggcaggcgacccagaggccacatccccaggaagccacctcctccgccctgtgatgctagagcacccgccagacacgaccacgccatcggaggagccaggcgggccccagatgctgacctcccaggctccgtgtgtagatggcttcgaggagccaggagcacggcagcgggccctcagcgcagtcagcgtcctcaccagcgcactggaagagttagaggagtctcgccacaagtgtccaccatgctggaaccgtctcgcccagcgctacctgatctgggagtgctgcccgctgtggatgtccatcaagcagggagtgaagttggtggtcatggacccgtttactgacctcaccatcactatgtgcatcgtactcaacacactcttcatggcgctggagcactacaacatgacaagtgaattcgaggagatgctgcaggtcggaaacctggtcttcacagggattttcacagcagagatgaccttcaagatcattgccctcgacccctactactacttccaacagggctggaacatcttcgacagcatcatcgtcatccttagcctcatggagctgggcctgtcccgcatgagcaacttgtcggtgctgcgctccttccgcctgctgcgggtcttcaagctggccaaatcatggcccaccctgaacacactcatcaagatcatcgggaactcagtgggggcactggggaacctgacactggtgctagccatcatcgtgttcatctttgctgtggtgggcatgcagctctttggcaagaactactcggagctgagggacagcgactcaggcctgctgcctcgctggcacatgatggacttctttcatgccttcctcatcatcttccgcatcctctgtggagagtggatcgagaccatgtgggactgcatggaggtgtcggggcagtcattatgcctgctggtcttcttgcttgttatggtcattggcaaccttgtggtcctgaatctcttcctggccttgctgctcagctccttcagtgcagacaacctcacagcccctgatgaggacagagagatgaacaacctccagctggccctggcccgcatccagaggggcctgcgctttgtcaagcggaccacctgggatttctgctgtggtctcctgcggcagcggcctcagaagcccgcagcccttgccgcccagggccagctgcccagctgcattgccaccccctactccccgccacccccagagacggagaaggtgcctcccacccgcaaggaaacacggtttgaggaaggcgagcaaccaggccagggcacccccggggatccagagcccgtgtgtgtgcccatcgctgtggccgagtcagacacagatgaccaagaagaagatgaggagaacagcctgggcacggaggaggagtccagcaagcagaccccagaggacagttgctccgagggcagcacagcagacatgaccaacaccgctgagctcctggagcagatccctgacctcggccaggatgtcaaggacccagaggactgcttcactgaaggctgtgtccggcgctgtccctgctgtgcggtggacaccacacaggccccagggaaggtctggtggcggttgcgcaagacctgctaccacatcgtggagcacagctggttcgagacattcatcatcttcatgatcctactcagcagtggagcgctggccttcgaggacatctacctagaggagcggaagaccatcaaggttctgcttgagtatgccgacaagatgttcacatatgtcttcgtgctggagatgctgctcaagtgggtggcctacggcttcaagaagtacttcaccaatgcctggtgctggctcgacttcctcatcgtagacgtctctctggtcagcctggtggccaacaccctgggctttgccgagatgggccccatcaagtcactgcggacgctgcgtgcactccgtcctctgagagctctgtcacgatttgagggcatgagggtggtggtcaatgccctggtgggcgccatcccgtccatcatgaacgtcctcctcgtctgcctcatcttctggctcatcttcagcatcatgggcgtgaacctctttgcggggaagtttgggaggtgcatcaaccagacagagggagacttgcctttgaactacaccatcgtgaacaacaagagccagtgtgagtccttgaacttgaccggagaattgtactggaccaaggtgaaagtcaactttgacaacgtgggggccgggtacctggcccttctgcaggtggcaacatttaaaggctggatggacattatgtatgcagctgtggactccagggggtatgaagagcagcctcagtgggaatacaacctctacatgtacatctattttgtcattttcatcatctttgggtctttcttcaccctgaacctctttattggtgtcatcattgacaacttcaaccaacagaagaaaaagttagggggccaggacatcttcatgacagaggagcagaagaagtactacaatgccatgaagaagctgggctccaagaagccccagaagcccatcccacggcccctgaacaagtaccagggcttcatattcgacattgtgaccaagcaggcctttgacgtcaccatcatgtttctgatctgcttgaatatggtgaccatgatggtggagacagatgaccaaagtcctgagaaaatcaacatcttggccaagatcaacctgctctttgtggccatcttcacaggcgagtgtattgtcaagctggctgccctgcgccactactacttcaccaacagctggaatatcttcgacttcgtggttgtcatcctctccatcgtgggcactgtgctctcggacatcatccagaagtacttcttctccccgacgctcttccgagtcatccgcctggcccgaataggccgcatcctcagactgatccgaggggccaaggggatccgcacgctgctctttgccctcatgatgtccctgcctgccctcttcaacatcgggctgctgctcttcctcgtcatgttcatctactccatctttggcatggccaacttcgcttatgtcaagtgggaggctggcatcgacgacatgttcaacttccagaccttcgccaacagcatgctgtgcctcttccagatcaccacgtcggccggctgggatggcctcctcagccccatcctcaacactgggccgccctactgcgaccccactctgcccaacagcaatggctctcggggggactgcgggagcccagccgtgggcatcctcttcttcaccacctacatcatcatctccttcctcatcgtggtcaacatgtacattgccatcatcctggagaacttcagcgtggccacggaggagagcaccgagcccctgagtgaggacgacttcgatatgttctatgagatctgggagaaatttgacccagaggccactcagtttattgagtattcggtcctgtctgactttgccgatgccctgtctgagccactccgtatcgccaagcccaaccagataagcctcatcaacatggacctgcccatggtgagtggggaccgcatccattgcatggacattctctttgccttcaccaaaagggtcctgggggagtctggggagatggacgccctgaagatccagatggaggagaagttcatggcagccaacccatccaagatctcctacgagcccatcaccaccacactccggcgcaagcacgaagaggtgtcggccatggttatccagagagccttccgcaggcacctgctgcaacgctctttgaagcatgcctccttcctcttccgtcagcaggcgggcagcggcctctccgaagaggatgcccctgagcgagagggcctcatcgcctacgtgatgagtgagaacttctcccgaccccttggcccaccctccagctcctccatctcctccacttccttcccaccctcctatgacagtgtcactagagccaccagcgataacctccaggtgcgggggtctgactacagccacagtgaagatctcgccgacttccccccttctccggacagggaccgtgagtccatcgtgtgagcctcggcctggctggccaggacacactgaaaagcagcctttttcaccatggcaaacctaaatgcagtcagtcacaaaccagcctggggccttcctggctttgggagtaagaaatgggcctcagccccgcggatcaaccaggcagagttctgtggcgccgcgtggacagccggagcagttggcctgtgcttggaggcctcagatagacctgtgacctggtctggtcaggcaatgccctgcggctctggaaagcaacttcatcccagctgctgaggcgaaatataaaactgagactgtatatgttgtgaatgggctttcataaatttattatatttgatatttttttacttgag

SEQ ID NO: 28471 - DNA, 8343 bp, Homo sapiens
  source 1..8343: mol_type = unassigned DNA
gagacggcggcggcgcccgtaggatgcagggatcgctcccccggggccgctgagcctgcgcccagtgccccgagccccgcgccgagccgagtccgcgccaagcagcagccgcccaccccggggcccggccgggggaccagcagcttccccacaggcaacgtgaggagagcctgtgcccagaagcaggatgagaagatggcaaacttcctattacctcggggcaccagcagcttccgcaggttcacacgggagtccctggcagccatcgagaagcgcatggcagagaagcaagcccgcggctcaaccaccttgcaggagagccgagaggggctgcccgaggaggaggctccccggccccagctggacctgcaggcctccaaaaagctgccagatctctatggcaatccaccccaagagctcatcggagagcccctggaggacctggaccccttctatagcacccaaaagactttcatcgtactgaataaaggcaagaccatcttccggttcagtgccaccaacgccttgtatgtcctcagtcccttccaccccatccggagagcggctgtgaagattctggttcactcgctcttcaacatgctcatcatgtgcaccatcctcaccaactgcgtgttcatggcccagcacgaccctccaccctggaccaagtatgtcgagtacaccttcaccgccatttacacctttgagtctctggtcaagattctggctcgaggcttctgcctgcacgcgttcactttccttcgggacccatggaactggctggactttagtgtgattatcatggcgtatgtatcagaaaatataaaactaggcaatttgtcggctcttcgaactttcagagtcctgagagctctaaaaactatttcagttatcccagggctgaagaccatcgtgggggccctgatccagtctgtgaagaagctggctgatgtgatggtcctcacagtcttctgcctcagcgtctttgccctcatcggcctgcagctcttcatgggcaacctaaggcacaagtgcgtgcgcaacttcacagcgctcaacggcaccaacggctccgtggaggccgacggcttggtctgggaatccctggacctttacctcagtgatccagaaaattacctgctcaagaacggcacctctgatgtgttactgtgtgggaacagctctgacgctgggacatgtccggagggctaccggtgcctaaaggcaggcgagaaccccgaccacggctacaccagcttcgattcctttgcctgggcctttcttgcactcttccgcctgatgacgcaggactgctgggagcgcctctatcagcagaccctcaggtccgcagggaagatctacatgatcttcttcatgcttgtcatcttcctggggtccttctacctggtgaacctgatcctggccgtggtcgcaatggcctatgaggagcaaaaccaagccaccatcgctgagaccgaggagaaggaaaagcgcttccaggaggccatggaaatgctcaagaaagaacacgaggccctcaccatcaggggtgtggataccgtgtcccgtagctccttggagatgtcccctttggccccagtaaacagccatgagagaagaagcaagaggagaaaacggatgtcttcaggaactgaggagtgtggggaggacaggctccccaagtctgactcagaagatggtcccagagcaatgaatcatctcagcctcacccgtggcctcagcaggacttctatgaagccacgttccagccgcgggagcattttcacctttcgcaggcgagacctgggttctgaagcagattttgcagatgatgaaaacagcacagcgggggagagcgagagccaccacacatcactgctggtgccctggcccctgcgccggaccagtgcccagggacagcccagtcccggaacctcggctcctggccacgccctccatggcaaaaagaacagcactgtggactgcaatggggtggtctcattactgggggcaggcgacccagaggccacatccccaggaagccacctcctccgccctgtgatgctagagcacccgccagacacgaccacgccatcggaggagccaggcgggccccagatgctgacctcccaggctccgtgtgtagatggcttcgaggagccaggagcacggcagcgggccctcagcgcagtcagcgtcctcaccagcgcactggaagagttagaggagtctcgccacaagtgtccaccatgctggaaccgtctcgcccagcgctacctgatctgggagtgctgcccgctgtggatgtccatcaagcagggagtgaagttggtggtcatggacccgtttactgacctcaccatcactatgtgcatcgtactcaacacactcttcatggcgctggagcactacaacatgacaagtgaattcgaggagatgctgcaggtcggaaacctggtcttcacagggattttcacagcagagatgaccttcaagatcattgccctcgacccctactactacttccaacagggctggaacatcttcgacagcatcatcgtcatccttagcctcatggagctgggcctgtcccgcatgagcaacttgtcggtgctgcgctccttccgcctgctgcgggtcttcaagctggccaaatcatggcccaccctgaacacactcatcaagatcatcgggaactcagtgggggcactggggaacctgacactggtgctagccatcatcgtgttcatctttgctgtggtgggcatgcagctctttggcaagaactactcggagctgagggacagcgactcaggcctgctgcctcgctggcacatgatggacttctttcatgccttcctcatcatcttccgcatcctctgtggagagtggatcgagaccatgtgggactgcatggaggtgtcggggcagtcattatgcctgctggtcttcttgcttgttatggtcattggcaaccttgtggtcctgaatctcttcctggccttgctgctcagctccttcagtgcagacaacctcacagcccctgatgaggacagagagatgaacaacctccagctggccctggcccgcatccagaggggcctgcgctttgtcaagcggaccacctgggatttctgctgtggtctcctgcggcagcggcctcagaagcccgcagcccttgccgcccagggccagctgcccagctgcattgccaccccctactccccgccacccccagagacggagaaggtgcctcccacccgcaaggaaacacggtttgaggaaggcgagcaaccaggccagggcacccccggggatccagagcccgtgtgtgtgcccatcgctgtggccgagtcagacacagatgaccaagaagaagatgaggagaacagcctgggcacggaggaggagtccagcaagcagaccccagaggacagttgctccgagggcagcacagcagacatgaccaacaccgctgagctcctggagcagatccctgacctcggccaggatgtcaaggacccagaggactgcttcactgaaggctgtgtccggcgctgtccctgctgtgcggtggacaccacacaggccccagggaaggtctggtggcggttgcgcaagacctgctaccacatcgtggagcacagctggttcgagacattcatcatcttcatgatcctactcagcagtggagcgctggccttcgaggacatctacctagaggagcggaagaccatcaaggttctgcttgagtatgccgacaagatgttcacatatgtcttcgtgctggagatgctgctcaagtgggtggcctacggcttcaagaagtacttcaccaatgcctggtgctggctcgacttcctcatcgtagacgtctctctggtcagcctggtggccaacaccctgggctttgccgagatgggccccatcaagtcactgcggacgctgcgtgcactccgtcctctgagagctctgtcacgatttgagggcatgagggtggtggtcaatgccctggtgggcgccatcccgtccatcatgaacgtcctcctcgtctgcctcatcttctggctcatcttcagcatcatgggcgtgaacctctttgcggggaagtttgggaggtgcatcaaccagacagagggagacttgcctttgaactacaccatcgtgaacaacaagagccagtgtgagtccttgaacttgaccggagaattgtactggaccaaggtgaaagtcaactttgacaacgtgggggccgggtacctggcccttctgcaggtggcaacatttaaaggctggatggacattatgtatgcagctgtggactccagggggtatgaagagcagcctcagtgggaatacaacctctacatgtacatctattttgtcattttcatcatctttgggtctttcttcaccctgaacctctttattggtgtcatcattgacaacttcaaccaacagaagaaaaagttagggggccaggacatcttcatgacagaggagcagaagaagtactacaatgccatgaagaagctgggctccaagaagccccagaagcccatcccacggcccctgaacaagtaccagggcttcatattcgacattgtgaccaagcaggcctttgacgtcaccatcatgtttctgatctgcttgaatatggtgaccatgatggtggagacagatgaccaaagtcctgagaaaatcaacatcttggccaagatcaacctgctctttgtggccatcttcacaggcgagtgtattgtcaagctggctgccctgcgccactactacttcaccaacagctggaatatcttcgacttcgtggttgtcatcctctccatcgtgggcactgtgctctcggacatcatccagaagtacttcttctccccgacgctcttccgagtcatccgcctggcccgaataggccgcatcctcagactgatccgaggggccaaggggatccgcacgctgctctttgccctcatgatgtccctgcctgccctcttcaacatcgggctgctgctcttcctcgtcatgttcatctactccatctttggcatggccaacttcgcttatgtcaagtgggaggctggcatcgacgacatgttcaacttccagaccttcgccaacagcatgctgtgcctcttccagatcaccacgtcggccggctgggatggcctcctcagccccatcctcaacactgggccgccctactgcgaccccactctgcccaacagcaatggctctcggggggactgcgggagcccagccgtgggcatcctcttcttcaccacctacatcatcatctccttcctcatcgtggtcaacatgtacattgccatcatcctggagaacttcagcgtggccacggaggagagcaccgagcccctgagtgaggacgacttcgatatgttctatgagatctgggagaaatttgacccagaggccactcagtttattgagtattcggtcctgtctgactttgccgatgccctgtctgagccactccgtatcgccaagcccaaccagataagcctcatcaacatggacctgcccatggtgagtggggaccgcatccattgcatggacattctctttgccttcaccaaaagggtcctgggggagtctggggagatggacgccctgaagatccagatggaggagaagttcatggcagccaacccatccaagatctcctacgagcccatcaccaccacactccggcgcaagcacgaagaggtgtcggccatggttatccagagagccttccgcaggcacctgctgcaacgctctttgaagcatgcctccttcctcttccgtcagcaggcgggcagcggcctctccgaagaggatgcccctgagcgagagggcctcatcgcctacgtgatgagtgagaacttctcccgaccccttggcccaccctccagctcctccatctcctccacttccttcccaccctcctatgacagtgtcactagagccaccagcgataacctccaggtgcgggggtctgactacagccacagtgaagatctcgccgacttccccccttctccggacagggaccgtgagtccatcgtgtgagcctcggcctggctggccaggacacactgaaaagcagcctttttcaccatggcaaacctaaatgcagtcagtcacaaaccagcctggggccttcctggctttgggagtaagaaatgggcctcagccccgcggatcaaccaggcagagttctgtggcgccgcgtggacagccggagcagttggcctgtgcttggaggcctcagatagacctgtgacctggtctggtcaggcaatgccctgcggctctggaaagcaacttcatcccagctgctgaggcgaaatataaaactgagactgtatatgttgtgaatgggctttcataaatttattatatttgatatttttttacttgagcaaagaactaaggatttttccatggacatgggcagcaattcacgctgtctcttcttaaccctgaacaagagtgtctatggagcagccggaagtctgttctcaaagcagaagtggaatccagtgtggctcccacaggtcttcactgcccaggggtcgaatggggtccccctcccacttgacctgagatgctgggagggctgaacccccactcacacaagcacacacacacagtcctcacacacggaggccagacacaggccgtgggacccaggctcccagcctaagggagacaggcctttccctgccggccccccaaggatggggttcttgtccacggggctcactctggccccctattgtctccaaggtcccattttccccctgtgttttcacgcaggtcatattgtcagtcctacaaaaataaaaggcttccagaggagagtggcctgggtcccagggctggccctaggcactgatagttgccttttcttcccctcctgtaagagtattaacaaaaccaaaggacacaagggtgcaagccccattcacggcctggcatgcagcttgtccttgctcctggaacctggcaggccctgcccagccagccatcggaagagagggctgagccatgggggtttggggctaagaagttcaccagccctgagccatggcggcccctcagcctgcctgaagagaggaaactggcgatctcccagggctctctggaccatacgcggaggagttttctgtgtggtctccagctcctctccagacacagagacatgggagtggggagcggagcttggccctgcgccctgtgcagggaaagggatggtcaggcccagttctcgtgcccttagaggggaatgaaccatggcacctttgagagagggggcactgtggtcaggcccagcctctctggctcagcccgggatcctgatggcacccacacagaggacctctttggggcaagatccaggtggtcccataggtcttgtgaaaaggctttttcagggaaaaatattttactagtccaatcacccccaggacctcttcagctgctgacaatcctatttagcatatgcaaatcttttaacatagagaactgtcaccctgaggtaacagggtcaactggcgaagcctgagcaggcaggggcttggctgccccattccagctctcccatggagcccctccaccgggcgcatgcctcccaggccacctcagtctcacctgccggctctgggctggctgctcctaacctacctcgccgagctgtcggagggctggacatttgtggcagtgctgaagggggcattgccggcgagtaaagtattatgtttcttcttgtcaccccagttcccttggtggcaaccccagacccaacccatgcccctgacagatctagttctcttctcctgtgttccctttgagtccagtgtgggacacggtttaactgtcccagcgacatttctccaagtggaaatcctatttttgtagatctccatgctttgctctcaaggcttggagaggtatgtgcccctcctgggtgctcaccgcctgctacacaggcaggaatgcggttgggaggcaggtcgggctgccagcccagctggccggaaggagactgtggtttttgtgtgtgtggacagcccgggagctttgagacaggtgcctggggctggctgcagacggtgtggttgggggtgggaggtgagctagacccaacccttagcttttagcctggctgtcacctttttaatttccagaactgcacaatgaccagcaggagggaaggacagacatcaagtgccagatgttgtctgaactaatcgagcacttctcaccaaacttcatgtataaataaaatacatatttttaaaacaaaccaataaatggcttacatga

SEQ ID NO: 28472 - DNA, 7170 bp, Homo sapiens
  source 1..7170: mol_type = unassigned DNA
ctgtgcccagaagcaggatgagaagatggcaaacttcctattacctcggggcaccagcagcttccgcaggttcacacgggagtccctggcagccatcgagaagcgcatggcagagaagcaagcccgcggctcaaccaccttgcaggagagccgagaggggctgcccgaggaggaggctccccggccccagctggacctgcaggcctccaaaaagctgccagatctctatggcaatccaccccaagagctcatcggagagcccctggaggacctggaccccttctatagcacccaaaagactttcatcgtactgaataaaggcaagaccatcttccggttcagtgccaccaacgccttgtatgtcctcagtcccttccaccccatccggagagcggctgtgaagattctggttcactcgctcttcaacatgctcatcatgtgcaccatcctcaccaactgcgtgttcatggcccagcacgaccctccaccctggaccaagtatgtcgagtacaccttcaccgccatttacacctttgagtctctggtcaagattctggctcgaggcttctgcctgcacgcgttcactttccttcgggacccatggaactggctggactttagtgtgattatcatggcgtatgtatcagaaaatataaaactaggcaatttgtcggctcttcgaactttcagagtcctgagagctctaaaaactatttcagttatcccagggctgaagaccatcgtgggggccctgatccagtctgtgaagaagctggctgatgtgatggtcctcacagtcttctgcctcagcgtctttgccctcatcggcctgcagctcttcatgggcaacctaaggcacaagtgcgtgcgcaacttcacagcgctcaacggcaccaacggctccgtggaggccgacggcttggtctgggaatccctggacctttacctcagtgatccagaaaattacctgctcaagaacggcacctctgatgtgttactgtgtgggaacagctctgacgctgggacatgtccggagggctaccggtgcctaaaggcaggcgagaaccccgaccacggctacaccagcttcgattcctttgcctgggcctttcttgcactcttccgcctgatgacgcaggactgctgggagcgcctctatcagcagaccctcaggtccgcagggaagatctacatgatcttcttcatgcttgtcatcttcctggggtccttctacctggtgaacctgatcctggccgtggtcgcaatggcctatgaggagcaaaaccaagccaccatcgctgagaccgaggagaaggaaaagcgcttccaggaggccatggaaatgctcaagaaagaacacgaggccctcaccatcaggggtgtggataccgtgtcccgtagctccttggagatgtcccctttggccccagtaaacagccatgagagaagaagcaagaggagaaaacggatgtcttcaggaactgaggagtgtggggaggacaggctccccaagtctgactcagaagatggtcccagagcaatgaatcatctcagcctcacccgtggcctcagcaggacttctatgaagccacgttccagccgcgggagcattttcacctttcgcaggcgagacctgggttctgaagcagattttgcagatgatgaaaacagcacagcgggggagagcgagagccaccacacatcactgctggtgccctggcccctgcgccggaccagtgcccagggacagcccagtcccggaacctcggctcctggccacgccctccatggcaaaaagaacagcactgtggactgcaatggggtggtctcattactgggggcaggcgacccagaggccacatccccaggaagccacctcctccgccctgtgatgctagagcacccgccagacacgaccacgccatcggaggagccaggcgggccccagatgctgacctcccaggctccgtgtgtagatggcttcgaggagccaggagcacggcagcgggccctcagcgcagtcagcgtcctcaccagcgcactggaagagttagaggagtctcgccacaagtgtccaccatgctggaaccgtctcgcccagcgctacctgatctgggagtgctgcccgctgtggatgtccatcaagcagggagtgaagttggtggtcatggacccgtttactgacctcaccatcactatgtgcatcgtactcaacacactcttcatggcgctggagcactacaacatgacaagtgaattcgaggagatgctgcaggtcggaaacctggtcttcacagggattttcacagcagagatgaccttcaagatcattgccctcgacccctactactacttccaacagggctggaacatcttcgacagcatcatcgtcatccttagcctcatggagctgggcctgtcccgcatgagcaacttgtcggtgctgcgctccttccgcctgctgcgggtcttcaagctggccaaatcatggcccaccctgaacacactcatcaagatcatcgggaactcagtgggggcactggggaacctgacactggtgctagccatcatcgtgttcatctttgctgtggtgggcatgcagctctttggcaagaactactcggagctgagggacagcgactcaggcctgctgcctcgctggcacatgatggacttctttcatgccttcctcatcatcttccgcatcctctgtggagagtggatcgagaccatgtgggactgcatggaggtgtcggggcagtcattatgcctgctggtcttcttgcttgttatggtcattggcaaccttgtggtcctgaatctcttcctggccttgctgctcagctccttcagtgcagacaacctcacagcccctgatgaggacagagagatgaacaacctccagctggccctggcccgcatccagaggggcctgcgctttgtcaagcggaccacctgggatttctgctgtggtctcctgcggcagcggcctcagaagcccgcagcccttgccgcccagggccagctgcccagctgcattgccaccccctactccccgccacccccagagacggagaaggtgcctcccacccgcaaggaaacacggtttgaggaaggcgagcaaccaggccagggcacccccggggatccagagcccgtgtgtgtgcccatcgctgtggccgagtcagacacagatgaccaagaagaagatgaggagaacagcctgggcacggaggaggagtccagcaagcaggaatcccagcctgtgtccggtggcccagaggcccctccggattccaggacctggagccaggtgtcagcgactgcctcctctgaggccgaggccagtgcatctcaggccgactggcggcagcagtggaaagcggaaccccaggccccagggtgcggtgagaccccagaggacagttgctccgagggcagcacagcagacatgaccaacaccgctgagctcctggagcagatccctgacctcggccaggatgtcaaggacccagaggactgcttcactgaaggctgtgtccggcgctgtccctgctgtgcggtggacaccacacaggccccagggaaggtctggtggcggttgcgcaagacctgctaccacatcgtggagcacagctggttcgagacattcatcatcttcatgatcctactcagcagtggagcgctggccttcgaggacatctacctagaggagcggaagaccatcaaggttctgcttgagtatgccgacaagatgttcacatatgtcttcgtgctggagatgctgctcaagtgggtggcctacggcttcaagaagtacttcaccaatgcctggtgctggctcgacttcctcatcgtagacgtctctctggtcagcctggtggccaacaccctgggctttgccgagatgggccccatcaagtcactgcggacgctgcgtgcactccgtcctctgagagctctgtcacgatttgagggcatgagggtggtggtcaatgccctggtgggcgccatcccgtccatcatgaacgtcctcctcgtctgcctcatcttctggctcatcttcagcatcatgggcgtgaacctctttgcggggaagtttgggaggtgcatcaaccagacagagggagacttgcctttgaactacaccatcgtgaacaacaagagccagtgtgagtccttgaacttgaccggagaattgtactggaccaaggtgaaagtcaactttgacaacgtgggggccgggtacctggcccttctgcaggtggcaacatttaaaggctggatggacattatgtatgcagctgtggactccagggggtatgaagagcagcctcagtgggaatacaacctctacatgtacatctattttgtcattttcatcatctttgggtctttcttcaccctgaacctctttattggtgtcatcattgacaacttcaaccaacagaagaaaaagttagggggccaggacatcttcatgacagaggagcagaagaagtactacaatgccatgaagaagctgggctccaagaagccccagaagcccatcccacggcccctgaacaagtaccagggcttcatattcgacattgtgaccaagcaggcctttgacgtcaccatcatgtttctgatctgcttgaatatggtgaccatgatggtggagacagatgaccaaagtcctgagaaaatcaacatcttggccaagatcaacctgctctttgtggccatcttcacaggcactgtgctctcggacatcatccagaagtacttcttctccccgacgctcttccgagtcatccgcctggcccgaataggccgcatcctcagactgatccgaggggccaaggggatccgcacgctgctctttgccctcatgatgtccctgcctgccctcttcaacatcgggctgctgctcttcctcgtcatgttcatctactccatctttggcatggccaacttcgcttatgtcaagtgggaggctggcatcgacgacatgttcaacttccagaccttcgccaacagcatgctgtgcctcttccagatcaccacgtcggccggctgggatggcctcctcagccccatcctcaacactgggccgccctactgcgaccccactctgcccaacagcaatggctctcggggggactgcgggagcccagccgtgggcatcctcttcttcaccacctacatcatcatctccttcctcatcgtggtcaacatgtacattgccatcatcctggagaacttcagcgtggccacggaggagagcaccgagcccctgagtgaggacgacttcgatatgttctatgagatctgggagaaatttgacccagaggccactcagtttattgagtattcggtcctgtctgactttgccgatgccctgtctgagccactccgtatcgccaagcccaaccagataagcctcatcaacatggacctgcccatggtgagtggggaccgcatccattgcatggacattctctttgccttcaccaaaagggtcctgggggagtctggggagatggacgccctgaagatccagatggaggagaagttcatggcagccaacccatccaagatctcctacgagcccatcaccaccacactccggcgcaagcacgaagaggtgtcggccatggttatccagagagccttccgcaggcacctgctgcaacgctctttgaagcatgcctccttcctcttccgtcagcaggcgggcagcggcctctccgaagaggatgcccctgagcgagagggcctcatcgcctacgtgatgagtgagaacttctcccgaccccttggcccaccctccagctcctccatctcctccacttccttcccaccctcctatgacagtgtcactagagccaccagcgataacctccaggtgcgggggtctgactacagccacagtgaagatctcgccgacttccccccttctccggacagggaccgtgagtccatcgtgtgagcctcggcctggctggccaggacacactgaaaagcagcctttttcaccatggcaaacctaaatgcagtcagtcacaaaccagcctggggccttcctggctttgggagtaagaaatgggcctcagccccgcggatcaaccaggcagagttctgtggcgccgcgtggacagccggagcagttggcctgtgcttggaggcctcagatagacctgtgacctggtctggtcaggcaatgccctgcggctctggaaagcaacttcatcccagctgctgaggcgaaatataaaactgagactgtatatgttgtgaatgggctttcataaatttattatatttgatatttttttacttgagcaaagaactaaggatttttccatggacatgggcagcaattcacgctgtctcttcttaaccctgaacaagagtgtctatggagcagccggaagtctgttctcaaagcagaagtggaatccagtgtggctcccacaggtcttcactgcccaggggtcgaatggggtccccctcccacttgacctgagatgctgggagggctgaacccccactcacacaagcacacacacacagtcctcacacacggaggccagacacaggccgtgggacccaggctcccagcctaagggagacaggcctttccctgccggccccccaaggatggggttcttgtccacggggctcactctggccccctattgtctccaaggtcccattttccccctgtgttttcacgcaggtcatattgtcagtcctacaaaaataaaaggcttccagaggagagtggcctgggtcccagggctggccctaggcactgatagttgccttttcttcccctcctgtaagagtattaacaaaaccaaaggacacaagggtgcaagccccattcacggcctggcatgcagcttgtccttgctcctggaacctggcaggccctgcccagccagccatcggaagagagggctgagccatgggggtttggggctaagaagttcaccagccctgagccatggcggcccctcagcctgcctgaagagaggaaactggcgatctcccagggctctctggaccatacgcggaggagttttctgtgtggtctccagctcctctccagacacagagacatgggagtggggagcggagcttggccctgcgccctgtgcagggaaagggatggtcagg

SEQ ID NO: 28473 - DNA, 5727 bp, Homo sapiens
  source 1..5727: mol_type = unassigned DNA
gtcctccaccatgtgaatgccaacatggccaggtcattagagctgagggaaaactagtgcccaaagatatgaaaagagtgtggatcttctggagaagtgctgttgttcaacaggtacaaaattggaaatgttggcttcaccagaacctaagggccttgttcccttcactaaagagtcttttgaacttataaaacagcatattgctaaaacacataatgaagaccatgaagaagaagacttaaagccaactcctgatttggaagttggcaaaaagcttccatttatttatggaaacctttctcaaggaatggtgtcagagcccttggaagatgtggacccatattactacaagaaaaaaaatactttcatagtattaaataaaaatagaacaatcttcagattcaatgcggcttccatcttgtgtacattgtctcctttcaattgtattagaagaacaactatcaaggttttggtacatccctttttccaactgtttattctaattagtgtcctgattgattgcgtattcatgtccctgactaatttgccaaaatggagaccagtattagagaatactttgcttggaatttacacatttgaaatacttgtaaaactctttgcaagaggtgtctgggcaggatcattttccttcctcggtgatccatggaactggctcgatttcagcgtaactgtgtttgaggttattataagatactcacctctggacttcattccaacgcttcaaactgcaagaactttgagaattttaaaaattattcctttaaatcaaggtctgaaatcccttgtaggggtcctgatccactgcttgaagcagcttattggtgtcattatcctaactctgttttttctgagcatattttctctaattgggatggggctcttcatgggcaacttgaaacataaatgttttcgatggccccaagagaatgaaaatgaaaccctgcacaacagaactggaaacccatattatattcgagaaacagaaaacttttattatttggaaggagaaagatatgctctcctttgtggcaacaggacagatgctggtcagtgtcctgaaggatatgtgtgtgtaaaagctggcataaatcctgatcaaggcttcacaaattttgacagttttggctgggccttatttgccctatttcggttaatggctcaggattaccctgaagtactttatcaccagatactttatgcttctgggaaggtctacatgatattttttgtggtggtaagttttttgttttccttttatatggcaagtttgttcttaggcatacttgccatggcctatgaagaagaaaagcagagagttggtgaaatatctaagaagattgaaccaaaatttcaacagactggaaaagaacttcaagaaggaaatgaaacagatgaggccaagaccatacaaatagaaatgaagaaaaggtcaccaatttccacagacacatcattggatgtgttggaagatgctactctcagacataaggaagaacttgaaaaatccaagaagatatgcccattatactggtataagtttgctaaaactttcttgatctggaattgttctccctgttggttaaaattgaaagagtttgtccataggattataatggcaccatttactgatcttttccttatcatatgcataattttaaacgtatgttttctgaccttggagcattatccaatgagtaaacaaactaacactcttctcaacattggaaacctggttttcattggaattttcacagcagaaatgatttttaaaataattgcaatgcatccatatgggtatttccaagtaggttggaacatttttgatagcatgatagtgttccatggtttaatagaactttgtctagcaaatgttgcaggaatggctcttcttcgattattcaggatgttaagaattttcaagttgggaaagtattggccaacattccagattttgatgtggtctcttagtaactcatgggtggccctgaaagacttggtcctgttgttgttcacattcatcttcttttctgctgcattcggcatgaagctgtttggtaagaattatgaagaatttgtctgccacatagacaaagactgtcaactcccacgctggcacatgcatgactttttccactccttcctgaatgtgttccgaattctctgtggagagtgggtagagaccttgtgggactgtatggaggttgcaggccaatcctggtgtattcctttttacctgatggtcattttaattggaaatttactggtactttacctgtttctggcattggtgagctcatttagttcatgcaaggatgtaacagctgaagagaataatgaagcaaaaaatctccagcttgcagtggcaagaattaaaaaaggaataaactatgtgcttcttaaaatactatgcaaaacacaaaatgtcccaaaggacacaatggaccatgtaaatgaggtatatgttaaagaagatatttctgaccataccctttctgaattgagcaacacccaagattttctcaaagataaggaaaaaagcagtggcacagagaaaaacgctactgaaaatgagagccaatcacttatccccagtcctagtgtctcagaaactgtaccaattgcttcaggagaatctgatatagaaaatctggataataaggagattcagagtaagtctggtgatggaggcagcaaagagaaaataaagcaatctagctcatctgaatgcagtactgttgatattgctatctctgaagaagaagaaatgttctatggaggtgaaagatcaaagcatctgaaaaatggttgcagacgcggatcttcacttggtcaaatcagtggagcatccaagaaaggaaaaatctggcagaacatcaggaaaacctgctgcaagattgtagagaacaattggtttaagtgttttattgggcttgttactctgctcagcactggcactctggcttttgaagatatatatatggatcagagaaagacaattaaaattttattagaatatgctgacatgatctttacttatatcttcattctggaaatgcttctaaaatggatggcatatggttttaaggcctatttctctaatggctggtacaggctggacttcgtggttgttattgtgttttgtcttagcttaataggcaaaactcgggaagaactaaaacctcttatttccatgaaattccttcggcccctcagagttctatctcaatttgaaagaatgaaggtggttgtgagagctttgatcaaaacaaccttacccactttgaatgtgtttcttgtctgcctgatgatctggctgatttttagtatcatgggagtagacttatttgctggcagattctatgaatgcattgacccaacaagtggagaaaggtttccttcatctgaagtcatgaataagagtcggtgtgaaagccttctgtttaacgaatccatgctatgggaaaatgcaaaaatgaactttgataatgttggaaatggtttcctttctctgcttcaagtagcaacatttaatggatggatcactattatgaattcagcaattgattctgttgctgttaatatacagcctcattttgaagtcaacatctacatgtattgttactttatcaactttattatatttggagtatttctccctctgagtatgctgattactgttattattgataatttcaacaagcataaaataaagctgggaggctcaaatatctttataacggttaaacagagaaaacagtaccgcaggctgaagaagctaatgtatgaggattctcaaagaccagtacctcgcccattaaacaagctccaaggattcatctttgatgtggtaacaagccaagcttttaatgtcattgttatggttcttatatgtttccaagcaatagccatgatgatagacactgatgttcagagtctacaaatgtccattgctctctactggattaactcaatttttgttatgctatatactatggaatgtatactgaagctcatcgctttccgttgtttttatttcaccattgcgtggaacatttttgattttatggtggttattttctccatcacaggactatgtctgcctatgacagtaggatcctaccttgtgcctccttcacttgtgcaactgatacttctctcacggatcattcacatgctgcgtcttggaaaaggaccaaaggtgtttcataatctgatgcttcctttgatgctgtccctcccagcattattgaacatcattcttctcatcttcctggtcatgttcatctatgccgtatttggaatgtataattttgcctatgttaaaaaagaagctggaattaatgatgtgtctaattttgaaacctttggcaacagtatgctctgtctttttcaagttgcaatatttgctggttgggatgggatgcttgatgcaattttcaacagtaaatggtctgactgtgatcctgataaaattaaccctgggactcaagttagaggagattgtgggaacccctctgttgggattttttattttgtcagttatatcctcatatcatggctgatcattgtaaatatgtacattgttgttgtcatggagtttttaaatattgcttctaagaagaaaaacaagaccttgagtgaagatgattttaggaaattctttcaggtatggaaaaggtttgatcctgataggacccagtacatagactctagcaagctttcagattttgcagctgctcttgatcctcctcttttcatggcaaaaccaaacaagggccagctcattgctttggacctccccatggctgttggggacagaattcattgcctcgatatcttacttgcttttacaaagagagttatgggtcaagatgtgaggatggagaaagttgtttcagaaatagaatcagggtttttgttagccaacccttttaagatcacatgtgagccaattacgactactttgaaacgaaaacaagaggcagtttcagcaaccatcattcaacgtgcttataaaaattaccgcttgaggcgaaatgacaaaaatacatcagatattcatatgatagatggtgacagagatgttcatgctactaaagaaggtgcctattttgacaaagctaaggaaaagtcacctattcaaagccagatctaataccacttaccacctcttttcatatttcttcacatatctgaaaaatgttgaaagcctaagccaggaataaaagaaaagtagagataataatcagttctttacaaccgatggtaattaagcttgtattcacaagacttcatgccaaattcactttttagcattatatctaacaaatcaagagaatccttaatattgctgcagtgagtttaaagtgggttaaagtggccatttgacaatctcatatttgttttctctacatggcttatatgatgtgtgccttctagggaatgaagggaagtggtgatagagatcagcagcagcaggggctttcttttatattttatgtataatttaatgggctttaagtcaccactattaagacttacaaataagcaaatactttcctgatgtgggatggtgaaatgctaatggccattaaatcataaacttgcctagacaaaagccaattggaagaagggagagagcagttctttagaaagtgcctttgagatcaacctcagagattcttgggctgattaaaactgcatttg

SEQ ID NO: 28474 - DNA, 7183 bp, Homo sapiens
  source 1..7183: mol_type = unassigned DNA
gtcctccaccatgtgaatgccaacatggccaggtcattagagctgagggaaaactagtgcccaaagatatgaaaagagtgtggatcttctggagaagtgctgttgttcaacaggtacaaaattggaaatgttggcttcaccagaacctaagggccttgttcccttcactaaagagtcttttgaacttataaaacagcatattgctaaaacacataatgaagaccatgaagaagaagacttaaagccaactcctgatttggaagttggcaaaaagcttccatttatttatggaaacctttctcaaggaatggtgtcagagcccttggaagatgtggacccatattactacaagaaaaaaaatactttcatagtattaaataaaaatagaacaatcttcagattcaatgcggcttccatcttgtgtacattgtctcctttcaattgtattagaagaacaactatcaaggttttggtacatccctttttccaactgtttattctaattagtgtcctgattgattgcgtattcatgtccctgactaatttgccaaaatggagaccagtattagagaatactttgcttggaatttacacatttgaaatacttgtaaaactctttgcaagaggtgtctgggcaggatcattttccttcctcggtgatccatggaactggctcgatttcagcgtaactgtgtttgaggttattataagatactcacctctggacttcattccaacgcttcaaactgcaagaactttgagaattttaaaaattattcctttaaatcaaggtctgaaatcccttgtaggggtcctgatccactgcttgaagcagcttattggtgtcattatcctaactctgttttttctgagcatattttctctaattgggatggggctcttcatgggcaacttgaaacataaatgttttcgatggccccaagagaatgaaaatgaaaccctgcacaacagaactggaaacccatattatattcgagaaacagaaaacttttattatttggaaggagaaagatatgctctcctttgtggcaacaggacagatgctggtcagtgtcctgaaggatatgtgtgtgtaaaagctggcataaatcctgatcaaggcttcacaaattttgacagttttggctgggccttatttgccctatttcggttaatggctcaggattaccctgaagtactttatcaccagatactttatgcttctgggaaggtctacatgatattttttgtggtggtaagttttttgttttccttttatatggcaagtttgttcttaggcatacttgccatggcctatgaagaagaaaagcagagagttggtgaaatatctaagaagattgaaccaaaatttcaacagactggaaaagaacttcaagaaggaaatgaaacagatgaggccaagaccatacaaatagaaatgaagaaaaggtcaccaatttccacagacacatcattggatgtgttggaagatgctactctcagacataaggaagaacttgaaaaatccaagaagatatgcccattatactggtataagtttgctaaaactttcttgatctggaattgttctccctgttggttaaaattgaaagagtttgtccataggattataatggcaccatttactgatcttttccttatcatatgcataattttaaacgtatgttttctgaccttggagcattatccaatgagtaaacaaactaacactcttctcaacattggaaacctggttttcattggaattttcacagcagaaatgatttttaaaataattgcaatgcatccatatgggtatttccaagtaggttggaacatttttgatagcatgatagtgttccatggtttaatagaactttgtctagcaaatgttgcaggaatggctcttcttcgattattcaggatgttaagaattttcaagttgggaaagtattggccaacattccagattttgatgtggtctcttagtaactcatgggtggccctgaaagacttggtcctgttgttgttcacattcatcttcttttctgctgcattcggcatgaagctgtttggtaagaattatgaagaatttgtctgccacatagacaaagactgtcaactcccacgctggcacatgcatgactttttccactccttcctgaatgtgttccgaattctctgtggagagtgggtagagaccttgtgggactgtatggaggttgcaggccaatcctggtgtattcctttttacctgatggtcattttaattggaaatttactggtactttacctgtttctggcattggtgagctcatttagttcatgcaaggatgtaacagctgaagagaataatgaagcaaaaaatctccagcttgcagtggcaagaattaaaaaaggaataaactatgtgcttcttaaaatactatgcaaaacacaaaatgtcccaaaggacacaatggaccatgtaaatgaggtatatgttaaagaagatatttctgaccataccctttctgaattgagcaacacccaagattttctcaaagataaggaaaaaagcagtggcacagagaaaaacgctactgaaaatgagagccaatcacttatccccagtcctagtgtctcagaaactgtaccaattgcttcaggagaatctgatatagaaaatctggataataaggagattcagagtaagtctggtgatggaggcagcaaagagaaaataaagcaatctagctcatctgaatgcagtactgttgatattgctatctctgaagaagaagaaatgttctatggaggtgaaagatcaaagcatctgaaaaatggttgcagacgcggatcttcacttggtcaaatcagtggagcatccaagaaaggaaaaatctggcagaacatcaggaaaacctgctgcaagattgtagagaacaattggtttaagtgttttattgggcttgttactctgctcagcactggcactctggcttttgaagatatatatatggatcagagaaagacaattaaaattttattagaatatgctgacatgatctttacttatatcttcattctggaaatgcttctaaaatggatggcatatggttttaaggcctatttctctaatggctggtacaggctggacttcgtggttgttattgtgttttgtcttagcttaataggcaaaactcgggaagaactaaaacctcttatttccatgaaattccttcggcccctcagagttctatctcaatttgaaagaatgaaggtggttgtgagagctttgatcaaaacaaccttacccactttgaatgtgtttcttgtctgcctgatgatctggctgatttttagtatcatgggagtagacttatttgctggcagattctatgaatgcattgacccaacaagtggagaaaggtttccttcatctgaagtcatgaataagagtcggtgtgaaagccttctgtttaacgaatccatgctatgggaaaatgcaaaaatgaactttgataatgttggaaatggtttcctttctctgcttcaagtagcaacatttaatggatggatcactattatgaattcagcaattgattctgttgctgttaatatacagcctcattttgaagtcaacatctacatgtattgttactttatcaactttattatatttggagtatttctccctctgagtatgctgattactgttattattgataatttcaacaagcataaaataaagctgggaggctcaaatatctttataacggttaaacagagaaaacagtaccgcaggctgaagaagctaatgtatgaggattctcaaagaccagtacctcgcccattaaacaagctccaaggattcatctttgatgtggtaacaagccaagcttttaatgtcattgttatggttcttatatgtttccaagcaatagccatgatgatagacactgatgttcagagtctacaaatgtccattgctctctactggattaactcaatttttgttatgctatatactatggaatgtatactgaagctcatcgctttccgttgtttttatttcaccattgcgtggaacatttttgattttatggtggttattttctccatcacaggactatgtctgcctatgacagtaggatcctaccttgtgcctccttcacttgtgcaactgatacttctctcacggatcattcacatgctgcgtcttggaaaaggaccaaaggtgtttcataatctgatgcttcctttgatgctgtccctcccagcattattgaacatcattcttctcatcttcctggtcatgttcatctatgccgtatttggaatgtataattttgcctatgttaaaaaagaagctggaattaatgatgtgtctaattttgaaacctttggcaacagtatgctctgtctttttcaagttgcaatatttgctggttgggatgggatgcttgatgcaattttcaacagtaaatggtctgactgtgatcctgataaaattaaccctgggactcaagttagaggagattgtgggaacccctctgttgggattttttattttgtcagttatatcctcatatcatggctgatcattgtaaatatgtacattgttgttgtcatggagtttttaaatattgcttctaagaagaaaaacaagaccttgagtgaagatgattttaggaaattctttcaggtatggaaaaggtttgatcctgataggacccagtacatagactctagcaagctttcagattttgcagctgctcttgatcctcctcttttcatggcaaaaccaaacaagggccagctcattgctttggacctccccatggctgttggggacagaattcattgcctcgatatcttacttgcttttacaaagagagttatgggtcaagatgtgaggatggagaaagttgtttcagaaatagaatcagggtttttgttagccaacccttttaagatcacatgtgagccaattacgactactttgaaacgaaaacaagaggcagtttcagcaaccatcattcaacgtgcttataaaaattaccgcttgaggcgaaatgacaaaaatacatcagatattcatatgatagatggtgacagagatgttcatgctactaaagaaggtgcctattttgacaaagctaaggaaaagtcacctattcaaagccagatctaataccacttaccacctcttttcatatttcttcacatatctgaaaaatgttgaaagcctaagccaggaataaaagaaaagtagagataataatcagttctttacaaccgatggtaattaagcttgtattcacaagacttcatgccaaattcactttttagcattatatctaacaaatcaagagaatccttaatattgctgcagtgagtttaaagtgggttaaagtggccatttgacaatctcatatttgttttctctacatggcttatatgatgtgtgccttctagggaatgaagggaagtggtgatagagatcagcagcagcaggggctttcttttatattttatgtataatttaatgggctttaagtcaccactattaagacttacaaataagcaaatactttcctgatgtgggatggtgaaatgctaatggccattaaatcataaacttgcctagacaaaagccaattggaagaagggagagagcagttctttagaaagtgcctttgagatcaacctcagagattcttgggctgattaaaactgcatttgaaaaagattggttgaagctctgtgtttatttttgtatgttcttgttttcatttggaactgggaatgaataggatttcattgtgctcaagctcctggtttctcatctctggatagtttcacctaagctctggctcttaagcaggacagattcgtaaaacaagaagcataaaggagaggtatagccttttttttttttttttttttcattttcttctcatttacacctatttttttaaaaagtatacatttactaaaatgatgtaataaataacatgttaatagactcaagctttaccttatgaaattgatgtatttttaccagttatttctaatgtaacattgaatatataagatctgacaaatgtatgtttaaacatgaattagaagagttgagaactaccattatgtatagggattctcatagtgtcttggcccttaattggaaagttgtggcaactttaaagtactttttactgtatgttataattctttataacttagagagagacaatggtcactcaaactatgagaactatgaattaggagataaaagtttaaatttgttgttgttttataacagtatgtacaagttagttttcccttatatatttacgttttcaagttttttaatctcatcatatacatccatactctataaaatgttttatattcaaagaactgtaaaatcctaaacattagttttcactattgaaattgttttttaaagataggcataaatagttgtccttagacttattcatacaaatatagtcatttacttctatgtagtttgagattctgagagttattccaactttatgaagattgatttcaatgtgcctgctaagtcctaaaagattcagaaagaaaatttatatattattgatttaaatatcatcctttaaatatgttgtataacattcaatatagtttatgtatcagtgattgtattttattctgaatgcatgatctcaagccttaactactataatctttttctgcccctcagaaattgaataacctaaccaagatgcctttaggggatgccctaagtaaatgtaatttcagatttcagggttttttttttttcctctctaagtgttccttccctttcttctcctgctctccatcatgttatggagaccagtgaggaaccagtgttaacttggtgacaatgtgacagctggtgctttatctaagctccgttttctatttcttgggaatgctttattgtggaaactgcttcagatacttaaattgaatcataacttgcttctgtaaattgcgtaaagacaacaaactgattttagtttgaaaagtttatcttttacttgtaaaccttgtttgccagttaccttccgaaagctgtgtaaagagttatttttaacaaagtcttaacaatatatgttactttttagatactatagaaaataataaatataacctgtaaaccaca

SEQ ID NO: 28475 - DNA, 2996 bp, Homo sapiens
  source 1..2996: mol_type = unassigned DNA
ctccactggacatctgggtaggaggggtctctgggtcagtggctggagagtcgccccagtgagtcggtgtctaactggccatttagtggggcccatttactgcagagccacagctggtgaggacagacgccagcctaacagcagcttctgtacaactagagctcagaaaacccgagagatccgtggagaaagagaagcccaggaggaggaaagggctccaaggagccctgctcctgaagggtccctcaggcactggtggagacctgtcgcttcgtagcaagtcctccaccatgtgaatgccaacatggccaggtcattagagctgagggaaaactagtgcccaaagatatgaaaagagtgtggatcttctggagaagtgctgttgttcaacaggtacaaaattggaaatgttggcttcaccagaacctaagggccttgttcccttcactaaagagtcttttgaacttataaaacagcatattgctaaaacacataatgaagaccatgaagaagaagacttaaagccaactcctgatttggaagttggcaaaaagcttccatttatttatggaaacctttctcaaggaatggtgtcagagcccttggaagatgtggacccatattactacaagaaaaaaaatactttcatagtattaaataaaaatagaacaatcttcagattcaatgcggcttccatcttgtgtacattgtctcctttcaattgtattagaagaacaactatcaaggttttggtacatccctttttccaactgtttattctaattagtgtcctgattgattgcgtattcatgtccctgactaatttgccaaaatggagaccagtattagagaatactttgcttggaatttacacatttgaaatacttgtaaaactctttgcaagaggtgtctgggcaggatcattttccttcctcggtgatccatggaactggctcgatttcagcgtaactgtgtttgaggttattataagatactcacctctggacttcattccaacgcttcaaactgcaagaactttgagaattttaaaaattattcctttaaatcaaggtctgaaatcccttgtaggggtcctgatccactgcttgaagcagcttattggtgtcattatcctaactctgttttttctgagcatattttctctaattgggatggggctcttcatgggcaacttgaaacataaatgttttcgatggccccaagagaatgaaaatgaaaccctgcacaacagaactggaaacccatattatattcgagaaacagaaaacttttattatttggaaggagaaagatatgctctcctttgtggcaacaggacagatgctggtcagtgtcctgaaggatatgtgtgtgtaaaagctggcataaatcctgatcaaggcttcacaaattttgacagttttggctgggccttatttgccctatttcggttaatggctcaggattaccctgaagtactttatcaccagatactttatgcttctgggaaggtctacatgatattttttgtggtggtaagttttttgttttccttttatatggcaagtttgttcttaggcatacttgccatggcctatgaagaagaaaagcagagagttggtgaaatatctaagaagattgaaccaaaatttcaacagactggaaaagaacttcaagaaggaaatgaaacagatgaggccaagaccatacaaatagaaatgaagaaaaggtcaccaatttccacagacacatcattggatgtgttggaagatgctactctcagacataaggaagaacttgaaaaatccaagaagatatgcccattatactggtataagtttgctaaaactttcttgatctggaattgttctccctgttggttaaaattgaaagagtttgtccataggattataatggcaccatttactgatcttttccttatcatatgcataattttaaacgtatgttttctgaccttggagcattatccaatgagtaaacaaactaacactcttctcaacattggaaacctggttttcattggaattttcacagcagaaatgatttttaaaataattgcaatgcatccatatgggtatttccaagtaggttggaacatttttgatagcatgatagtgttccatggtttaatagaactttgtctagcaaatgttgcaggaatggctcttcttcgattattcaggatgttaagaattttcaagttgggaaagtattggccaacattccagattttgatgtggtctcttagtaactcatgggtggccctgaaagacttggtcctgttgttgttcacattcatcttcttttctgctgcattcggcatgaagctgtttggtaagaattatgaagaatttgtctgccacatagacaaagactgtcaactcccacgctggcacatgcatgactttttccactccttcctgaatgtgttccgaattctctgtggagagtgggtagagaccttgtgggactgtatggaggttgcaggccaatcctggtgtattcctttttacctgatggtcattttaattggaaatttactggtactttacctgtttctggcattggtgagctcatttagttcatgcaaggatgtaacagctgaagagaataatgaagcaaaaaatctccagcttgcagtggcaagaattaaaaaaggaataaactatgtgcttcttaaaatactatgcaaaacacaaaatgtcccaaaggacacaatggaccatgtaaatgaggtatatgttaaagaagatatttctgaccataccctttctgaattgagcaacacccaagattttctcaaagataaggaaaaaagcagtggcacagagaaaaacgctactgaaaatgagagccaatcacttatccccagtcctagtgtctcagaaactgtaccaattgcttcaggagaatctgatatagaaaatctggataataaggagattcagagtaagtctggtgatggaggcagcaaa

SEQ ID NO: 28476 - DNA, 1459 bp, Homo sapiens
  source 1..1459: mol_type = unassigned DNA
ctggagagtcgccccagtgagtcggtgtctaactggccatttagtggggcccatttactgcagagccacagctggtgaggacagacgccagcctaacagcagcttctgtacaactagagctcagaaaacccgagagatccgtggagaaagagaagcccaggaggaggaaagggctccaaggagccctgctcctgaagggtccctcaggcactggtggagacctgtcgcttcgtagcaagtacaaaattggaaatgttggcttcaccagaacctaagggccttgttcccttcactaaagagtcttttgaacttataaaacagcatattgctaaaacacataatgaagaccatgaagaagaagacttaaagccaactcctgatttggaagttggcaaaaagcttccatttatttatggaaacctttctcaaggaatggtgtcagagcccttggaagatgtggacccatattactacaagaaaaaaaatactttcatagtattaaataaaaatagaacaatcttcagattcaatgcggcttccatcttgtgtacattgtctcctttcaattgtattagaagaacaactatcaaggttttggtacatccctttttccaactgtttattctaattagtgtcctgattgattgcgtattcatgtccctgactaatttgccaaaatggagaccagtattagagaatactttgcttggaatttacacatttgaaatacttgtaaaactctttgcaagaggtgtctgggcaggatcattttccttcctcggtgatccatggaactggctcgatttcagcgtaactgtgtttgaggttattataagatactcacctctggacttcattccaacgcttcaaactgcaagaactttgagaattttaaaaattattcctttaaatcaaggtctgaaatcccttgtaggggtcctgatccactgcttgaagcagcttattggtgtcattatcctaactctgttttttctgagcatattttctctaattgggatggggctcttcatgggcaacttgaaacataaatgttttcgatggccccaagagaatgaaaatgaaaccctgcacaacagaactggaaacccatattatattcgagaaacagaaaacttttattatttggaaggagaaagatatgctctcctttgtggcaacaggacagatgctggtcagtgtcctgaaggatatgtgtgtgtaaaagctggcataaatcctgatcaaggcttcacaaattttgacagttttggctgggccttatttgccctatttcggttaatggctcaggattaccctgaagtactttatcaccagatactttatgcttctgggaaggtctacatgatattttttgtggtggtaagttttttgttttccttttatatggcaagtttgttcttaggcatacttgccatggcctatgaagaagaaaagcaga

SEQ ID NO: 28477 - DNA, 6418 bp, Homo sapiens
  source 1..6418: mol_type = unassigned DNA
atggaattccccattggatccctcgaaactaacaacttccgtcgctttactccggagtcactggtggagatagagaagcaaattgctgccaagcagggaacaaagaaagccagagagaagcatagggagcagaaggaccaagaagagaagcctcggccccagctggacttgaaagcctgcaaccagctgcccaagttctatggtgagctcccagcagaactgatcggggagcccctggaggatctagatccgttctacagcacacaccggacatttatggtgctgaacaaagggaggaccatttcccggtttagtgccactcgggccctgtggctattcagtcctttcaacctgatcagaagaacggccatcaaagtgtctgtccactcgtggttcagtttatttattacggtcactattttggttaattgtgtgtgcatgacccgaactgaccttccagagaaaattgaatatgtcttcactgtcatttacacctttgaagccttgataaagatactggcaagaggattttgtctaaatgagttcacgtacctgagagatccttggaactggctggattttagcgtcattaccctggcatatgttggcacagcaatagatctccgtgggatctcaggcctgcggacattcagagttcttagagcattaaaaacagtttctgtgatcccaggcctgaaggtcattgtgggggccctgattcactcagtgaagaaactggctgatgtgaccatcctcaccatcttctgcctaagtgtttttgccttggtggggctgcaactcttcaagggcaacctcaaaaataaatgtgtcaagaatgacatggctgtcaatgagacaaccaactactcatctcacagaaaaccagatatctacataaataagcgaggcacttctgaccccttactgtgtggcaatggatctgactcaggccactgccctgatggttatatctgccttaaaacttctgacaacccggattttaactacaccagctttgattcctttgcttgggctttcctctcactgttccgcctcatgacacaggattcctgggaacgcctctaccagcagaccctgaggacttctgggaaaatctatatgatcttttttgtgctcgtaatcttcctgggatctttctacctggtcaacttgatcttggctgtagtcaccatggcgtatgaggagcagaaccaggcaaccactgatgaaattgaagcaaaggagaagaagttccaggaggccctcgagatgctccggaaggagcaggaggtgctagcagcactagggattgacacaacctctctccactcccacaatggatcacctttaacctccaaaaatgccagtgagagaaggcatagaataaagccaagagtgtcagagggctccacagaagacaacaaatcaccccgctctgatccttacaaccagcgcaggatgtcttttctaggcctcgcctctggaaaacgccgggctagtcatggcagtgtgttccatttccggtcccctggccgagatatctcactccctgagggagtcacagatgatggagtctttcctggagaccacgaaagccatcggggctctctgctgctgggtgggggtgctggccagcaaggccccctccctagaagccctcttcctcaacccagcaaccctgactccaggcatggagaagatgaacaccaaccgccgcccactagtgagcttgcccctggagctgtcgatgtctcggcattcgatgcaggacaaaagaagactttcttgtcagcagaatacttagatgaacctttccgggcccaaagggcaatgagtgttgtcagtatcataacctccgtccttgaggaactcgaggagtctgaacagaagtgcccaccctgcttgaccagcttgtctcagaagtatctgatctgggattgctgccccatgtgggtgaagctcaagacaattctctttgggcttgtgacggatccctttgcagagctcaccatcaccttgtgcatcgtggtgaacaccatcttcatggccatggagcaccatggcatgagccctaccttcgaagccatgctccagataggcaacatcgtctttaccatattttttactgctgaaatggtcttcaaaatcattgccttcgacccatactattatttccagaagaagtggaatatctttgactgcatcatcgtcactgtgagtctgctagagctgggcgtggccaagaagggaagcctgtctgtgctgcggagcttccgcttgctgcgcgtattcaagctggccaaatcctggcccaccttaaacacactcatcaagatcatcggaaactcagtgggggcactggggaacctcaccatcatcctggccatcattgtctttgtctttgctctggttggcaagcagctcctaggggaaaactaccgtaacaaccgaaaaaatatctccgcgccccatgaagactggccccgctggcacatgcacgacttcttccactctttcctcattgtcttccgtatcctctgtggagagtggattgagaacatgtgggcctgcatggaagttggccaaaaatccatatgcctcatccttttcttgacggtgatggtgctagggaacctggtggtgcttaacctgttcatcgccctgctattgaactctttcagtgctgacaacctcacagccccggaggacgatggggaggtgaacaacctgcaggtggccctggcacggatccaggtctttggccatcgtaccaaacaggctctttgcagcttcttcagcaggtcctgcccattcccccagcccaaggcagagcctgagctggtggtgaaactcccactctccagctccaaggctgagaaccacattgctgccaacactgccagggggagctctggagggctccaagctcccagaggccccagggatgagcacagtgacttcatcgctaatccgactgtgtgggtctctgtgcccattgctgagggtgaatctgatcttgatgacttggaggatgatggtggggaagatgctcagagcttccagcaggaagtgatccccaaaggacagcaggagcagctgcagcaagtcgagaggtgtggggaccacctgacacccaggagcccaggcactggaacatcttctgaggacctggctccatccctgggtgagacgtggaaagatgagtctgttcctcaggtccctgctgagggagtggacgacacaagctcctctgagggcagcacggtggactgcctagatcctgaggaaatcctgaggaagatccctgagctggcagatgacctggaagaaccagatgactgcttcacagaaggatgcattcgccactgtccctgctgcaaactggataccaccaagagtccatgggatgtgggctggcaggtgcgcaagacttgctaccgtatcgtggagcacagctggtttgagagcttcatcatcttcatgatcctgctcagcagtggatctctggcctttgaagactattacctggaccagaagcccacggtgaaagctttgctggagtacactgacagggtcttcacctttatctttgtgttcgagatgctgcttaagtgggtggcctatggcttcaaaaagtacttcaccaatgcctggtgctggctggacttcctcattgtgaatatctcactgataagtctcacagcgaagattctggaatattctgaagtggctcccatcaaagcccttcgaacccttcgcgctctgcggccactgcgggctctttctcgatttgaaggcatgcgggtggtggtggatgccctggtgggcgccatcccatccatcatgaatgtcctcctcgtctgcctcatcttctggctcatcttcagcatcatgggtgtgaacctcttcgcagggaagttttggaggtgcatcaactataccgatggagagttttcccttgtacctttgtcgattgtgaataacaagtctgactgcaagattcaaaactccactggcagcttcttctgggtcaatgtgaaagtcaactttgataatgttgcaatgggttaccttgcacttctgcaggtggcaacctttaaaggctggatggacattatgtatgcagctgttgattcccgggaggtcaacatgcaacccaagtgggaggacaacgtgtacatgtatttgtactttgtcatcttcatcatttttggaggcttcttcacactgaatctctttgttggggtcataattgacaacttcaatcaacagaaaaaaaagttagggggccaggacatcttcatgacagaggagcagaagaaatactacaatgccatgaagaagttgggctccaagaagccccagaagcccatcccacggcccctgaacaagttccagggttttgtctttgacatcgtgaccagacaagcttttgacatcaccatcatggtcctcatctgcctcaacatgatcaccatgatggtggagactgatgaccaaagtgaagaaaagacgaaaattctgggcaaaatcaaccagttctttgtggccgtcttcacaggcgaatgtgtcatgaagatgttcgctttgaggcagtactacttcacaaatggctggaatgtgtttgacttcattgtggtggttctctccattgcgagcctgattttttctgcaattcttaagtcacttcaaagttacttctccccaacgctcttcagagtcatccgcctggcccgaattggccgcatcctcagactgatccgagcggccaaggggatccgcacactgctctttgccctcatgatgtccctgcctgccctcttcaacatcgggctgttgctattccttgtcatgttcatctactctatcttcggtatgtccagctttccccatgtgaggtgggaggctggcatcgacgacatgttcaacttccagaccttcgccaacagcatgctgtgcctcttccagattaccacgtcggccggctgggatggcctcctcagccccatcctcaacacagggcccccctactgtgaccccaatctgcccaacagcaatggcaccagaggggactgtgggagcccagccgtaggcatcatcttcttcaccacctacatcatcatctccttcctcatcatggtcaacatgtacattgcagtgattctggagaacttcaatgtggccacggaggagagcactgagcccctgagtgaggacgactttgacatgttctatgagacctgggagaagtttgacccagaggccactcagtttattaccttttctgctctctcggactttgcagacactctctctggtcccctgagaatcccaaaacccaatcgaaatatactgatccagatggacctgcctttggtccctggagataagatccactgcttggacatcctttttgctttcaccaagaatgtcctaggagaatccggggagttggattctctgaaggcaaatatggaggagaagtttatggcaactaatctttcaaaatcatcctatgaaccaatagcaaccactctccgatggaagcaagaagacatttcagccactgtcattcaaaaggcctatcggagctatgtgctgcaccgctccatggcactctctaacaccccatgtgtgcccagagctgaggaggaggctgcatcactcccagatgaaggttttgttgcattcacagcaaatgaaaattgtgtactcccagacaaatctgaaactgcttctgccacatcattcccaccgtcctatgagagtgtcactagaggccttagtgatagagtcaacatgaggacatctagctcaatacaaaatgaagatgaagccaccagtatggagctgattgcccctgggccctagtgagaacactccagcctggatatgttcagttatgatgcgtccttctgctctgtgttaactctttcccattgcagatcacacccagctacagcctcaccaatgcatgccactggtcacaatgtcagaactgggcagggaatgcaactggtaaccacctttgaaaaaaccatcatacacaaataggagtcagaagctaagagcacttccactgtgatttcccttctgaatttcaatatcagatcatgggttctcttactctccagaaaatatcccttgtccttttatttttgttgtaatcagattatatttactgagacaaacttctcaggaccagaacttccaaagatatagaacaagaacattactgaaggtccaaggtagtcctctgtggagcaccatacagagattggcaatattatttaggattttgcatgactgcatgtgagagctgtcggacaactgctctgacccagggtaacacctgtggcctatgtcatgaaaagcctttgagatatccattaaaattaatatttttaaatgtatgtcc

SEQ ID NO: 28478 - DNA, 6500 bp, Homo sapiens
  source 1..6500: mol_type = unassigned DNA
tcctgctatacccacagtggtggtcatctcttctgatcttcacagccaatcagctcccaaggcccctgacctcagctcagcttttgtagatccttatgacaccatcctttaagactggaatcctagggcaggctgttttattcccgcctcctgaggcctttctgaggatctgtggcttgtctctgtcctgagggtgaagatggatgacagatgctacccagtaatctttccagatgagcggaatttccgccccttcacttccgactctctggctgcaattgagaagcggattgccatccaaaaggagaaaaagaagtctaaagaccagacaggagaagtaccccagcctcggcctcagcttgacctaaaggcctccaggaagttgcccaagctctatggcgacattcctcgtgagctcataggaaagcctctggaagacttggacccattctaccgaaatcataagacatttatggtgttaaacagaaagaggacaatctaccgcttcagtgccaagcatgccttgttcatttttgggcctttcaattcaatcagaagtttagccattagagtctcagtccattcattgttcagcatgttcattatcggcaccgttatcatcaactgcgtgttcatggctacagggcctgctaaaaacagcaacagtaacaatactgacattgcagagtgtgtcttcactgggatttatatttttgaagctttgattaaaatattggcaagaggtttcattctggatgagttttctttccttcgagatccatggaactggctggactccattgtcattggaatagcgattgtgtcatatattccaggaatcaccatcaaactattgcccctgcgtaccttccgtgtgttcagagctttgaaagcaatttcagtagtttcacgtctgaaggtcatcgtgggggccttgctacgctctgtgaagaagctggtcaacgtgattatcctcaccttcttttgcctcagcatctttgccctggtaggtcagcagctcttcatgggaagtctgaacctgaaatgcatctcgagggactgtaaaaatatcagtaacccggaagcttatgaccattgctttgaaaagaaagaaaattcacctgaattcaaaatgtgtggcatctggatgggtaacagtgcctgttccatacaatatgaatgtaagcacaccaaaattaatcctgactataattatacgaattttgacaactttggctggtcttttcttgccatgttccggctgatgacccaagattcctgggagaagctttatcaacagaccctgcgtactactgggctctactcagtcttcttcttcattgtggtcattttcctgggctccttctacctgattaacttaaccctggctgttgttaccatggcatatgaggagcagaacaagaatgtagctgcagagatagaggccaaggaaaagatgtttcaggaagcccagcagctgttaaaggaggaaaaggaggctctggttgccatgggaattgacagaagttcacttacttcccttgaaacatcatattttaccccaaaaaagagaaagctctttggtaataagaaaaggaagtccttctttttgagagagtctgggaaagaccagcctcctgggtcagattctgatgaagattgccaaaaaaagccacagctcctagagcaaaccaaacgactgtcccagaatctatcactggaccactttgatgagcatggagatcctctccaaaggcagagagcactgagtgctgtcagcatcctcaccatcaccatgaaggaacaagaaaaatcacaagagccttgtctcccttgtggagaaaacctggcatccaagtacctcgtgtggaactgttgcccccagtggctgtgcgttaagaaggtcctgagaactgtgatgactgacccgtttactgagctggccatcaccatctgcatcatcatcaacactgtcttcttggccatggagcatcacaagatggaggccagttttgagaagatgttgaatatagggaatttggttttcactagcatttttatagcagaaatgtgcctaaaaatcattgcgctcgatccctaccactactttcgccgaggctggaacatttttgacagcattgttgctcttctgagttttgcagatgtaatgaactgtgtacttcaaaagagaagctggccattcttgcgttccttcagagtgctcagggtcttcaagttagccaaatcctggccaactttgaacacactaattaagataatcggcaactctgtcggagcccttggaagcctgactgtggtcctggtcattgtgatctttattttctcagtagttggcatgcagctttttggccgtagcttcaattcccaaaagagtccaaaactctgtaacccgacaggcccgacagtctcatgtttacggcactggcacatgggggatttctggcactccttcctagtggtattccgcatcctctgcggggaatggatcgaaaatatgtgggaatgtatgcaagaagcgaatgcatcatcatcattgtgtgttattgtcttcatattgatcacggtgataggaaaacttgtggtgctcaacctcttcattgccttactgctcaattcctttagcaatgaggaaagaaatggaaacttagaaggagaggccaggaaaactaaagtccagttagcactggatcgattccgccgggctttttgttttgtgagacacactcttgagcatttctgtcacaagtggtgcaggaagcaaaacttaccacagcaaaaagaggtggcaggaggctgtgctgcacaaagcaaagacatcattcccctggtcatggagatgaaaaggggctcagagacccaggaggagcttggtatactaacctctgtaccaaagaccctgggcgtcaggcatgattggacttggttggcaccacttgcggaggaggaagatgacgttgaattttctggtgaagataatgcacagcgcatcacacaacctgagcctgaacaacaggcctatgagctccatcaggagaacaagaagcccacgagccagagagttcaaagtgtggaaattgacatgttctctgaagatgagcctcatctgaccatacaggatccccgaaagaagtctgatgttaccagtatactatcagaatgtagcaccattgatcttcaggatggctttggatggttacctgagatggttcccaaaaagcaaccagagagatgtttgcccaaaggctttggttgctgctttccatgctgtagcgtggacaagagaaagcctccctgggtcatttggtggaacctgcggaaaacctgctaccaaatagtgaaacacagctggtttgagagctttattatctttgtgattctgctgagcagtggggcactgatatttgaagatgttcaccttgagaaccaacccaaaatccaagaattactaaattgtactgacattatttttacacatatttttatcctggagatggtactaaaatgggtagccttcggatttggaaagtatttcaccagtgcctggtgctgccttgatttcatcattgtgattgtctctgtgaccaccctcattaacttaatggaattgaagtccttccggactctacgagcactgaggcctcttcgtgcgctgtcccagtttgaaggaatgaaggtggtggtcaatgctctcataggtgccatacctgccattctgaatgttttgcttgtctgcctcattttctggctcgtattttgtattctgggagtatacttcttttctggaaaatttgggaaatgcattaatggaacagactcagttataaattataccatcattacaaataaaagtcaatgtgaaagtggcaatttctcttggatcaaccagaaagtcaactttgacaatgtgggaaatgcttacctcgctctgctgcaagtggcaacatttaagggctggatggatattatatatgcagctgttgattccacagagaaagaacaacagccagagtttgagagcaattcactcggttacatttacttcgtagtctttatcatctttggctcattcttcactctgaatctcttcattggcgttatcattgacaacttcaaccaacagcagaaaaagttaggtggccaagacatttttatgacagaagaacagaagaaatactataatgcaatgaaaaaattaggatccaaaaaacctcaaaaacccattccacggcctctgaacaaatgtcaaggtctcgtgttcgacatagtcacaagccagatctttgacatcatcatcataagtctcattatcctaaacatgattagcatgatggctgaatcatacaaccaacccaaagccatgaaatccatccttgaccatctcaactgggtctttgtggtcatctttacgttagaatgtctcatcaaaatctttgctttgaggcaatactacttcaccaatggctggaatttatttgactgtgtggtcgtgcttctttccattgttagtacaatgatttctaccttggaaaatcaggagcacattcctttccctccgacgctcttcagaattgtccgcttggctcggattggccgaatcctgaggcttgtccgggctgcacgaggaatcaggactctcctctttgctctgatgatgtcgcttccttctctgttcaacattggtcttctactctttctgattatgtttatctatgccattctgggtatgaactggttttccaaagtgaatccagagtctggaatcgatgacatattcaacttcaagacttttgccagcagcatgctctgtctcttccagataagcacatcagcaggttgggattccctgctcagccccatgctgcgatcaaaagaatcatgtaactcttcctcagaaaactgccacctccctggcatagccacatcctactttgtcagttacattatcatctcctttctcattgttgtcaacatgtacattgctgtgattttagagaacttcaatacagccactgaagaaagtgaggaccctttgggtgaagatgactttgacatattttatgaagtgtgggaaaagtttgacccagaagcaacacaatttatcaaatattctgccctttctgactttgctgatgccttgcctgagcctttgcgtgtcgcaaagccaaataaatatcaatttctagtaatggacttgcccatggtgagtgaagatcgcctccactgcatggatattcttttcgccttcaccgctagggtactcggtggctctgatggcctagatagtatgaaagcaatgatggaagagaagttcatggaagccaatcctctcaagaagttgtatgaacccatagtcaccaccaccaagagaaaggaagaggaaagaggtgctgctattattcaaaaggcctttcgaaagtacatgatgaaggtgaccaagggtgaccaaggtgaccaaaatgacttggaaaacgggcctcattcaccactccagactctttgcaatggagacttgtctagctttggggtggccaagggcaaggtccactgtgactgagccctcacctccacgcctacctcatagcttcacagccttgccttcagcctctgagctccaggggtcagcagcttagtgtatcaacagggagtggattcaccaaattagccattccattttcttttctggctaaaataaatgatatttcaatttcattttaaataatacttacagagatataagataaggctacttgacaaccagtggtactattataataaggaagaagacaccaggaaggactgtaaaaggacataccaattttaggattgaaatagttcaggccgggcgcagtggctcatgcctgtaatcccagcactttgagaggccaaggcaggtggatcacgaggtcaagagatcgagaccatcctggccaacatgatgaaactccgtctctactaaaaatacaaaaattagctgggcatggtggcgtgcgcctgtagtcccagctacttgggaggctgaggcaggagaatcgcttaaacctgggagacggaggttgcagtgagccaagatcgtgccactgcactccagcctggtgacagagtgagactctgtttcaaaaaagaaaagaaaagaaacatggttcaaattatatctaaacaaaaaagaataagaaacaaaaaacacattaaaattttaagttgtattttctatgtttctagatacatcatttttgtttgatattttcctgatgcaagtatgtggtttatcacatgtagctcttttgcatgctaaatgaaaattcaaaacttgccaataaatgaatagcttattgcagacattttttaccaacattaattattttgggtttgtttaaaacctagaggcacaatcttgacttgtcaattactaccctttcacaagctaccatctcagatatatatatatatataaattcaataaagctttctgtttgtgttcc

SEQ ID NO: 28479 - DNA, 5729 bp, Homo sapiens
  source 1..5729: mol_type = unassigned DNA
tcctgctatacccacagtggtggtcatctcttctgatcttcacagccaatcagctcccaaggcccctgacctcagctcagcttttgtagatccttatgacaccatcctttaagactggaatcctagggcaggctgttttattcccgcctcctgaggcctttctgaggatctgtggcttgtctctgtcctgagggtgaagatggatgacagatgctacccagtaatctttccagatgagcggaatttccgccccttcacttccgactctctggctgcaattgagaagcggattgccatccaaaaggagaaaaagaagtctaaagaccagacaggagaagtaccccagcctcggcctcagcttgacctaaaggcctccaggaagttgcccaagctctatggcgacattcctcgtgagctcataggaaagcctctggaagacttggacccattctaccgaaatcataagacatttatggtgttaaacagaaagaggacaatctaccgcttcagtgccaagcatgccttgttcatttttgggcctttcaattcaatcagaagtttagccattagagtctcagtccattcattgttcagcatgttcattatcggcaccgttatcatcaactgcgtgttcatggctacagggcctgctaaaaacagcaacagtaacaatactgacattgcagagtgtgtcttcactgggatttatatttttgaagctttgattaaaatattggcaagaggtttcattctggatgagttttctttccttcgagatccatggaactggctggactccattgtcattggaatagcgattgtgtcatatattccaggaatcaccatcaaactattgcccctgcgtaccttccgtgtgttcagagctttgaaagcaatttcagtagtttcacgtctgaaggtcatcgtgggggccttgctacgctctgtgaagaagctggtcaacgtgattatcctcaccttcttttgcctcagcatctttgccctggtaggtcagcagctcttcatgggaagtctgaacctgaaatgcatctcgagggactgtaaaaatatcagtaacccggaagcttatgaccattgctttgaaaagaaagaaaattcacctgaattcaaaatgtgtggcatctggatgggtaacagtgcctgttccatacaatatgaatgtaagcacaccaaaattaatcctgactataattatacgaattttgacaactttggctggtcttttcttgccatgttccggctgatgacccaagattcctgggagaagctttatcaacagaccctgcgtactactgggctctactcagtcttcttcttcattgtggtcattttcctgggctccttctacctgattaacttaaccctggctgttgttaccatggcatatgaggagcagaacaagaatgtagctgcagagatagaggccaaggaaaagatgtttcaggaagcccagcagctgttaaaggaggaaaaggaggctctggttgccatgggaattgacagaagttcacttacttcccttgaaacatcatattttaccccaaaaaagagaaagctctttggtaataagaaaaggaagtccttctttttgagagagtctgggaaagaccagcctcctgggtcagattctgatgaagattgccaaaaaaagccacagctcctagagcaaaccaaacgactgtcccagaatctatcactggaccactttgatgagcatggagatcctctccaaaggcagagagcactgagtgctgtcagcatcctcaccatcaccatgaaggaacaagaaaaatcacaagagccttgtctcccttgtggagaaaacctggcatccaagtacctcgtgtggaactgttgcccccagtggctgtgcgttaagaaggtcctgagaactgtgatgactgacccgtttactgagctggccatcaccatctgcatcatcatcaacactgtcttcttggccatggagcatcacaagatggaggccagttttgagaagatgttgaatatagggaatttggttttcactagcatttttatagcagaaatgtgcctaaaaatcattgcgctcgatccctaccactactttcgccgaggctggaacatttttgacagcattgttgctcttctgagttttgcagatgtaatgaactgtgtacttcaaaagagaagctggccattcttgcgttccttcagagtgctcagggtcttcaagttagccaaatcctggccaactttgaacacactaattaagataatcggcaactctgtcggagcccttggaagcctgactgtggtcctggtcattgtgatctttattttctcagtagttggcatgcagctttttggccgtagcttcaattcccaaaagagtccaaaactctgtaacccgacaggcccgacagtctcatgtttacggcactggcacatgggggatttctggcactccttcctagtggtattccgcatcctctgcggggaatggatcgaaaatatgtgggaatgtatgcaagaagcgaatgcatcatcatcattgtgtgttattgtcttcatattgatcacggtgataggaaaacttgtggtgctcaacctcttcattgccttactgctcaattcctttagcaatgaggaaagaaatggaaacttagaaggagaggccaggaaaactaaagtccagttagcactggatcgattccgccgggctttttgttttgtgagacacactcttgagcatttctgtcacaagtggtgcaggaagcaaaacttaccacagcaaaaagaggtggcaggaggctgtgctgcacaaagcaaagacatcattcccctggtcatggagatgaaaaggggctcagagacccaggaggagcttggtatactaacctctgtaccaaagaccctgggcgtcaggcatgattggacttggttggcaccacttgcggaggaggaagatgacgttgaattttctggtgaagataatgcacagcgcatcacacaacctgagcctgaacaacaggcctatgagctccatcaggagaacaagaagcccacgagccagagagttcaaagtgtggaaattgacatgttctctgaagatgagcctcatctgaccatacaggatccccgaaagaagtctgatgttaccagtatactatcagaatgtagcaccattgatcttcaggatggctttggatggttacctgagatggttcccaaaaagcaaccagagagatgtttgcccaaaggctttggttgctgctttccatgctgtagcgtggacaagagaaagcctccctgggtcatttggtggaacctgcggaaaacctgctaccaaatagtgaaacacagctggtttgagagctttattatctttgtgattctgctgagcagtggggcactgatatttgaagatgttcaccttgagaaccaacccaaaatccaagaattactaaattgtactgacattatttttacacatatttttatcctggagatggtactaaaatgggtagccttcggatttggaaagtatttcaccagtgcctggtgctgccttgatttcatcattgtgattgtctctgtgaccaccctcattaacttaatggaattgaagtccttccggactctacgagcactgaggcctcttcgtgcgctgtcccagtttgaaggaatgaaggtggtggtcaatgctctcataggtgccatacctgccattctgaatgttttgcttgtctgcctcattttctggctcgtattttgtattctgggagtatacttcttttctggaaaatttgggaaatgcattaatggaacagactcagttataaattataccatcattacaaataaaagtcaatgtgaaagtggcaatttctcttggatcaaccagaaagtcaactttgacaatgtgggaaatgcttacctcgctctgctgcaagtggcaacatttaagggctggatggatattatatatgcagctgttgattccacagagaaagaacaacagccagagtttgagagcaattcactcggttacatttacttcgtagtctttatcatctttggctcattcttcactctgaatctcttcattggcgttatcattgacaacttcaaccaacagcagaaaaagttaggtggccaagacatttttatgacagaagaacagaagaaatactataatgcaatgaaaaaattaggatccaaaaaacctcaaaaacccattccacggcctctgaacaaatgtcaaggtctcgtgttcgacatagtcacaagccagatctttgacatcatcatcataagtctcattatcctaaacatgattagcatgatggctgaatcatacaaccaacccaaagccatgaaatccatccttgaccatctcaactgggtctttgtggtcatctttacgttagaatgtctcatcaaaatctttgctttgaggcaatactacttcaccaatggctggaatttatttgactgtgtggtcgtgcttctttccattgttagtaagtaaaatcagcagtcagagggactttaagaaccagaagtaagtttgtaaatcttatcattttttgaagtttgttcaaactatccacaaagcagaaaactgggccaagtgtactttctgaaagaatagacaggggtactaatgccattctctactgggaagttgctaggagatagagagtaatttctgttcccttaactcactacacaactgaaatagagttcaataatcatgcagctaatgtattcaatggaaatagacaaaattaaaatgactcagaagtttttgtggtggtaacctgatttattcagataattgagtcaaagttctacctttcctgtgcaactataagccctatgagcattttttagttttaaggatttactgcccatgttttttcctttgttcaaaatccacatgggtgccagatcacaattattgtgcccctgtggcactgctgtgccccctttcaacccctatacaaggccccatggcccactctagattgggctttcaagagtatatcattcagacaatcaaagctttttttctattctatatcccatgttaacttaaaccacagtgtgaactgtgcttgtctcagattctttgaccccgcttaccaaccagcctcattctctaatcagtatatttttcctaatcacacgcagggttaactaaaaggcttataaaagaatacaaaagaaagaaggttattaccatactccttcttataaaacacacacatacacacatcaactttaaaattaaattcttcatggctaaaccataagtgcttactctgggtttttgaagtctggttttaattaaactgttaacttgacattttataattatgtaaaactgtccaggagcccttctcatagttcaaaacacaatgaagacaaagaaaactgattttccaaatggaagcttttttgcgatctcagaaagaatgcatcaaacagatatattggatcaagatattttggttcctaatgctactgcagcattgcagatgtttcagagaacaacaacaaatatgctacagttcatagtgtgttctggtttctaagccatgatgttaatgtagataaagcttatcaatagattcttccatgagtttacagttaagtagacctttaatttttattagtcaattccaatcacaagtcttggtgaaattgacagcagcaaaaaa

SEQ ID NO: 28480 - DNA, 6500 bp, Homo sapiens; identical to SEQ ID NO: 28478
  source 1..6500: mol_type = unassigned DNA

SEQ ID NO: 28481 - DNA, 6816 bp, Homo sapiens
  source 1..6816: mol_type = unassigned DNA
ccgcccgcgggcaccatgacagctctgagcgctggggttacagactgtggttttgtgcttgctcaccaaagctaacctcagcatgctcaaaaggaagcagagttccagggtggaagcccagccagtcactgactttggtcctgatgagtctctgtcggataatgctgacatcctctggattaacaaaccatgggttcactctttgctgcgcatctgtgccatcatcagcgtcatttctgtttgtatgaatacgccaatgaccttcgagcactatcctccacttcagtatgtgaccttcactttggatacattattgatgtttctctacacggcagagatgatagcaaaaatgcacatccggggcattgtcaagggggatagttcctatgtgaaagatcgctggtgtgtttttgatggatttatggtcttttgcctttgggtttctttggtgctacaggtgtttgaaattgctgatatagttgatcagatgtcaccttggggcatgttgcggattccacggccactgattatgatccgagcattccggatttatttccgatttgaactgccaaggaccagaattacaaatattttaaagcgatcgggagaacaaatatggagtgtttccatttttctacttttctttctacttctttatggaattttaggagttcagatgtttggaacatttacttatcactgtgttgtaaatgacacaaagccagggaatgtaacctggaatagtttagctattccagacacacactgctcaccagagctagaagaaggctaccagtgcccacctggatttaaatgcatggaccttgaagatctgggacttagcaggcaagagctgggctacagtggctttaatgagataggaactagtatattcaccgtctatgaggccgcctcacaggaaggctgggtgttcctcatgtacagagcaattgacagctttccccgttggcgttcctacttctatttcatcactctcattttcttcctcgcctggcttgtgaagaacgtgtttattgctgttatcattgaaacatttgcagaaatcagagtacagtttcaacaaatgtggggatcgagaagcagcactacctcaacagccaccacccagatgtttcatgaagatgctgctggaggttggcagctggtagctgtggatgtcaacaagccccagggacgcgccccagcctgcctccagaaaatgatgcggtcatccgttttccacatgttcatcctgagcatggtgaccgtggacgtgatcgtggcggctagcaactactacaaaggagaaaacttcaggaggcagtacgacgagttctacctggcggaggtggcttttacagtactttttgatttggaagcacttctgaagatatggtgtttgggatttactggatatattagctcatctctccacaaattcgaactactactcgtaattggaactactcttcatgtatacccagatctttatcattcacaattcacgtactttcaggttctccgagtagttcggctgattaagatttcacctgcattagaagactttgtgtacaagatatttggtcctggaaaaaagcttgggagtttggttgtatttactgccagcctcttgattgttatgtcagcaattagtttgcagatgttctgctttgtcgaagaactggacagatttactacgtttccgagggcatttatgtccatgttccagatcctcacccaggaaggatgggtggacgtaatggaccaaactctaaatgctgtgggacatatgtgggcacccgtggttgccatctatttcattctctatcatctttttgccactctgatcctcctgagtttgtttgttgctgttattttggacaacttagaacttgatgaagacctaaagaagcttaaacaattaaagcaaagtgaagcaaatgcggacaccaaagaaaagctccctttacgcctgcgaatctttgaaaaatttccaaacagacctcaaatggtgaaaatctcaaagcttccttcagattttacagttcctaaaatcagggagagttttatgaagcagtttattgaccgccagcaacaggacacatgttgcctcctgagaagcctcccgaccacctcttcctcctcctgcgaccactccaaacgctcagcaattgaggacaacaaatacatcgaccaaaaacttcgcaagtctgttttcagcatcagggcaaggaaccttctggaaaaggagaccgcagtcactaaaatcttaagagcttgcacccgacagcgcatgctgagcggatcatttgaggggcagcccgcaaaggagaggtcaatcctcagcgtgcagcatcatatccgccaagagcgcaggtcactaagacatggatcaaacagccagaggatcagcaggggaaaatctcttgaaactttgactcaagatcattccaatacagtgagatatagaaatgcacaaagagaagacagtgaaataaagatgattcaggaaaaaaaggagcaagcagagatgaaaaggaaagtgcaagaagaggaactcagagagaaccacccatacttcgataagccactgttcattgtcgggcgagaacacaggttcagaaacttttgccgggtggtggtccgagcacgcttcaacgcatctaaaacagaccctgtcacaggagctgtgaaaaatacaaagtaccatcaactttatgatttgctgggattggtcacttacctggactgggtcatgatcatcgtaaccatctgctcttgcatttccatgatgtttgagtccccgtttcgaagagtcatgcatgcacctactttgcagattgctgagtatgtgtttgtgatattcatgagcattgagcttaatctgaagattatggcagatggcttatttttcactccaactgctgtcatcagggacttcggtggagtaatggacatatttatatatcttgtgagcttgatatttctttgttggatgcctcaaaatgtacctgctgaatcgggagctcagcttctaatggtccttcggtgcctgagacctctgcgcatattcaaactggtgccccagatgaggaaagttgttcgagaacttttcagcggcttcaaggaaatttttttggtctccattcttttgctgacattaatgctcgtttttgcaagctttggagttcagctttttgctggaaaactggccaagtgcaatgatcccaacattattagaagggaagattgcaatggcatattcagaattaatgtcagtgtgtcaaagaacttaaatttaaaattgaggcctggagagaaaaaacctggattttgggtgccccgtgtttgggcgaatcctcggaactttaatttcgacaatgtgggaaacgctatgctggcgttgtttgaagttctctccttgaaaggctgggtggaagtgagagatgttattattcatcgtgtggggccgatccatggaatctatattcatgtttttgtattcctgggttgcatgattggactgaccctttttgttggagtagttattgctaatttcaatgaaaacaaggggacggctttgctgaccgtcgatcagagaagatgggaagacctgaagagccgactgaagatcgcacagcctcttcatcttccgcctcgcccggataatgatggttttagagctaaaatgtatgacataacccagcatccattttttaagaggacaatcgcattactcgtcctggcccagtcggtgttgctctctgtcaagtgggacgtcgaggacccggtgaccgtacctttggcaacaatgtcagttgttttcaccttcatctttgttctggaggttaccatgaagatcatagcaatgtcgcctgctggcttctggcaaagcagaagaaaccgatacgatctcctggtgacgtcgcttggcgttgtatgggtggtgcttcactttgccctcctgaatgcatatacttacatgatgggcgcttgtgtgattgtatttaggtttttctccatctgtggaaaacatgtaacgctaaagatgctcctcttgacagtggtcgtcagcatgtacaagagcttctttatcatagtaggcatgtttctcttgctgctgtgttacgcttttgctggagttgttttatttggtactgtgaaatatggggagaatattaacaggcatgcaaatttttcttcggctggaaaagctattaccgtactgttccgaattgtcacaggtgaagactggaacaagattatgcatgactgtatggttcagcctccgttttgtactccagatgaatttacatactgggcaacagactgtggaaattatgctggggcacttatgtatttctgttcattttatgtcatcattgcctacatcatgctaaatctgcttgtagccataattgtggagaatttctccttgttttattccactgaggaggaccagcttttaagttacaatgatcttcgccactttcaaataatatggaacatggtggatgataaaagagagggggtgatccccacgttccgcgtcaagttcctgctgcggctactgcgtgggaggctggaggtggacctggacaaggacaagctcctgtttaagcacatgtgctacgaaatggagaggctccacaatggcggcgacgtcaccttccatgatgtcctgagcatgctttcataccggtccgtggacatccggaagagcttgcagctggaggaactcctggcgagggagcagctggagtacaccatagaggaggaggtggccaagcagaccatccgcatgtggctcaagaagtgcctgaagcgcatcagagctaaacagcagcagtcgtgcagtatcatccacagcctgagagagagtcagcagcaagagctgagccggtttctgaacccgcccagcatcgagaccacccagcccagtgaggacacgaatgccaacagtcaggacaacagcatgcaacctgagacaagcagccagcagcagctcctgagccccacgctgtcggatcgaggaggaagtcggcaagatgcagccgacgcagggaaaccccagaggaaatttgggcagtggcgtctgccctcagccccaaaaccaataagccattcagtgtcctcagtcaacttacggtttggaggaaggacaaccatgaaatctgtcgtgtgcaaaatgaaccccatgactgacgcggcttcctgcggttctgaagttaagaagtggtggacccggcagctgactgtggagagcgacgaaagtggggatgaccttctggatatttaggtggatgtcaatgtagatgaatttctagtggtggaaaccgttttctaataatgtccttgattgtccagtgagcaatctgtaattgatctataactgaattccagcttgtcacaagatgtttataaattgattttcatcctgccacagaaaggcataagctgcatgtatgatgggttactatcaatcattgctcaaaaaaatttttgtataatgacagtactgataatattagaaatgataccgcaagcaaatgtatatcacttaaaaatgtcatatattctgtctgcgtaaactaaggtatatattcatatgtgctctaatgcagtattatcaccgccccgcaaaagagtgctaagcccaaagtggctgatatttagggtacaggggttatagctttagttcacatctttcccatttccactagaaatatttctcttgagagaatttattatttatgattgatctgaaaaggtcagcactgaacttatgctaaaatgatagtagttttacaaactacagattctgaattttaaaaagtatcttctttttctcgtgttatatttttaaatatacacaagacatttggtgaccagaacaagttgatttctgtcctcagttatgttaatgaaactgttgcctccttctaagaaaattgtgtgtgcaagcaccaggcaaagaaatggactcaggatgcttagcggtttaaaacaaacctgtagataaatcacttgagtgacatagttgcgcaaagatgttaagtttcttaagaaaccttttaataactgagtttagcaaaaagaataaaactatatagctcaatttatttaaaaaaatctttgcatgtgtgatgttatcattggcttcatttcttacccaaggtatgtctgttttgccataaatcagcagagtcatttcattctgggtgatcctaacacaccattgctacgttagatttgaaatgacatctctgttaaaagaatcttctatggaaataatggtgccctgcaaaatcttcctttgaactcacaggttagggatcacacaacttacttaatcgttttttgtttttgttttttttccttatatgtcaatggcccatgtcctccgggaaaattagaaaagcaaaatgattacaaagtgctgttagatttcttgtgctgggccagccaagtagaagtggacttgacttggacctttaactattttattacagattggacatttgctgttcagatgttttttaacagagggattatctcagaatcctgtgacctccaggttgttttataatctatttttctctatttaacattcctcagatagataggcaaataggacattccttctgtgtcacagaagtatcgtggtagtggcagtctacagtttatatgattcattgtaactatgagataaagaacaaccagtcatgtggccaaaaggattagatttgatttgatgttcacttggagtttactttttgtacatacaagataaaataaatattggatttgtaaaat

SEQ ID NO: 28482 - DNA, 2864 bp, Homo sapiens
  source 1..2864: mol_type = unassigned DNA
gaggggcccgcgtccccgcccgccctgggcgccgcgcctggcactgatcctgccggtcgcccactgtcgccgccgccgccgcccgcgggcaccatgacagctctgagcgctggggttacagactgtggttttgtgcttgctcaccaaagctaacctcagcatgctcaaaaggaagcagagttccagggtggaagcccagccagtcactgactttggtcctgatgagtctctgtcggataatgctgacatcctctggattaacaaaccatgggttcactctttgctgcgcatctgtgccatcatcagcgtcatttctgtttgtatgaatacgccaatgaccttcgagcactatcctccacttcagtatgtgaccttcactttggatacattattgatgtttctctacacggcagagatgatagcaaaaatgcacatccggggcattgtcaagggggatagttcctatgtgaaagatcgctggtgtgtttttgatggatttatggtcttttgcctttgggtttctttggtgctacaggtgtttgaaattgctgatatagttgatcagatgtcaccttggggcatgttgcggattccacggccactgattatgatccgagcattccggatttatttccgatttgaactgccaaggaccagaattacaaatattttaaagcgatcgggagaacaaatatggagtgtttccatttttctacttttctttctacttctttatggaattttaggagttcagatgtttggaacatttacttatcactgtgttgtaaatgacacaaagccagggaatgtaacctggaatagtttagctattccagacacacactgctcaccagagctagaagaaggctaccagtgcccacctggatttaaatgcatggaccttgaagatctgggacttagcaggcaagagctgggctacagtggctttaatgagataggaactagtatattcaccgtctatgaggccgcctcacaggaaggctgggtgttcctcatgtacagagcaattgacagctttccccgttggcgttcctacttctatttcatcactctcattttcttcctcgcctggcttgtgaagaacgtgtttattgctgttatcattgaaacatttgcagaaatcagagtacagtttcaacaaatgtggggatcgagaagcagcactacctcaacagccaccacccagatgtttcatgaagatgctgctggaggttggcagctggtagctgtggatgtcaacaagccccagggacgcgccccagcctgcctccagaaaatgatgcggtcatccgttttccacatgttcatcctgagcatggtgaccgtggacgtgatcgtggcggctagcaactactacaaaggagaaaacttcaggaggcagtacgacgagttctacctggcggaggtggcttttacagtactttttgatttggaagcacttctgaagatatggtgtttgggatttactggatatattagctcatctctccacaaattcgaactactactcgtaattggaactactcttcatgtatacccagatctttatcattcacaattcacgtactttcaggttctccgagtagttcggctgattaagatttcacctgcattagaagactttgtgtacaagatatttggtcctggaaaaaagcttgggagtttggttgtatttactgccagcctcttgattgttatgtcagcaattagtttgcagatgttctgctttgtcgaagaactggacagatttactacgtttccgagggcatttatgtccatgttccagatcctcacccaggaaggatgggtggacgtaatggaccaaactctaaatgctgtgggacatatgtgggcacccgtggttgccatctatttcattctctatcatctttttgccactctgcctccctctcttatccgtgacctctgtggcactcaagacgcctgtccatcctgccttcctctccagcctccaaaccctctgcctggaagccagactctggccagacttactcaccaggccctcaccacaccacctggaatgcgttcctcacagctcttttccaaaatcagtcttctccttggcatctgcgtggcttgggagagcatccttggctctctgtcattgtctcacaatcttcgataagtagtgttcggaaagtgcccccctggcccatgtgcccagatgggctctccaagtctaaatgcttcaaaatggtacagaactaaatgtgtgaatttatgatggggcttcatttctggtcctccttcttcacacttgcgtggccgcccttcccatccgctctccaattttctttcacgtttctgctttctgagaagaaataagactgatttctgggatggagcatgagagagacagatgcagagagagagagagacaaagcgtgtttccgtgggagatgcccacacacctcacttgggagcatcggcagtgttggtacccacacaggtgtgttttgacatccaagacttgaccctaattcttcttggaacctgatggggagagaaccttgctgggggccccacatgggccaggggcagccagggcagagttgggcagctgcctgagagttctcggtggagaggcccggaatatcccacaagaacaagtctccgttagttccaagtggaatgacagccctttctgagtttccctgagttgagagctaatacatgtgttgtgggaacaacagcccaagccaaaggccacgcggaggccaggcgtggtgactcacacctgtaatcctagcactttgggaggccaagatccacggatctcatgagctcaggagttcaagaccagcctggtcaaccttgtctct

SEQ ID NO: 28483 - DNA, 1126 bp, Homo sapiens
  source 1..1126: mol_type = unassigned DNA
gtgcttgctcaccaaagctaacctcagcatgctcaaaaggaagcagagttccagggtggaagcccagccagtcactgactttggtcctgatgagtctctgtcggataatgctgacatcctctggattaacaaaccatgggttcactctttgctgcgcatctgtgccatcatcagcgtcatttctgtttgtatgaatacgccaatgaccttcgagcactatcctccacttcagtatgtgaccttcactttggatacattattgatgtttctctacacggcagagatgatagcaaaaatgcacatccggggcattgtcaagggggatagttcctatgtgaaagatcgctggtgtgtttttgatggatttatggtcttttgcctttgggtttctttggtgctacaggtgtttgaaattgctgatatagttgatcagatgtcaccttggggcatgttgcggattccacggccactgattatgatccgagcattccggatttatttccgatttgaactgccaaggaccagaattacaaatattttaaagcgatcgggagaacaaatatggagtgtttccatttttctacttttctttctacttctttatggaattttaggagttcagatgtttggaacatttacttatcactgtgttgtaaatgacacaaagccaggactctcactctgacacccaggctggagtgcagtggcatgatctcagcttactgaaacatccatctcccaggttcaagagattctcctgcttcagccccccaagtagctgggactacaggcgtgtgccaccacacccgggtaatttttgtatttttagcagagacagggcttcatcatgttggccaggctggtctcgaactcctgacctcaagagatctgcctgcctcagcctcccaaagtgctgggattaaaggcctgagccaccatgtccagccttatttttaaaaaaaaatttcagttcaatattactgcattttaaagccccacacataagcagaaaaactgtcagcaccattttaccgttactattagcccagacataaatgtagttttactcttagagactcaagaaatatccaaactcaaaataaaacagaaaatgttaattgatttg

SEQ ID NO: 28484 - DNA, 736 bp, Homo sapiens
  source 1..736: mol_type = unassigned DNA
ccgcccgcgggcaccatgacagctctgagcgctggggttacagactgtggttttgtgcttgctcaccaaagctaacctcagcatgctcaaaaggaagcagagttccagggtggaagcccagccagtcactgactttggtcctgatgagtctctgtcggataatgctgacatcctctggattaacaaaccatgggttcactctttgctgcgcatctgtgccatcatcagcgtcatttctgtttgtatgaatacgccaatgaccttcgagcactatcctccacttcagtatgtgaccttcactttggatacattattgatgtttctctacacggcagagatgatagcaaaaatgcacatccggggcattgtcaagggggatagttcctatgtgaaagatcgctggtgtgtttttgatggatttatggtcttttgcctttgggtttctttggtgctacaggtgtttgaaattgctgatatagttgatcagatgtcaccttggggcatgttgcggattccacggccactgattatgatccgagcattccggatttatttccgatttgaactgccaaggaccagaattacaaatattttaaagcgatcgggagaacaaatatggagtgtttccatttttctacttttctttctacttctttatggaattttaggagttcagatgtttggaacatttacttatcactgtgttgtaaatgacacaaagccaggtttgtcaata

SEQ ID NO: 28485 - DNA, 11696 bp, Homo sapiens
  source 1..11696: mol_type = unassigned DNA
caccctcggagcccccggagctccccgccaagcgccatccccgcgggcggaggggagcgcgggtcgcgcgccgtggagagccgggacgcggattagcgcccgcaggagcctcctgcgcccgttgaggcgctaaagggcttaccccggaggcgggtggaagggcgggcagaggctcctcttaaataccgctcccggccgcacttcgcgctcaccccggcgtccgctttctccctcgcccacagctgccggatagtgctgaagaggagggggcgttccccagaccatggcatctacggaaggtgccaacaatatgcccaagcaggtggaagtgcgaatgcacgacagtcatcttggctcagaggaacccaagcaccggcacctgggcctgcgcctgtgtgacaagctggggaagaatctgctgctcaccctgacggtgtttggtgtcatcctgggagcagtgtgtggagggcttcttcgcttggcatctcccatccaccctgatgtggttatgttaatagccttcccaggggatatactcatgaggatgctaaaaatgctcattctccctctaatcatctccagcttaatcacagggttgtcaggcctggatgctaaggctagtggccgcttgggcacgagagccatggtgtattacatgtccacgaccatcattgctgcagtactgggggtcattctggtcttggctatccatccaggcaatcccaagctcaagaagcagctggggcctgggaagaagaatgatgaagtgtccagcctggatgccttcctggaccttattcgaaatctcttccctgaaaaccttgtccaagcctgctttcaacagattcaaacagtgacgaagaaagtcctggttgcaccaccgccggacgaggaggccaacgcaaccagcgctgttgtctctctgttgaacgagactgtgactgaggtgccggaggagactaagatggttatcaagaagggcctggagttcaaggatgggatgaacgtcttaggtctgatagggtttttcattgcttttggcatcgctatggggaagatgggagatcaggccaagctgatggtggatttcttcaacattttgaatgagattgtaatgaagttagtgatcatgatcatgtggtactctcccctgggtatcgcctgcctgatctgtggaaagatcattgcaatcaaggacttagaagtggttgctaggcaactggggatgtacatggtaacagtgatcataggcctcatcatccacgggggcatctttctccccttgatttactttgtagtgaccaggaaaaaccccttctccttttttgctggcattttccaagcttggatcactgccctgggcaccgcttccagtgctggaactttgcctgtcacctttcgttgcctggaagaaaatctggggattgataagcgtgtgactagattcgtccttcctgttggagcaaccattaacatggatggtacagccctttatgaagcggtagccgccatctttatagcccaaatgaatggtgttgtcctggatggaggacagattgtgactgtaagcctcacagccaccctggcaagcgtcggcgcggccagtatccccagtgccgggctggtcaccatgctcctcattctgacagccgtgggcctgccaacagaggacatcagcctgctggtggctgtggactggctgctggacaggatgagaacttcagtcaatgttgtgggtgactcttttggggctgggatagtctatcacctctccaagtctgagctggataccattgactcccagcatcgagtgcatgaagatattgaaatgaccaagactcaatccatttatgatgacatgaagaaccacagggaaagcaactctaatcaatgtgtctatgctgcacacaactctgtcatagtagatgaatgcaaggtaactctggcagccaatggaaagtcagccgactgcagtgttgaggaagaaccttggaaacgtgagaaataaggatatgagtctcagcaaattcttgaataaactccccagcgtatcctatggtaactgatgatataaacaagctttctttaaaaaggaaaaaaatgcgtatatttctatgtttacttaatctgttagccgaggcttagaggagctcttgtgagtcagtgatgacaggcacggtgctgtgtctttgccaaataatgctttataaccgtctaattttctcacttgtattattatttgaatggatgctgctggaggaatcagttggaattgaagacacgttcttgccagcttcccttttctcccaagatgcagaaatgtggatgctcttttcccaggggacatgagtaaagcagtgtggtacactccagggacttgggaaaatgagcaaacacacagcgtgttattccttaaagtgttctccatgtctcgccttgttatgcacaagagattctattaaaagcctctagaagtaactccccttaaaatgtctagtaaagcttgcacatggattgattaaaagcaaatacctgtcttagggaattctgacaatttatcttccatatgctctttaagtaaaatgtttcaaagacagttttaaagggagccatgctcttaaaggcagttgattaaagaacctgttacatctctgccttaccctgtgtaatctgtgagaacaatggttgaaatttcaaagtatgtttcattattctttctaaatttgataattgattaggaagtattttatatataaccactgtagatattgacaaaagtaagagagcacagtcaacataaagtttaaccagagttaaatattcaaatttatttatgttcggtttgccttcacctggtgtagtaaaatcaaatgagattatttggtatgtgttttgctttgtttaacccaaaagattattttttggttcctaaagaaaaagatatttttaatctgtcaattatttcagtcatcatctcatcgtcctagaaagcctggtcattttactgtcctcacacatggaagacacttgtgttggctgtgcctcttttaatgtcatctcttgatgaaacaaaaatactggtatttatccaatatgttgaaagcgttttgttatcttctatcaaagcacataaaaccagttataggacacagttggaagcagagccagtcttcctcctcagtcttctcagtagaaaggaacagaaaacaaacatctgtgcaaaaccctataaaagtgatattcctatggcagagtccaggcagccttgaacaatgacatggcaacaaaggatggctctgtacaacttcacagatggaatcttgtttaaggctgtgaagttttaaggaataaataatataattggtgtagcacagtgccttgcatgcagtaggcagccaacaaatccttaatgattggtaatgcaagctaaaatttttaatgtctctactatccttttttattgaataacgcacagtattttcctaaggttgctgggtttgggagtaagcttgggacttgaatcattgagaaataaagcacatttgactctaagaagtatgtagaaccttgtttataggtgagaataggctgtattatatgaaaccagcggagggatgctgagacagtcatggtttatagaatccaaattctctgagatgagggtgcttatggacctcaaatagcctttcttatctgctccttgtgacttctctcttttaaatcagatacctttgaaacatacaagagacatgagattccagttgtttttgtctcctaaaccctagtgatttttggataaggatcactactgaacagtattaggcaacttttcatttttgcttttcaaatgacattggtctttatttccagtagatgggcagtaaacagggtcagggtggtcaagggatatgattaagtgtagtagtagaaaatgcattctttttttttttttttttttagacagagtcttgctctgttgctcaggctggagtacagtggcacgatctcagctcactgcactgcaatgtccacctctctagttcaagcgattctcctgtctcagcctcccgagtagctgggactacaggcacatgccaccatgcctggctaattttttgtatttttagtacagatgggtttcattatgttagccaggatggtctcgatctcctgacctcatgatccacccgccatggcctcccaaagtgctgggattacaggcgtgagccaccgtgcccggccagaaaatacattctttacagcaaatgttataggttaaggagacagttcctgggtttagctgtgaaactgtttaggattttctttaagtggtgttcccaagagcttttttctggtaagttggaggctataggcaaagcgtctaggagcttgttgttttttgctatggaaggccagctttgggatctatatacatgggcatgtttctcaatggagtggtcacaggattctcttctcagaactctgcctgaaacctttccggtgtgttttgtcttcaactttttcctagctatcctattagcctgtaaatatgtcagcagacaatgtgtttggaagaaacaaggtgtacaacttcacaaagcaagttttttctggtctgagacttactgtgtgcaggaagtctcgtgagaatatacttagaaaatcacacttatctggaaattcaataagtcatattaaaaatatacaatttcttgaactcaggactagcctgaaaatccaaaatgcatgtagagttgacatgttgacatatgtctatgtcctctgtttttatttaagcctcatttatttctcccttgccatgcccatttgggattttctttgcccagcatatgtgccataaacagaacaaatggatccagggtatacctctaataacctttatctaaatagaatacatttaacctgtcaattatatgtatagatttatcctaattggttcaacatatatatgaatgcttgtaatagtctgttactatttgataatgcataaatgttatatttatatacagttacagcaggccagaaacatacatacactgcatcctgtaaggtctgtaaatcagggcttcggcaatgccattttgctatagactcattcatgttttttaggaatcagaatcatttcaggagaaaaccaactaagtagactttaattcttctctttctcattcttgccctttgagaaacccaagtggaatcatcacttaattacttactcaaattcaatgaatcaaatccaatccaatcagtgagaagaatagcttatctttcaaggtaatactttaccttagatctttgagggcatgcttcccatacaaagagcatcagaaaatcagggcaatcatctagatctcacagatcttcaacataggactctaggttatgagagctgaaccacatagctatcagtttcagtttttacttcctattgagtgtgtagaaacacagcctatggttttgctgtctgcggaagttaccataccctgtaaaagacaaatatttctttctcctctcgaaccactagtcagcctggatattcatgaaagctgaaagaaggggtgccaaaatgcctagctcctggatttagactcatggaatatgagaaaggcttagggaaaattcaagtcatggggagattcctgctaggtgatgccaggaatctcaatgacctgttgattagagggtctctggtcatttccacttgtgtgtggagaaatacatcatttgcatatgtatctagtcaagaagcccttttggagcaaagtggttgggaaactcatttactgggtccaccaaaggaaacccaattctgccatgtttttgcaaatactacacgtccctttgctctcaatagcaaaagtgatgttatagttttttttacttttgtcagaatcaaggcttcggccacctgtgcaatattttcccatggaatgcagcagtaaatccaagtaggtatatccgtgctcagagagaattctccatagttctgactcctgaaaaacaagtctcattagctctcatctagtttgatgactaaaagtgcacagcagttataccccagtggaagtgatttttctcacctagctgctctctaactcttacggctatctagttgtctgagctgctggtttgttttacttattctccaactgaactcattccaaaccaagaaaaaggaccaaatgaaattttcagttattatcatacttgctccttgaataagaatgctagagtctggaggcagaagaagactaagttaaaaaaaaaacagcctgaaggaattctggagtgagttttgtaagtctaattgtcaaagaagataaatggtctcagtatctgtagtaatttctggttaagcctagagggatcactgagtgccaatccaagcaggtggcactagaggcagattgttctcctagcatagagtgagtttccagctgctcatgacacattttcttatgattttccctaaaagaaaaccaaattttctactccacctcttcctttcctatcattccacttattgttgctgctttgctaacagccagcttagtaagccatcacacaagttagtgtgaggcttggttttaaaatagataacagagaatcttgattaaatagtatccaactttgtagcataacacagctaattcaggcaatgacatagagatgataagaaacaacatggtttggtagagggaacatttgatttagactctgcccatttttagctgtatgacttacataagtcattttgtgtccaagcctcattttctcccatatgaaaagtgaaggggttggattaaatgactaaaatccccttccagccctatgagcccaatgtattatgatctctgctttgtttccttcttaagaggcttcctactataaaatgtgacctatttacattttaagttgaagtagcccacaataatgaataatcaatttagatttttctcatctcctttgggagaaattaaattcaagcctctattcatttgatgttttacaacaagcttcaaagttggccatgttcattcacagtttgatattttgagacaccaataaaagttttttaataaaagttcccttgacttaaactcaccttcctaatagaagtagtgatttggctcacggaaaaatgtttccagagtcaacatgagaggactggatgaacctacagcctcactcaagctgttgcatcattgctgctgtagcaacagagccctctctgaatacccaaaacacacaattttctccaacaattctaattgcccacccagtatgggaatttgagagcctttggtgaataaccttgatcactcttttgaaatttggtacaacacttgcacaatcacggcaactgtttgtaaatatcttttcttctccgccagtatgtagacatgcacacccattcacaagtaagcccgcaaattcattttcacattttcctcttggtttgtttttatcatgggtatcacattgcaggaagagatgctctaacttacaagaatggaattttctgactatcattgccctcttcaaggcctgattagtttgtagggtggatgggatacaatgcatggtctacaaggtccatgtcaccagccatgatctttaaacaacctcttgcactttctggcactgctgcaatggcccatggtggacacctctgctgtttgtccaaacttctgctaaatagagtagtgttggtatttgttgtgttgtgaactcctttgttgtcagagaagacttcagctcttcaggtttgcaagggcaagatgtaaagctaggactgaaaggattgggttttgtttttcggccggcttttttccattagtgcaaaaaacctgatgcaagggcagcaagataaacacaatttcttcattgacccagataagaacctgtagaaaagtgagagatgcccctaagttcctatttcatttatcctaaataatatcctgaataactactgatcagtttttttctatgtccagccttgcttcactttccaacctccaggccaaatattcattttgatattttacaaaatccttctggtttttacacagggcccttttgtgctgagaataaaaccagctattggaacagacctcactgctttgtagagtcagaagttgacctagagaatgggtagcaacaggtcctcagtttctctggagacacccccaatccttgggtgagtgttgaaacctgacaactgactgttagccttgtcatcatcctcactggagatggagatgttgcagtcggagcctcactccttctggggcactgtttcttctcatggcaaccattttgcctgcctggaaacagcctgttgcctttgctagggggcaaatacacacactagccaaggaagttggtccagcacatctctgaggtttctcccccatggacccatggagcgaattccctgagataaatgatcagaaagttggctgtctggtggtttaatactccataagagttacttcccttatagaaagtcatcctttggcatctagatttttctacaaatcaccttaactccctccctttctctttctcctggaaaacctcagcattgcatctccatgttgcacaacacagatcagattatctggtcactatagagatttgtatataaaaaaactacttttttgaggattttgtatattgtttttctatttgttttctacagcttgaggaaagagctggcaaactgtgaatctaacttgatcttgttgccagcagatatattttggcttcctggtaagagtctgtgttaccagggacaatatattgccctctgatcagtattgcaccctaaatccacaaattcctccagcccagtcttacatttttttaaacaaatcccctagcttgtttgctattatttataaagagcattagaaaatgtatttatagacctggatgttatatgtttaatattaatttagcctttaataatgttataggtttgtaactattcttcagaaattataaagaactcagtgtagactgaattaatctatttagtatctgtaattttgcagacatattttcttacagtattttctatgtaaccacacatgtagaattataactaattagagcacaagaagtttcttcagcaatttagagctaccaattgtttcttgactatatagtcacatttgacaaatttaagaacccagtctttagtgatgcaataaacaaaatgaaccattaagaacaaggaattgcttaaatcccttagctggtgaggatatacatctaaataattcatctttctaactcaaggaatggtgctgattttttaaatgtttgacaccaggccttgtttttccagctgagcattctcattttgcttttctctaagactatcaaagacaaggtattaatagtaggattattcctagatcagaatgtttcatacattcctaaaggtttatgtggaaattggcttaggaaaactttgagtagcagagactgaggatgagtgctagagatgaaatcaggacagatttgttgcagttaattcttgccaagcaaattagtggtaaatgtcacattgttatgtgaattgagcacatatttttaaagaaagtttacaaaaaatttttagaaccaactatgaggcaatactgtatcactgggggctgggagtgggggcttagaatcatactgaaattgtttaaaagcagcccaggtagtttctgtcctcaggtgaataacagactatataacttccccgaaaggtaaaacgatagccactgcagagacgaggtgtcttccttccaccaaatactttctgagatggtggtaggagtagtatttttaccgtggtttaaaaagtagtcagttacatagaaagtgtattggtatgtatttgaacctgctcttcattaaacaaacagattagatgtaccctcgactggcaataattgtatctattttcaagtacagctagctgtcaaagcatgaagctcttgtgtatacacactgacacttggttcacgcatgaagaacagtgcctatgcactttgtgtagctataatgtaggtatctaggtgtaatttcagtgaaatggtgtatagatgtattgtaatttaaatgtatatgttatttttggctattcatctaaatgcagtagacatgttgatcggtgttttgcaaacatttctttttccttcttagataactagtcgtgaatcatttctcctctttctcagtgtggcttgggaatatatatgagtgaagaatttatctgtgaatcctttgtactgatgattgtttgaaagtctgtgtgtgtccagcacctttgtaaatacacaattcagagcagggatgggctgggtgtgtgtcctggttcttagtgaaaggtcatctcatgtctgtttaatacatggtgaatgcaactgtggaacttttgattacctagacttaggtaggtttagaatgagaacatccatctacagtcctcctttgcttggtggattgggctcagaggaacaaaaagttagtctgactctgtgcatattagcatcatgtctttagagaaaggtcagcctctctggttgccaaatactcatcatgatgctcatgacttaaaggttctgaggagccttgtctcccttggatttttgagtcagggtacaggaaaaaacattgctgactaactaactgcaaatgcatctgcaggtgaaaccctacgaaagcacagttctggctataaacttcagagttctctgtaaaaaacttagagcactagaagcacaggaatagtgagtgtacagcttatgcggttgtagaggggcaactgatgaacacaggtcccacatatatgagggagtatgacgttctctacctaatatgttctgtgtgcatgttttgaatgattgaagatgggattaactaatgcaagtttacagttgcctcctaaaacacacattctgtataattatcgctaaatacaatgctgtgaggtctatagttcctgtaacccctttctcctccccaaggacagagaagaactagccatgtgctatagggaaccctgagtgccctactcttttcccaagaagggtaaagcctacaatatcatcagggggcatgaagcacattaatttgcagtggctgcttcatatgaggagatatggtggacaggctaatttttccttgaaaatgtggcttcttcaactcctttcaaatttaggatggaatacttcctgaaataaaactgggctttatgcaggattctctttgaaaattcttgtatgtccagaacaaaagataaaactaattgtattcctcacattcacaatccccattggtctgaagtcacgtagcacagagcatctatagcacatagtgtttaaagactaatgaatgcaaaaagataaaatcttcaactaatttttgaattgtttctcatatatgctactagaaaatgccttgttgatgaagcacattttgggtagttgaggtcttttgttttcgcctttagctttctaagctttcttacaatgtggactgattactgtaacatttcacgtgtaaaataactggatattctttatatactggaaataacctgtgaatccaatatttcactaagtgttttaacttttgtgtatatatctctcatcaataaatgtggatttcaattt

SEQ ID NO: 28486 - DNA, 11538 bp, Homo sapiens
  source 1..11538: mol_type = unassigned DNA
cgactccgctggacctgggacccccagacgtgggaggatgggggtgacctagtgtcttccagtagggcaatctctggacatctttatctccccagtacctctccagatcctgaagcctggggccagggaggagaggttagatgtcagcagtggaaggacagtgccaacaatatgcccaagcaggtggaagtgcgaatgcacgacagtcatcttggctcagaggaacccaagcaccggcacctgggcctgcgcctgtgtgacaagctggggaagaatctgctgctcaccctgacggtgtttggtgtcatcctgggagcagtgtgtggagggcttcttcgcttggcatctcccatccaccctgatgtggttatgttaatagccttcccaggggatatactcatgaggatgctaaaaatgctcattctccctctaatcatctccagcttaatcacagggttgtcaggcctggatgctaaggctagtggccgcttgggcacgagagccatggtgtattacatgtccacgaccatcattgctgcagtactgggggtcattctggtcttggctatccatccaggcaatcccaagctcaagaagcagctggggcctgggaagaagaatgatgaagtgtccagcctggatgccttcctggaccttattcgaaatctcttccctgaaaaccttgtccaagcctgctttcaacagattcaaacagtgacgaagaaagtcctggttgcaccaccgccggacgaggaggccaacgcaaccagcgctgttgtctctctgttgaacgagactgtgactgaggtgccggaggagactaagatggttatcaagaagggcctggagttcaaggatgggatgaacgtcttaggtctgatagggtttttcattgcttttggcatcgctatggggaagatgggagatcaggccaagctgatggtggatttcttcaacattttgaatgagattgtaatgaagttagtgatcatgatcatgtggtactctcccctgggtatcgcctgcctgatctgtggaaagatcattgcaatcaaggacttagaagtggttgctaggcaactggggatgtacatggtaacagtgatcataggcctcatcatccacgggggcatctttctccccttgatttactttgtagtgaccaggaaaaaccccttctccttttttgctggcattttccaagcttggatcactgccctgggcaccgcttccagtgctggaactttgcctgtcacctttcgttgcctggaagaaaatctggggattgataagcgtgtgactagattcgtccttcctgttggagcaaccattaacatggatggtacagccctttatgaagcggtagccgccatctttatagcccaaatgaatggtgttgtcctggatggaggacagattgtgactgtaagcctcacagccaccctggcaagcgtcggcgcggccagtatccccagtgccgggctggtcaccatgctcctcattctgacagccgtgggcctgccaacagaggacatcagcctgctggtggctgtggactggctgctggacaggatgagaacttcagtcaatgttgtgggtgactcttttggggctgggatagtctatcacctctccaagtctgagctggataccattgactcccagcatcgagtgcatgaagatattgaaatgaccaagactcaatccatttatgatgacatgaagaaccacagggaaagcaactctaatcaatgtgtctatgctgcacacaactctgtcatagtagatgaatgcaaggtaactctggcagccaatggaaagtcagccgactgcagtgttgaggaagaaccttggaaacgtgagaaataaggatatgagtctcagcaaattcttgaataaactccccagcgtatcctatggtaactgatgatataaacaagctttctttaaaaaggaaaaaaatgcgtatatttctatgtttacttaatctgttagccgaggcttagaggagctcttgtgagtcagtgatgacaggcacggtgctgtgtctttgccaaataatgctttataaccgtctaattttctcacttgtattattatttgaatggatgctgctggaggaatcagttggaattgaagacacgttcttgccagcttcccttttctcccaagatgcagaaatgtggatgctcttttcccaggggacatgagtaaagcagtgtggtacactccagggacttgggaaaatgagcaaacacacagcgtgttattccttaaagtgttctccatgtctcgccttgttatgcacaagagattctattaaaagcctctagaagtaactccccttaaaatgtctagtaaagcttgcacatggattgattaaaagcaaatacctgtcttagggaattctgacaatttatcttccatatgctctttaagtaaaatgtttcaaagacagttttaaagggagccatgctcttaaaggcagttgattaaagaacctgttacatctctgccttaccctgtgtaatctgtgagaacaatggttgaaatttcaaagtatgtttcattattctttctaaatttgataattgattaggaagtattttatatataaccactgtagatattgacaaaagtaagagagcacagtcaacataaagtttaaccagagttaaatattcaaatttatttatgttcggtttgccttcacctggtgtagtaaaatcaaatgagattatttggtatgtgttttgctttgtttaacccaaaagattattttttggttcctaaagaaaaagatatttttaatctgtcaattatttcagtcatcatctcatcgtcctagaaagcctggtcattttactgtcctcacacatggaagacacttgtgttggctgtgcctcttttaatgtcatctcttgatgaaacaaaaatactggtatttatccaatatgttgaaagcgttttgttatcttctatcaaagcacataaaaccagttataggacacagttggaagcagagccagtcttcctcctcagtcttctcagtagaaaggaacagaaaacaaacatctgtgcaaaaccctataaaagtgatattcctatggcagagtccaggcagccttgaacaatgacatggcaacaaaggatggctctgtacaacttcacagatggaatcttgtttaaggctgtgaagttttaaggaataaataatataattggtgtagcacagtgccttgcatgcagtaggcagccaacaaatccttaatgattggtaatgcaagctaaaatttttaatgtctctactatccttttttattgaataacgcacagtattttcctaaggttgctgggtttgggagtaagcttgggacttgaatcattgagaaataaagcacatttgactctaagaagtatgtagaaccttgtttataggtgagaataggctgtattatatgaaaccagcggagggatgctgagacagtcatggtttatagaatccaaattctctgagatgagggtgcttatggacctcaaatagcctttcttatctgctccttgtgacttctctcttttaaatcagatacctttgaaacatacaagagacatgagattccagttgtttttgtctcctaaaccctagtgatttttggataaggatcactactgaacagtattaggcaacttttcatttttgcttttcaaatgacattggtctttatttccagtagatgggcagtaaacagggtcagggtggtcaagggatatgattaagtgtagtagtagaaaatgcattctttttttttttttttttttagacagagtcttgctctgttgctcaggctggagtacagtggcacgatctcagctcactgcactgcaatgtccacctctctagttcaagcgattctcctgtctcagcctcccgagtagctgggactacaggcacatgccaccatgcctggctaattttttgtatttttagtacagatgggtttcattatgttagccaggatggtctcgatctcctgacctcatgatccacccgccatggcctcccaaagtgctgggattacaggcgtgagccaccgtgcccggccagaaaatacattctttacagcaaatgttataggttaaggagacagttcctgggtttagctgtgaaactgtttaggattttctttaagtggtgttcccaagagcttttttctggtaagttggaggctataggcaaagcgtctaggagcttgttgttttttgctatggaaggccagctttgggatctatatacatgggcatgtttctcaatggagtggtcacaggattctcttctcagaactctgcctgaaacctttccggtgtgttttgtcttcaactttttcctagctatcctattagcctgtaaatatgtcagcagacaatgtgtttggaagaaacaaggtgtacaacttcacaaagcaagttttttctggtctgagacttactgtgtgcaggaagtctcgtgagaatatacttagaaaatcacacttatctggaaattcaataagtcatattaaaaatatacaatttcttgaactcaggactagcctgaaaatccaaaatgcatgtagagttgacatgttgacatatgtctatgtcctctgtttttatttaagcctcatttatttctcccttgccatgcccatttgggattttctttgcccagcatatgtgccataaacagaacaaatggatccagggtatacctctaataacctttatctaaatagaatacatttaacctgtcaattatatgtatagatttatcctaattggttcaacatatatatgaatgcttgtaatagtctgttactatttgataatgcataaatgttatatttatatacagttacagcaggccagaaacatacatacactgcatcctgtaaggtctgtaaatcagggcttcggcaatgccattttgctatagactcattcatgttttttaggaatcagaatcatttcaggagaaaaccaactaagtagactttaattcttctctttctcattcttgccctttgagaaacccaagtggaatcatcacttaattacttactcaaattcaatgaatcaaatccaatccaatcagtgagaagaatagcttatctttcaaggtaatactttaccttagatctttgagggcatgcttcccatacaaagagcatcagaaaatcagggcaatcatctagatctcacagatcttcaacataggactctaggttatgagagctgaaccacatagctatcagtttcagtttttacttcctattgagtgtgtagaaacacagcctatggttttgctgtctgcggaagttaccataccctgtaaaagacaaatatttctttctcctctcgaaccactagtcagcctggatattcatgaaagctgaaagaaggggtgccaaaatgcctagctcctggatttagactcatggaatatgagaaaggcttagggaaaattcaagtcatggggagattcctgctaggtgatgccaggaatctcaatgacctgttgattagagggtctctggtcatttccacttgtgtgtggagaaatacatcatttgcatatgtatctagtcaagaagcccttttggagcaaagtggttgggaaactcatttactgggtccaccaaaggaaacccaattctgccatgtttttgcaaatactacacgtccctttgctctcaatagcaaaagtgatgttatagttttttttacttttgtcagaatcaaggcttcggccacctgtgcaatattttcccatggaatgcagcagtaaatccaagtaggtatatccgtgctcagagagaattctccatagttctgactcctgaaaaacaagtctcattagctctcatctagtttgatgactaaaagtgcacagcagttataccccagtggaagtgatttttctcacctagctgctctctaactcttacggctatctagttgtctgagctgctggtttgttttacttattctccaactgaactcattccaaaccaagaaaaaggaccaaatgaaattttcagttattatcatacttgctccttgaataagaatgctagagtctggaggcagaagaagactaagttaaaaaaaaaacagcctgaaggaattctggagtgagttttgtaagtctaattgtcaaagaagataaatggtctcagtatctgtagtaatttctggttaagcctagagggatcactgagtgccaatccaagcaggtggcactagaggcagattgttctcctagcatagagtgagtttccagctgctcatgacacattttcttatgattttccctaaaagaaaaccaaattttctactccacctcttcctttcctatcattccacttattgttgctgctttgctaacagccagcttagtaagccatcacacaagttagtgtgaggcttggttttaaaatagataacagagaatcttgattaaatagtatccaactttgtagcataacacagctaattcaggcaatgacatagagatgataagaaacaacatggtttggtagagggaacatttgatttagactctgcccatttttagctgtatgacttacataagtcattttgtgtccaagcctcattttctcccatatgaaaagtgaaggggttggattaaatgactaaaatccccttccagccctatgagcccaatgtattatgatctctgctttgtttccttcttaagaggcttcctactataaaatgtgacctatttacattttaagttgaagtagcccacaataatgaataatcaatttagatttttctcatctcctttgggagaaattaaattcaagcctctattcatttgatgttttacaacaagcttcaaagttggccatgttcattcacagtttgatattttgagacaccaataaaagttttttaataaaagttcccttgacttaaactcaccttcctaatagaagtagtgatttggctcacggaaaaatgtttccagagtcaacatgagaggactggatgaacctacagcctcactcaagctgttgcatcattgctgctgtagcaacagagccctctctgaatacccaaaacacacaattttctccaacaattctaattgcccacccagtatgggaatttgagagcctttggtgaataaccttgatcactcttttgaaatttggtacaacacttgcacaatcacggcaactgtttgtaaatatcttttcttctccgccagtatgtagacatgcacacccattcacaagtaagcccgcaaattcattttcacattttcctcttggtttgtttttatcatgggtatcacattgcaggaagagatgctctaacttacaagaatggaattttctgactatcattgccctcttcaaggcctgattagtttgtagggtggatgggatacaatgcatggtctacaaggtccatgtcaccagccatgatctttaaacaacctcttgcactttctggcactgctgcaatggcccatggtggacacctctgctgtttgtccaaacttctgctaaatagagtagtgttggtatttgttgtgttgtgaactcctttgttgtcagagaagacttcagctcttcaggtttgcaagggcaagatgtaaagctaggactgaaaggattgggttttgtttttcggccggcttttttccattagtgcaaaaaacctgatgcaagggcagcaagataaacacaatttcttcattgacccagataagaacctgtagaaaagtgagagatgcccctaagttcctatttcatttatcctaaataatatcctgaataactactgatcagtttttttctatgtccagccttgcttcactttccaacctccaggccaaatattcattttgatattttacaaaatccttctggtttttacacagggcccttttgtgctgagaataaaaccagctattggaacagacctcactgctttgtagagtcagaagttgacctagagaatgggtagcaacaggtcctcagtttctctggagacacccccaatccttgggtgagtgttgaaacctgacaactgactgttagccttgtcatcatcctcactggagatggagatgttgcagtcggagcctcactccttctggggcactgtttcttctcatggcaaccattttgcctgcctggaaacagcctgttgcctttgctagggggcaaatacacacactagccaaggaagttggtccagcacatctctgaggtttctcccccatggacccatggagcgaattccctgagataaatgatcagaaagttggctgtctggtggtttaatactccataagagttacttcccttatagaaagtcatcctttggcatctagatttttctacaaatcaccttaactccctccctttctctttctcctggaaaacctcagcattgcatctccatgttgcacaacacagatcagattatctggtcactatagagatttgtatataaaaaaactacttttttgaggattttgtatattgtttttctatttgttttctacagcttgaggaaagagctggcaaactgtgaatctaacttgatcttgttgccagcagatatattttggcttcctggtaagagtctgtgttaccagggacaatatattgccctctgatcagtattgcaccctaaatccacaaattcctccagcccagtcttacatttttttaaacaaatcccctagcttgtttgctattatttataaagagcattagaaaatgtatttatagacctggatgttatatgtttaatattaatttagcctttaataatgttataggtttgtaactattcttcagaaattataaagaactcagtgtagactgaattaatctatttagtatctgtaattttgcagacatattttcttacagtattttctatgtaaccacacatgtagaattataactaattagagcacaagaagtttcttcagcaatttagagctaccaattgtttcttgactatatagtcacatttgacaaatttaagaacccagtctttagtgatgcaataaacaaaatgaaccattaagaacaaggaattgcttaaatcccttagctggtgaggatatacatctaaataattcatctttctaactcaaggaatggtgctgattttttaaatgtttgacaccaggccttgtttttccagctgagcattctcattttgcttttctctaagactatcaaagacaaggtattaatagtaggattattcctagatcagaatgtttcatacattcctaaaggtttatgtggaaattggcttaggaaaactttgagtagcagagactgaggatgagtgctagagatgaaatcaggacagatttgttgcagttaattcttgccaagcaaattagtggtaaatgtcacattgttatgtgaattgagcacatatttttaaagaaagtttacaaaaaatttttagaaccaactatgaggcaatactgtatcactgggggctgggagtgggggcttagaatcatactgaaattgtttaaaagcagcccaggtagtttctgtcctcaggtgaataacagactatataacttccccgaaaggtaaaacgatagccactgcagagacgaggtgtcttccttccaccaaatactttctgagatggtggtaggagtagtatttttaccgtggtttaaaaagtagtcagttacatagaaagtgtattggtatgtatttgaacctgctcttcattaaacaaacagattagatgtaccctcgactggcaataattgtatctattttcaagtacagctagctgtcaaagcatgaagctcttgtgtatacacactgacacttggttcacgcatgaagaacagtgcctatgcactttgtgtagctataatgtaggtatctaggtgtaatttcagtgaaatggtgtatagatgtattgtaatttaaatgtatatgttatttttggctattcatctaaatgcagtagacatgttgatcggtgttttgcaaacatttctttttccttcttagataactagtcgtgaatcatttctcctctttctcagtgtggcttgggaatatatatgagtgaagaatttatctgtgaatcctttgtactgatgattgtttgaaagtctgtgtgtgtccagcacctttgtaaatacacaattcagagcagggatgggctgggtgtgtgtcctggttcttagtgaaaggtcatctcatgtctgtttaatacatggtgaatgcaactgtggaacttttgattacctagacttaggtaggtttagaatgagaacatccatctacagtcctcctttgcttggtggattgggctcagaggaacaaaaagttagtctgactctgtgcatattagcatcatgtctttagagaaaggtcagcctctctggttgccaaatactcatcatgatgctcatgacttaaaggttctgaggagccttgtctcccttggatttttgagtcagggtacaggaaaaaacattgctgactaactaactgcaaatgcatctgcaggtgaaaccctacgaaagcacagttctggctataaacttcagagttctctgtaaaaaacttagagcactagaagcacaggaatagtgagtgtacagcttatgcggttgtagaggggcaactgatgaacacaggtcccacatatatgagggagtatgacgttctctacctaatatgttctgtgtgcatgttttgaatgattgaagatgggattaactaatgcaagtttacagttgcctcctaaaacacacattctgtataattatcgctaaatacaatgctgtgaggtctatagttcctgtaacccctttctcctccccaaggacagagaagaactagccatgtgctatagggaaccctgagtgccctactcttttcccaagaagggtaaagcctacaatatcatcagggggcatgaagcacattaatttgcagtggctgcttcatatgaggagatatggtggacaggctaatttttccttgaaaatgtggcttcttcaactcctttcaaatttaggatggaatacttcctgaaataaaactgggctttatgcaggattctctttgaaaattcttgtatgtccagaacaaaagataaaactaattgtattcctcacattcacaatccccattggtctgaagtcacgtagcacagagcatctatagcacatagtgtttaaagactaatgaatgcaaaaagataaaatcttcaactaatttttgaattgtttctcatatatgctactagaaaatgccttgttgatgaagcacattttgggtagttgaggtcttttgttttcgcctttagctttctaagctttcttacaatgtggactgattactgtaacatttcacgtgtaaaataactggatattctttatatactggaaataacctgtgaatccaatatttcactaagtgttttaacttttgtgtatatatctctcatcaa

SEQ ID NO: 28487 - DNA, 11689 bp, Homo sapiens
  source 1..11689: mol_type = unassigned DNA
aggccagagatttattcgagcttcggcgggggagggagcgcagctgggccgcgtttaggctgcaccacccgcgtgtttcagccgctcgactccgctggacctgggacccccagacgtgggaggatggggtgggtgtgcctgcctgtgagtttgggggtgctggaccaaagtgaacacagatgagtcaactccacccattgtctctgcaagaaaacagctcaaaactcaccccatgaatgagagaggaagatgccaccctttgggactgtctgtaccctggcagaaatggaatgatttatccaaataagcaagtgccaacaatatgcccaagcaggtggaagtgcgaatgcacgacagtcatcttggctcagaggaacccaagcaccggcacctgggcctgcgcctgtgtgacaagctggggaagaatctgctgctcaccctgacggtgtttggtgtcatcctgggagcagtgtgtggagggcttcttcgcttggcatctcccatccaccctgatgtggttatgttaatagccttcccaggggatatactcatgaggatgctaaaaatgctcattctccctctaatcatctccagcttaatcacagggttgtcaggcctggatgctaaggctagtggccgcttgggcacgagagccatggtgtattacatgtccacgaccatcattgctgcagtactgggggtcattctggtcttggctatccatccaggcaatcccaagctcaagaagcagctggggcctgggaagaagaatgatgaagtgtccagcctggatgccttcctggaccttattcgaaatctcttccctgaaaaccttgtccaagcctgctttcaacagattcaaacagtgacgaagaaagtcctggttgcaccaccgccggacgaggaggccaacgcaaccagcgctgttgtctctctgttgaacgagactgtgactgaggtgccggaggagactaagatggttatcaagaagggcctggagttcaaggatgggatgaacgtcttaggtctgatagggtttttcattgcttttggcatcgctatggggaagatgggagatcaggccaagctgatggtggatttcttcaacattttgaatgagattgtaatgaagttagtgatcatgatcatgtggtactctcccctgggtatcgcctgcctgatctgtggaaagatcattgcaatcaaggacttagaagtggttgctaggcaactggggatgtacatggtaacagtgatcataggcctcatcatccacgggggcatctttctccccttgatttactttgtagtgaccaggaaaaaccccttctccttttttgctggcattttccaagcttggatcactgccctgggcaccgcttccagtgctggaactttgcctgtcacctttcgttgcctggaagaaaatctggggattgataagcgtgtgactagattcgtccttcctgttggagcaaccattaacatggatggtacagccctttatgaagcggtagccgccatctttatagcccaaatgaatggtgttgtcctggatggaggacagattgtgactgtaagcctcacagccaccctggcaagcgtcggcgcggccagtatccccagtgccgggctggtcaccatgctcctcattctgacagccgtgggcctgccaacagaggacatcagcctgctggtggctgtggactggctgctggacaggatgagaacttcagtcaatgttgtgggtgactcttttggggctgggatagtctatcacctctccaagtctgagctggataccattgactcccagcatcgagtgcatgaagatattgaaatgaccaagactcaatccatttatgatgacatgaagaaccacagggaaagcaactctaatcaatgtgtctatgctgcacacaactctgtcatagtagatgaatgcaaggtaactctggcagccaatggaaagtcagccgactgcagtgttgaggaagaaccttggaaacgtgagaaataaggatatgagtctcagcaaattcttgaataaactccccagcgtatcctatggtaactgatgatataaacaagctttctttaaaaaggaaaaaaatgcgtatatttctatgtttacttaatctgttagccgaggcttagaggagctcttgtgagtcagtgatgacaggcacggtgctgtgtctttgccaaataatgctttataaccgtctaattttctcacttgtattattatttgaatggatgctgctggaggaatcagttggaattgaagacacgttcttgccagcttcccttttctcccaagatgcagaaatgtggatgctcttttcccaggggacatgagtaaagcagtgtggtacactccagggacttgggaaaatgagcaaacacacagcgtgttattccttaaagtgttctccatgtctcgccttgttatgcacaagagattctattaaaagcctctagaagtaactccccttaaaatgtctagtaaagcttgcacatggattgattaaaagcaaatacctgtcttagggaattctgacaatttatcttccatatgctctttaagtaaaatgtttcaaagacagttttaaagggagccatgctcttaaaggcagttgattaaagaacctgttacatctctgccttaccctgtgtaatctgtgagaacaatggttgaaatttcaaagtatgtttcattattctttctaaatttgataattgattaggaagtattttatatataaccactgtagatattgacaaaagtaagagagcacagtcaacataaagtttaaccagagttaaatattcaaatttatttatgttcggtttgccttcacctggtgtagtaaaatcaaatgagattatttggtatgtgttttgctttgtttaacccaaaagattattttttggttcctaaagaaaaagatatttttaatctgtcaattatttcagtcatcatctcatcgtcctagaaagcctggtcattttactgtcctcacacatggaagacacttgtgttggctgtgcctcttttaatgtcatctcttgatgaaacaaaaatactggtatttatccaatatgttgaaagcgttttgttatcttctatcaaagcacataaaaccagttataggacacagttggaagcagagccagtcttcctcctcagtcttctcagtagaaaggaacagaaaacaaacatctgtgcaaaaccctataaaagtgatattcctatggcagagtccaggcagccttgaacaatgacatggcaacaaaggatggctctgtacaacttcacagatggaatcttgtttaaggctgtgaagttttaaggaataaataatataattggtgtagcacagtgccttgcatgcagtaggcagccaacaaatccttaatgattggtaatgcaagctaaaatttttaatgtctctactatccttttttattgaataacgcacagtattttcctaaggttgctgggtttgggagtaagcttgggacttgaatcattgagaaataaagcacatttgactctaagaagtatgtagaaccttgtttataggtgagaataggctgtattatatgaaaccagcggagggatgctgagacagtcatggtttatagaatccaaattctctgagatgagggtgcttatggacctcaaatagcctttcttatctgctccttgtgacttctctcttttaaatcagatacctttgaaacatacaagagacatgagattccagttgtttttgtctcctaaaccctagtgatttttggataaggatcactactgaacagtattaggcaacttttcatttttgcttttcaaatgacattggtctttatttccagtagatgggcagtaaacagggtcagggtggtcaagggatatgattaagtgtagtagtagaaaatgcattctttttttttttttttttttagacagagtcttgctctgttgctcaggctggagtacagtggcacgatctcagctcactgcactgcaatgtccacctctctagttcaagcgattctcctgtctcagcctcccgagtagctgggactacaggcacatgccaccatgcctggctaattttttgtatttttagtacagatgggtttcattatgttagccaggatggtctcgatctcctgacctcatgatccacccgccatggcctcccaaagtgctgggattacaggcgtgagccaccgtgcccggccagaaaatacattctttacagcaaatgttataggttaaggagacagttcctgggtttagctgtgaaactgtttaggattttctttaagtggtgttcccaagagcttttttctggtaagttggaggctataggcaaagcgtctaggagcttgttgttttttgctatggaaggccagctttgggatctatatacatgggcatgtttctcaatggagtggtcacaggattctcttctcagaactctgcctgaaacctttccggtgtgttttgtcttcaactttttcctagctatcctattagcctgtaaatatgtcagcagacaatgtgtttggaagaaacaaggtgtacaacttcacaaagcaagttttttctggtctgagacttactgtgtgcaggaagtctcgtgagaatatacttagaaaatcacacttatctggaaattcaataagtcatattaaaaatatacaatttcttgaactcaggactagcctgaaaatccaaaatgcatgtagagttgacatgttgacatatgtctatgtcctctgtttttatttaagcctcatttatttctcccttgccatgcccatttgggattttctttgcccagcatatgtgccataaacagaacaaatggatccagggtatacctctaataacctttatctaaatagaatacatttaacctgtcaattatatgtatagatttatcctaattggttcaacatatatatgaatgcttgtaatagtctgttactatttgataatgcataaatgttatatttatatacagttacagcaggccagaaacatacatacactgcatcctgtaaggtctgtaaatcagggcttcggcaatgccattttgctatagactcattcatgttttttaggaatcagaatcatttcaggagaaaaccaactaagtagactttaattcttctctttctcattcttgccctttgagaaacccaagtggaatcatcacttaattacttactcaaattcaatgaatcaaatccaatccaatcagtgagaagaatagcttatctttcaaggtaatactttaccttagatctttgagggcatgcttcccatacaaagagcatcagaaaatcagggcaatcatctagatctcacagatcttcaacataggactctaggttatgagagctgaaccacatagctatcagtttcagtttttacttcctattgagtgtgtagaaacacagcctatggttttgctgtctgcggaagttaccataccctgtaaaagacaaatatttctttctcctctcgaaccactagtcagcctggatattcatgaaagctgaaagaaggggtgccaaaatgcctagctcctggatttagactcatggaatatgagaaaggcttagggaaaattcaagtcatggggagattcctgctaggtgatgccaggaatctcaatgacctgttgattagagggtctctggtcatttccacttgtgtgtggagaaatacatcatttgcatatgtatctagtcaagaagcccttttggagcaaagtggttgggaaactcatttactgggtccaccaaaggaaacccaattctgccatgtttttgcaaatactacacgtccctttgctctcaatagcaaaagtgatgttatagttttttttacttttgtcagaatcaaggcttcggccacctgtgcaatattttcccatggaatgcagcagtaaatccaagtaggtatatccgtgctcagagagaattctccatagttctgactcctgaaaaacaagtctcattagctctcatctagtttgatgactaaaagtgcacagcagttataccccagtggaagtgatttttctcacctagctgctctctaactcttacggctatctagttgtctgagctgctggtttgttttacttattctccaactgaactcattccaaaccaagaaaaaggaccaaatgaaattttcagttattatcatacttgctccttgaataagaatgctagagtctggaggcagaagaagactaagttaaaaaaaaaacagcctgaaggaattctggagtgagttttgtaagtctaattgtcaaagaagataaatggtctcagtatctgtagtaatttctggttaagcctagagggatcactgagtgccaatccaagcaggtggcactagaggcagattgttctcctagcatagagtgagtttccagctgctcatgacacattttcttatgattttccctaaaagaaaaccaaattttctactccacctcttcctttcctatcattccacttattgttgctgctttgctaacagccagcttagtaagccatcacacaagttagtgtgaggcttggttttaaaatagataacagagaatcttgattaaatagtatccaactttgtagcataacacagctaattcaggcaatgacatagagatgataagaaacaacatggtttggtagagggaacatttgatttagactctgcccatttttagctgtatgacttacataagtcattttgtgtccaagcctcattttctcccatatgaaaagtgaaggggttggattaaatgactaaaatccccttccagccctatgagcccaatgtattatgatctctgctttgtttccttcttaagaggcttcctactataaaatgtgacctatttacattttaagttgaagtagcccacaataatgaataatcaatttagatttttctcatctcctttgggagaaattaaattcaagcctctattcatttgatgttttacaacaagcttcaaagttggccatgttcattcacagtttgatattttgagacaccaataaaagttttttaataaaagttcccttgacttaaactcaccttcctaatagaagtagtgatttggctcacggaaaaatgtttccagagtcaacatgagaggactggatgaacctacagcctcactcaagctgttgcatcattgctgctgtagcaacagagccctctctgaatacccaaaacacacaattttctccaacaattctaattgcccacccagtatgggaatttgagagcctttggtgaataaccttgatcactcttttgaaatttggtacaacacttgcacaatcacggcaactgtttgtaaatatcttttcttctccgccagtatgtagacatgcacacccattcacaagtaagcccgcaaattcattttcacattttcctcttggtttgtttttatcatgggtatcacattgcaggaagagatgctctaacttacaagaatggaattttctgactatcattgccctcttcaaggcctgattagtttgtagggtggatgggatacaatgcatggtctacaaggtccatgtcaccagccatgatctttaaacaacctcttgcactttctggcactgctgcaatggcccatggtggacacctctgctgtttgtccaaacttctgctaaatagagtagtgttggtatttgttgtgttgtgaactcctttgttgtcagagaagacttcagctcttcaggtttgcaagggcaagatgtaaagctaggactgaaaggattgggttttgtttttcggccggcttttttccattagtgcaaaaaacctgatgcaagggcagcaagataaacacaatttcttcattgacccagataagaacctgtagaaaagtgagagatgcccctaagttcctatttcatttatcctaaataatatcctgaataactactgatcagtttttttctatgtccagccttgcttcactttccaacctccaggccaaatattcattttgatattttacaaaatccttctggtttttacacagggcccttttgtgctgagaataaaaccagctattggaacagacctcactgctttgtagagtcagaagttgacctagagaatgggtagcaacaggtcctcagtttctctggagacacccccaatccttgggtgagtgttgaaacctgacaactgactgttagccttgtcatcatcctcactggagatggagatgttgcagtcggagcctcactccttctggggcactgtttcttctcatggcaaccattttgcctgcctggaaacagcctgttgcctttgctagggggcaaatacacacactagccaaggaagttggtccagcacatctctgaggtttctcccccatggacccatggagcgaattccctgagataaatgatcagaaagttggctgtctggtggtttaatactccataagagttacttcccttatagaaagtcatcctttggcatctagatttttctacaaatcaccttaactccctccctttctctttctcctggaaaacctcagcattgcatctccatgttgcacaacacagatcagattatctggtcactatagagatttgtatataaaaaaactacttttttgaggattttgtatattgtttttctatttgttttctacagcttgaggaaagagctggcaaactgtgaatctaacttgatcttgttgccagcagatatattttggcttcctggtaagagtctgtgttaccagggacaatatattgccctctgatcagtattgcaccctaaatccacaaattcctccagcccagtcttacatttttttaaacaaatcccctagcttgtttgctattatttataaagagcattagaaaatgtatttatagacctggatgttatatgtttaatattaatttagcctttaataatgttataggtttgtaactattcttcagaaattataaagaactcagtgtagactgaattaatctatttagtatctgtaattttgcagacatattttcttacagtattttctatgtaaccacacatgtagaattataactaattagagcacaagaagtttcttcagcaatttagagctaccaattgtttcttgactatatagtcacatttgacaaatttaagaacccagtctttagtgatgcaataaacaaaatgaaccattaagaacaaggaattgcttaaatcccttagctggtgaggatatacatctaaataattcatctttctaactcaaggaatggtgctgattttttaaatgtttgacaccaggccttgtttttccagctgagcattctcattttgcttttctctaagactatcaaagacaaggtattaatagtaggattattcctagatcagaatgtttcatacattcctaaaggtttatgtggaaattggcttaggaaaactttgagtagcagagactgaggatgagtgctagagatgaaatcaggacagatttgttgcagttaattcttgccaagcaaattagtggtaaatgtcacattgttatgtgaattgagcacatatttttaaagaaagtttacaaaaaatttttagaaccaactatgaggcaatactgtatcactgggggctgggagtgggggcttagaatcatactgaaattgtttaaaagcagcccaggtagtttctgtcctcaggtgaataacagactatataacttccccgaaaggtaaaacgatagccactgcagagacgaggtgtcttccttccaccaaatactttctgagatggtggtaggagtagtatttttaccgtggtttaaaaagtagtcagttacatagaaagtgtattggtatgtatttgaacctgctcttcattaaacaaacagattagatgtaccctcgactggcaataattgtatctattttcaagtacagctagctgtcaaagcatgaagctcttgtgtatacacactgacacttggttcacgcatgaagaacagtgcctatgcactttgtgtagctataatgtaggtatctaggtgtaatttcagtgaaatggtgtatagatgtattgtaatttaaatgtatatgttatttttggctattcatctaaatgcagtagacatgttgatcggtgttttgcaaacatttctttttccttcttagataactagtcgtgaatcatttctcctctttctcagtgtggcttgggaatatatatgagtgaagaatttatctgtgaatcctttgtactgatgattgtttgaaagtctgtgtgtgtccagcacctttgtaaatacacaattcagagcagggatgggctgggtgtgtgtcctggttcttagtgaaaggtcatctcatgtctgtttaatacatggtgaatgcaactgtggaacttttgattacctagacttaggtaggtttagaatgagaacatccatctacagtcctcctttgcttggtggattgggctcagaggaacaaaaagttagtctgactctgtgcatattagcatcatgtctttagagaaaggtcagcctctctggttgccaaatactcatcatgatgctcatgacttaaaggttctgaggagccttgtctcccttggatttttgagtcagggtacaggaaaaaacattgctgactaactaactgcaaatgcatctgcaggtgaaaccctacgaaagcacagttctggctataaacttcagagttctctgtaaaaaacttagagcactagaagcacaggaatagtgagtgtacagcttatgcggttgtagaggggcaactgatgaacacaggtcccacatatatgagggagtatgacgttctctacctaatatgttctgtgtgcatgttttgaatgattgaagatgggattaactaatgcaagtttacagttgcctcctaaaacacacattctgtataattatcgctaaatacaatgctgtgaggtctatagttcctgtaacccctttctcctccccaaggacagagaagaactagccatgtgctatagggaaccctgagtgccctactcttttcccaagaagggtaaagcctacaatatcatcagggggcatgaagcacattaatttgcagtggctgcttcatatgaggagatatggtggacaggctaatttttccttgaaaatgtggcttcttcaactcctttcaaatttaggatggaatacttcctgaaataaaactgggctttatgcaggattctctttgaaaattcttgtatgtccagaacaaaagataaaactaattgtattcctcacattcacaatccccattggtctgaagtcacgtagcacagagcatctatagcacatagtgtttaaagactaatgaatgcaaaaagataaaatcttcaactaatttttgaattgtttctcatatatgctactagaaaatgccttgttgatgaagcacattttgggtagttgaggtcttttgttttcgcctttagctttctaagctttcttacaatgtggactgattactgtaacatttcacgtgtaaaataactggatattctttatatactggaaataacctgtgaatccaatatttcactaagtgttttaacttttgtgtatatatctctcatcaa

SEQ ID NO: 28488 - DNA, 4170 bp, Homo sapiens
  source 1..4170: mol_type = unassigned DNA
gctttatttttcaattcttcctagtcccggttttgcatttctaatgacagtgaactgacaaagcgtgaaagtggtctaaggagcaaaacaaagccagcaagcctgcttctggtgtgccaagattaatcaatattccagaaacctcggggtttccccctcctccctgtgcggtttccattccccactcctcctttcccgggcacagactcctccccttttcttaagttgccctgatagtaacttgcagtttcagagcacatgcacactgtcagggctagcctgcctgcttacgcgcgctgcggattgttgctccgttgtacctgctggggaattcacctcgttactgcttgatatcttccaccccttacaaaatcagaaaagttgtgttttctaataccaaagaggaggtttggctttctgtgggtgattcccagacactgaagtgcaaagaagagaccctcctagaaaagtaaaatatgactaaaagcaatggagaagagcccaagatggggggcaggatggagagattccagcagggagtccgtaaacgcacacttttggccaagaagaaagtgcagaacattacaaaggaggatgttaaaagttacctgtttcggaatgcttttgtgctgctcacagtcaccgctgtcattgtgggtacaatccttggatttaccctccgaccatacagaatgagctaccgggaagtcaagtacttctcctttcctggggaacttctgatgaggatgttacagatgctggtcttaccacttatcatctccagtcttgtcacaggaatggcggcgctagatagtaaggcatcagggaagatgggaatgcgagctgtagtctattatatgactaccaccatcattgctgtggtgattggcataatcattgtcatcatcatccatcctgggaagggcacaaaggaaaacatgcacagagaaggcaaaattgtacgagtgacagctgcagatgccttcctggacttgatcaggaacatgttccctccaaatctggtagaagcctgctttaaacagtttaaaaccaactatgagaagagaagctttaaagtgcccatccaggccaacgaaacgcttgtgggtgctgtgataaacaatgtgtctgaggccatggagactcttacccgaatcacagaggagctggtcccagttccaggatctgtgaatggagtcaatgccctgggtctagttgtcttctccatgtgcttcggttttgtgattggaaacatgaaggaacaggggcaggccctgagagagttctttgattctcttaacgaagccatcatgagactggtagcagtaataatgtggtatgcccccgtgggtattctcttcctgattgctgggaagattgtggagatggaagacatgggtgtgattggggggcagcttgccatgtacaccgtgactgtcattgttggcttactcattcacgcagtcatcgtcttgccactcctctacttcttggtaacacggaaaaacccttgggtttttattggagggttgctgcaagcactcatcaccgctctggggacctcttcaagttctgccaccctacccatcaccttcaagtgcctggaagagaacaatggcgtggacaagcgcgtcaccagattcgtgctccccgtaggagccaccattaacatggatgggactgccctctatgaggctttggctgccattttcattgctcaagttaacaactttgaactgaacttcggacaaattattacaatcagcatcacagccacagctgccagtattggggcagctggaattcctcaggcgggcctggtcactatggtcattgtgctgacatctgtcggcctgcccactgacgacatcacgctcatcatcgcggtggactggttcctggatcgcctccggaccaccaccaacgtactgggagactccctgggagctgggattgtggagcacttgtcacgacatgaactgaagaacagagatgttgaaatgggtaactcagtgattgaagagaatgaaatgaagaaaccatatcaactgattgcacaggacaatgaaactgagaaacccatcgacagtgaaaccaagatgtagactaacataaagaaacactttcttgagcaccaggtgttaaaaaccattataaaatctttccatctcattacagctcattcgctccagcaagcccgtcatcttccctttcctcccttctgataagactggaaaatagtcctccaaaacacaagggaggattttgggtggccaaagtgtacaattttcatcccacaattgaaatttttaaatcatttcatgttagtcttaccgaataaggtaccaagatcacaaatagtgttgatcagatcttacaagtttatgtggcacacaatcctataaatgtgatttttttatataagttaaagagacaaatagtaggctaaaaacattttaaaatcaacttttgaaatttaaaaatctttcagaatacaattcagttttagtttcaaaatgttaacaacttgaattacaaccggttatcagttggacagtaagattttatccctttctcttctgactggtatacctatttcattagtagctaggtgcacatatacatctagcacagctgtgaggacagacagaaggcaaagtttccatgtggccttgagcaagtcccatctcacctctaggcctcagtgtcctcatctataaaatgagggacttccctagaagtcttcatggtctcttccagcccagacatcctgtgatgtcatgaaagcacctgccctctgtttcccctcagaacaccctgtaccatccatggagcacgaggccttcagaaaagacacttcaatgggagtgaacatttctaactaaggacaggatggctgtgtgtggtggtcaccaggtcctgtgagcaaagtgcaggttatgcaagtcgccaggcaggaggccattccaggagtgggattattcatcaaactctttgcccagttcatcccaatgggggaagtattcccttctttcctactctgggaagaatgtctcctgccactcctcaactgatgatagacttcgaaaacagatgagaagactagcagctagcaagggtgcttgtggtcacactgtggaacactaaagagctaggaaagagttgagcacaggcaacattacaaacaaaggatttgaaaacaccaagagtacaggtcttctttaaggaagaataaaaaagaagaggttcatttttctggctttttttttcacctgaaacactttttctcgagtccaaaatcattccccccgtgaagtctgcttaccaaaacataagacgacttatatatttgaaagaagtcaaatgaatgagctctctaatagaagtccatgagttgagtgggtatttcttatttgaaagtgtttttctttaatcaaaagtccttagaatgagggaaacaaaatatttatttgttttggaatcccacttatcaaatcattcaaaactttcagctggagtggggtttgcttttgttttgtttgtgtccataagagaaatggtagaagatgaatcagtatgaagacactgtcaatgaggttatgagaaaaaaacagcaggggcattagtttcaggcaaggcagctcccaggtttagagattaatttttaccccctaaggaatatccagtcaaagacgctgagtgggagctgtcaggcagtagcagctgtgtttgagtttctggctgaaaatggtgaagaatggacttaattatgctaacaaactgaaaaatctagacatagatcctctgatatacaattagagatatttttatatagaccccaagcattctgtgcataaaagttaacattaggctgtggtgcagtaaccatttaatgtcgaggctctatttcggaaatacactacaaatgttaaagtacgtggctgtcctcttaagacactagtagagcaaagacttaatcatatcaacttaattctgttacacaatatgtgttttttaatatactaaccatttcttatggaaaggtcctgtggggagcccatcctctcgccaagccatcacaggctctgcatacacatgcactcagtgtggactgggaagcattactttgtagatgtattttcaataaagaaaaaaatagttttacattaa

SEQ ID NO: 28489 - DNA, 3652 bp, Homo sapiens
  source 1..3652: mol_type = unassigned DNA
ttgtgttttctaataccaaagaggaggtttggctttctgtgggtgattcccagacactgaagtgcaaagaagagaccctcctagaaaagtaaaatatgactaaaagcaatggagaagagcccaagatggggggcaggatggagagattccagcagggagtccgtaaacgcacacttttggccaagaagaaagtgcagaacattacaaaggaggatgttaaaagttacctgtttcggaatgcttttgtgctgctcacagtcaccgctgtcattgtgggtacaatccttggatttaccctccgaccatacagaatgagctaccgggaagtcaagtacttctcctttcctggggaacttctgatgaggatgttacagatgctggtcttaccacttatcatctccagtcttgtcacaggaatggcggcgctagatagtaaggcatcagggaagatgggaatgcgagctgtagtctattatatgactaccaccatcattgctgtggtgattggcataatcattgtcatcatcatccatcctgggaagggcacaaaggaaaacatgcacagagaaggcaaaattgtacgagtgacagctgcagatgccttcctggacttgatcaggaacatgttccctccaaatctggtagaagcctgctttaaacagtttaaaaccaactatgagaagagaagctttaaagtgcccatccaggccaacgaaacgcttgtgggtgctgtgataaacaatgtgtctgaggccatggagactcttacccgaatcacagaggagctggtcccagttccaggatctgtgaatggagtcaatgccctgggtctagttgtcttctccatgtgcttcggttttgtgattggaaacatgaaggaacaggggcaggccctgagagagttctttgattctcttaacgaagccatcatgagactggtagcagtaataatgtggtatgcccccgtgggtattctcttcctgattgctgggaagattgtggagatggaagacatgggtgtgattggggggcagcttgccatgtacaccgtgactgtcattgttggcttactcattcacgcagtcatcgtcttgccactcctctacttcttggtaacacggaaaaacccttgggtttttattggagggttgctgcaagcactcatcaccgctctggggacctcttcaagttctgccaccctacccatcaccttcaagtgcctggaagagaacaatggcgtggacaagcgcgtcaccagattcgtgctccccgtaggagccaccattaacatggatgggactgccctctatgaggctttggctgccattttcattgctcaagttaacaactttgaactgaacttcggacaaattattacaatcagggatcgcctccggaccaccaccaacgtactgggagactccctgggagctgggattgtggagcacttgtcacgacatgaactgaagaacagagatgttgaaatgggtaactcagtgattgaagagaatgaaatgaagaaaccatatcaactgattgcacaggacaatgaaactgagaaacccatcgacagtgaaaccaagatgtagactaacataaagaaacactttcttgagcaccaggtgttaaaaaccattataaaatctttccatctcattacagctcattcgctccagcaagcccgtcatcttccctttcctcccttctgataagactggaaaatagtcctccaaaacacaagggaggattttgggtggccaaagtgtacaattttcatcccacaattgaaatttttaaatcatttcatgttagtcttaccgaataaggtaccaagatcacaaatagtgttgatcagatcttacaagtttatgtggcacacaatcctataaatgtgatttttttatataagttaaagagacaaatagtaggctaaaaacattttaaaatcaacttttgaaatttaaaaatctttcagaatacaattcagttttagtttcaaaatgttaacaacttgaattacaaccggttatcagttggacagtaagattttatccctttctcttctgactggtatacctatttcattagtagctaggtgcacatatacatctagcacagctgtgaggacagacagaaggcaaagtttccatgtggccttgagcaagtcccatctcacctctaggcctcagtgtcctcatctataaaatgagggacttccctagaagtcttcatggtctcttccagcccagacatcctgtgatgtcatgaaagcacctgccctctgtttcccctcagaacaccctgtaccatccatggagcacgaggccttcagaaaagacacttcaatgggagtgaacatttctaactaaggacaggatggctgtgtgtggtggtcaccaggtcctgtgagcaaagtgcaggttatgcaagtcgccaggcaggaggccattccaggagtgggattattcatcaaactctttgcccagttcatcccaatgggggaagtattcccttctttcctactctgggaagaatgtctcctgccactcctcaactgatgatagacttcgaaaacagatgagaagactagcagctagcaagggtgcttgtggtcacactgtggaacactaaagagctaggaaagagttgagcacaggcaacattacaaacaaaggatttgaaaacaccaagagtacaggtcttctttaaggaagaataaaaaagaagaggttcatttttctggctttttttttcacctgaaacactttttctcgagtccaaaatcattccccccgtgaagtctgcttaccaaaacataagacgacttatatatttgaaagaagtcaaatgaatgagctctctaatagaagtccatgagttgagtgggtatttcttatttgaaagtgtttttctttaatcaaaagtccttagaatgagggaaacaaaatatttatttgttttggaatcccacttatcaaatcattcaaaactttcagctggagtggggtttgcttttgttttgtttgtgtccataagagaaatggtagaagatgaatcagtatgaagacactgtcaatgaggttatgagaaaaaaacagcaggggcattagtttcaggcaaggcagctcccaggtttagagattaatttttaccccctaaggaatatccagtcaaagacgctgagtgggagctgtcaggcagtagcagctgtgtttgagtttctggctgaaaatggtgaagaatggacttaattatgctaacaaactgaaaaatctagacatagatcctctgatatacaattagagatatttttatatagaccccaagcattctgtgcataaaagttaacattaggctgtggtgcagtaaccatttaatgtcgaggctctatttcggaaatacactacaaatgttaaagtacgtggctgtcctcttaagacactagtagagcaaagacttaatcatatcaacttaattctgttacacaatatgtgttttttaatatactaaccatttcttatggaaaggtcctgtggggagcccatcctctcgccaagccatcacaggctctgcatacacatgcactcagtgtggactgggaagcattactttgtagatgtattttcaataaagaaaaaaatagttttacatt

SEQ ID NO: 28490 - DNA, 558 bp, Homo sapiens
  source 1..558: mol_type = unassigned DNA
acactgtcagggctagcctgcctgcttacgcgcgctgcggattgttgctccgttgtacctgctggggaattcacctcgttactgcttgatatcttccaccccttacaaaatcagaaaagttgtgttttctaataccaaagaggaggtttggctttctgtgggtgattcccagacactgaagtgcaaagaagagaccctcctagaaaagtaaaatatgactaaaagcaatggagaagagcccaagatggggggcaggatggagagattccagcagggagtccgtaaacgcacacttttggccaagaagaaagtgcagaacattacaaaggaggatgttaaaagttacctgtttcggaatgcttttgtgctgctcacagtcaccgctgtcattgtggatgaaaaaactgaagcccaaatccttaccacacagctgatgaatactgagtgggattcaaatccaccattccggctccaggtgctcattcaccacactgttctgggtgctataacacccattctggctttactccagcaatttgctgagggtctgcctgaggt

SEQ ID NO: 28491 - DNA, 1999 bp, Homo sapiens
  source 1..1999: mol_type = unassigned DNA
acatgcacactgtcagggctagcctgcctgcttacgcgcgctgcggattgttgctccgttgtacctgctggggaattcacctcgttactgcttgatatcttccaccccttacaaaatcagaaaagttgtgttttctaataccaaagaggaggtttggctttctgtgggtgattcccagacactgaagtgcaaagaagagaccctcctagaaaagtaaaatatgactaaaagcaatggagaagagcccaagatggggggcaggatggagagattccagcagggagtccgtaaacgcacacttttggccaagaagaaagtgcagaacattacaaaggaggatgttaaaagttacctgtttcggaatgcttttgtgctgctcacaggaatggcggcgctagatagtaaggcatcagggaagatgggaatgcgagctgtagtctattatatgactaccaccatcattgctgtggtgattggcataatcattgtcatcatcatccatcctgggaagggcacaaaggaaaacatgcacagagaaggcaaaattgtacgagtgacagctgcagatgccttcctggacttgatcaggaacatgttccctccaaatctggtagaagcctgctttaaacagtttaaaaccaactatgagaagagaagctttaaagtgcccatccaggccaacgaaacgcttgtgggtgctgtgataaacaatgtgtctgaggccatggagactcttacccgaatcacagaggagctggtcccagttccaggatctgtgaatggagtcaatgccctgggtctagttgtcttctccatgtgcttcggttttgtgattggaaacatgaaggaacaggggcaggccctgagagagttctttgattctcttaacgaagccatcatgagactggtagcagtaataatgtggtatgcccccgtgggtattctcttcctgattgctgggaagattgtggagatggaagacatgggtgtgattggggggcagcttgccatgtacaccgtgactgtcattgttggcttactcattcacgcagtcatcgtcttgccactcctctacttcttggtaacacggaaaaacccttgggtttttattggagggttgctgcaagcactcatcaccgctctggggacctcttcaagttctgccaccctacccatcaccttcaagtgcctggaagagaacaatggcgtggacaagcgcgtcaccagattcgtgctccccgtaggagccaccattaacatggatgggactgccctctatgaggctttggctgccattttcattgctcaagttaacaactttgaactgaacttcggacaaattattacaatcagcatcacagccacagctgccagtattggggcagctggaattcctcaggcgggcctggtcactatggtcattgtgctgacatctgtcggcctgcccactgacgacatcacgctcatcatcgcggtggactggttcctggatcgcctccggaccaccaccaacgtactgggagactccctgggagctgggattgtggagcacttgtcacgacatgaactgaagaacagagatgttgaaatgggtaactcagtgattgaagagaatgaaatgaagaaaccatatcaactgattgcacaggacaatgaaactgagaaacccatcgacagtgaaaccaagatgtagactaacataaagaaacactttcttgagcaccaggtgttaaaaaccattataaaatctttccatctcattacagctcattcgctccagcaagcccgtcatcttccctttcctcccttctgataagactggaaaatagtcctccaaaacacaagggaggattttgggtggccaaagtgtacaattttcatcccacaattgaaatttttaaatcatttcatgttagtcttaccgaataaggtaccaagatcacaaatagtgttgatcagatcttacaagtttatgtggcacacaatcctataaatgtga

SEQ ID NO: 28492 - DNA, 540 bp, Homo sapiens
  source 1..540: mol_type = unassigned DNA
ggtgtctgtttatgccgggtccgctgttaattcggagttgagtcattcggggtggattgggggcagattgtggcgcgagatctagaaaaggatcaaggttgagcggatctgcttaaaagtgactgttgtgttttctaataccaaagaggaggtttggctttctgtgggtgattcccagacactgaagtgcaaagaagagaccctcctagaaaagtaaaatatgactaaaagcaatggagaagagcccaagatggggggcaggatggagagattccagcagggagtccgtaaacgcacacttttggccaagaagaaagtgcagaacattacaaaggaggatgttaaaagttacctgtttcggaatgcttttgtgctgctcacagtcaccgctgtcattgtgggtacaatccttggatttaccctccgaccatacagaatgagctaccgggaagtcaagtacttctcctttcctggggaacttctgatgaggatgttacagatgctggtcttaccacttatcatctccagtcttgtcacagg

SEQ ID NO: 28493 - DNA, 566 bp, Homo sapiens
  source 1..566: mol_type = unassigned DNA
acactgcaaccttgaggtctggtattgtggctctccagtccttgattcctgctgagattatgcaatttgccaagagcttgcctggtgtggagcagcactgatttctcacccctggaggctataactcatgtctctttttctcccattctagttgtgttttctaataccaaagaggaggtttggctttctgtgggtgattcccagacactgaagtgcaaagaagagaccctcctagaaaagtaaaatatgactaaaagcaatggagaagagcccaagatggggggcaggatggagagattccagcagggagtccgtaaacgcacacttttggccaagaagaaagtgcagaacattacaaaggaggatgttaaaagttacctgtttcggaatgcttttgtgctgctcacagtcaccgctgtcattgtgggtacaatccttggatttaccctccgaccatacagaatgagctaccgggaagtcaagtacttctcctttcctggggaacttctgatgaggatgttacagatgctggtcttaccacttatcatctccagtcttgtcacagg

SEQ ID NO: 28494 - DNA, 784 bp, Homo sapiens
  source 1..784: mol_type = unassigned DNA
aaaacaaagccagcaagcctgcttctggtgtgccaagattaatcaatattccagaaacctcggggtttccccctcctccctgtgcggtttccattccccactcctcctttcccgggcacagactcctccccttttcttaagttgccctgatagtaacttgcagtttcagagcacatgcacactgtcagggctagcctgcctgcttacgcgcgctgcggattgttgctccgttgtacctgctggggaattcacctcgttactgcttgatatcttccaccccttacaaaatcagaaaagtcatttgcgaggagtcctttggtttccagttacctcccccacaggcgcacacgctggctgcttgcgttggcagcgacacacatccatgttgtgttttctaataccaaagaggaggtttggctttctgtgggtgattcccagacactgaagtgcaaagaagagaccctcctagaaaagtaaaatatgactaaaagcaatggagaagagcccaagatggggggcaggatggagagattccagcagggagtccgtaaacgcacacttttggccaagaagaaagtgcagaacattacaaaggaggatgttaaaagttacctgtttcggaatgcttttgtgctgctcacagtcaccgctgtcattgtgggtacaatccttggatttaccctccgaccatacagaatgagctaccgggaagtcaagtacttctcctttcctggggaacttctgatgaggatgttacagatgctggtcttaccacttatcatct

SEQ ID NO: 28495 - DNA, 4561 bp, Homo sapiens
  source 1..4561: mol_type = unassigned DNA
ctccagccggcggctgctccagggaggctgggcgcgatcctctccgcccgcggctccaacccgcactctgcgcctctcctcgcctttctcgcacctgctcctgcgccaggcccggagacccccggggcggcttcccagaacctgcggagcacaactggccgaccgacccattcattgggaaccccgtcttttgccagagcccacgtcccctgccacctctagctcggagcggcgtgtagcgccatggagaagagcaacgagaccaacggctaccttgacagcgctcaggcggggcctgcggccgggcccggagctccggggaccgcggcgggacgcgcacggcgttgcgcgggcttcctgcggcgccaagcgctggtgctgctcaccgtgtccggggtgctggcgggcgcgggcctgggcgcggcgttgcgcgggctcagcctgagccgcacgcaggtcacctacctggccttccccggcgagatgctgctccgcatgctgcgcatgatcatcctgccgctggtggtctgcagcctggtgtcgggcgccgcctcgctcgatgccagctgcctcgggcgtctgggcggcatcgctgtcgcctactttggcctcaccacactgagtgcctcggcgctcgccgtggccttggcgttcatcatcaagccaggatccggtgcgcagacccttcagtccagcgacctggggctggaggactcggggcctcctcctgtccccaaagagacggtggactctttcctcgacctggccagaaacctgtttccctccaatcttgtggttgcagctttccgtacgtatgcaaccgattataaagtcgtgacccagaacagcagctctggaaatgtaacccatgaaaagatccccataggcactgagatagaagggatgaacattttaggattggtcctgtttgctctggtgttaggagtggccttaaagaaactaggctccgaaggagaagacctcatccgtttcttcaattccctcaacgaggcgacgatggtgctggtgtcctggattatgtggtacgtacctgtgggcatcatgttccttgttggaagcaagatcgtggaaatgaaagacatcatcgtgctggtgaccagcctggggaaatacatcttcgcatctatattgggccatgttattcatggaggaattgttctgccacttatttattttgttttcacacgaaaaaacccattcagattcctcctgggcctcctcgccccatttgcgacagcatttgctacctgctccagctcagcgacccttccctctatgatgaagtgcattgaagagaacaatggtgtggacaagaggatcagcaggtttattctccccatcggggccaccgtgaacatggacggagcagccatcttccagtgtgtggccgcggtgttcattgcgcaactcaacaacgtagagctcaacgcaggacagattttcaccattctagtgactgccacagcgtccagtgttggagcagcaggcgtgccagctggaggggtcctcaccattgccattatcctggaggccattgggctgcctactcatgacctgcctctgatcctggctgtggactggattgtggaccggaccaccacggtggtgaatgtggaaggggatgccctgggtgcaggcattctccaccacctgaatcagaaggcaacaaagaaaggcgagcaggaacttgctgaggtgaaagtggaagccatccccaactgcaagtctgaggaggagacatcgcccctggtgacacaccagaaccccgctggccccgtggccagtgccccagaactggaatccaaggagtcggttctgtgatggggctgggctttgggcttgcctgccagcagtgatgtcccaccctgttcacccagccgccagtcatggacacagggcactgcccttgccaacttttaccctcccaagcaatgctttggcccagtcgctggcctgaggcttacctctcggcactggcattgggctccccagccggaactggttaccaaggacaaggacactctgacattcggcttgatccatgtccaggtgcaactgtgtgtacaccagggatctgtttggaaacaaccccttgagctgccaggctcaagaaatcatggactcacagggtcctgtgtggttacatcttggaaaaaatgcagatgtatttcactctccccggtcagctctgcatcaggtgttttctgagcaaaccaagggggtttatagtcatctgtcgcattgcctcgagttgcagtaattgaaaaaatgctcaaattcttagccatggctggcctttgctgagctgggactcaggtgtttaaagagtttgtgctatagctaggtgtggatagcttctgatccctgggttctgggagactgcaggtgccgcacattgtcaagttagaaatactccaggtgggtgttagcactgtggtggtctctggtccacagccttaggtaaacaacttagattctgaggtcaaagaaaaaaggagagggaatgcagccttgtgggggagaagcggggcagagggttctctaatctaatcaggacaggacaggtttcacatacaattgtcccagttcgcatcccagccctggggcacttttctgcttccttccagaggcctgggcctctgataacactttggctttttctccattcacgctgatttggcaaaaggccagagatgggcctccttccctggggaggtgtgatgtagttatcacattcaggacccttgttgatttatcatctattatttgaattcaactggacactctgtaaaatgctgcactgcagcaaaaacaaaaccaccaccaccccagagaaaaccatgtactaattggagtggggtacccccattcacaggttcccaggtcccctggctttggctgatttcaaaatatagagccctttcttgccagtacatccaagtttaaaattatcagcgaaatggtccatgtttttccaattacctgctgacacggttctaagctaagtgaaggggaagatctgagagcgtgctgtttgtggctgttgatgcatattcgtgatgtaacaggtcctggggcctcactttaccccatttgtaaaatggggctaatgtcacctgcctcttacctacctcagagggatttggtgaagcaaactgttaatcttcgaaaacgaccatttcacttcttggatatcaagtgctaacccagtatgttcttcttttttatgtaagggacagctttctccacagagtcctttctgctggtgaggacagcatttctgagcagggctttgttctctatgtgcattaggacttttatcatgcccttgttctgtgtgtagttacttgacagcatcaaatgccgcctcttcctaatgtccttcaagttttcatgaactagcaaccccaccttccaccatggttctgggcgcctgattttgctgtgactcccagacccagccactgtttctgccaccctgtaacaggccattaaagctccccagtgttcagcctccttcactcccttgttttccctgttgctatgtgtcacctgggccctacagacaggggcacacgcttatggatgtgtgtaccattgagatgagaatgggtagatggaacggagaccatcaagccacacccccttcttaaaactggggacatgagcctgagcagaaagggtgaagaagagccatgggacacagagttgacccagccagggggaaagcccagctctctttaaaccagctaagccattccagtctcctgtgaagccaaaagggaccaggaaccgtgcaaaggaaactggaaacttttccccgctgggtagagcatgttgctgatactcttctgttttcaagggaaacaatcacattgtttgattccaaatggtaaatgaacactcactattcttcaggcttcagtaaatctttttttcttccttcatatatatatacacaacacacacacacatatgtatatctatacacacatgtgtgttgtgtatatgcatgtgtgtgtgtgcgtgtgtgtatagttttagctccaagccaagcaagtttgtgtttggatagaggggaacttaactattaactacaagttgtatgtctgtggtatcttgattttcccatttctaaagatgaatttcacaaagccataaagcgtgaaattagagctggacttaagactcattggccgaccatcctgtgtcctggcctggccctgcagtaagaagcgtgtctgggtctggagaagggtgcttccgagagtgtgcaggtggcccttccccttggaggcgagaagagagaatgtgctgtctatcttcctggttttcagtccacagagtcggtagaccaggggttacgtgactggggaaaatctcacatctccttgtctgaaaacatttcccctgctgttctctttctaacatgttgtggtaaatctgttcagatactgctcatctgactgttttgtacatgtgacaattgccttaaaacctagcacagtcctcagaaatgaataccgtgtttccactggaa

SEQ ID NO: 28496 - DNA, 2693 bp, Homo sapiens
  source 1..2693: mol_type = unassigned DNA
acttccccgtctgcgtccgcgttcgcggctcccgtttgcatcatctccagccggcggctgctccagggaggctgggcgcgatcctctccgcccgcggctccaacccgcactctgcgcctctcctcgcctttctcgcacctgctcctgcgccaggcccggagacccccggggcggcttcccagaacctgcggagcacaactggccgaccgacccattcattgggaaccccgtcttttgccagagcccacgtcccctgccacctctagctcggagcggcgtgtagcgccatggagaagagcaacgagaccaacggctaccttgacagcgctcaggcggggcctgcggccgggcccggagctccggggaccgcggcgggacgcgcacggcgttgcgcgggctcagcctgagccgcacgcaggtcacctacctggccttccccggcgagatgctgctccgcatgctgcgcatgatcatcctgccgctggtggtctgcagcctggtgtcgggcgccgcctcgctcgatgccagctgcctcgggcgtctgggcggcatcgctgtcgcctactttggcctcaccacactgagtgcctcggcgctcgccgtggccttggcgttcatcatcaagccaggatccggtgcgcagacccttcagtccagcgacctggggctggaggactcggggcctcctcctgtccccaaagagacggtggactctttcctcgacctggccagaaacctgtttccctccaatcttgtggttgcagctttccgtacgtatgcaaccgattataaagtcgtgacccagaacagcagctctggaaatgtaacccatgaaaagatccccataggcactgagatagaagggatgaacattttaggattggtcctgtttgctctggtgttaggagtggccttaaagaaactaggctccgaaggagaagacctcatccgtttcttcaattccctcaacgaggcgacgatggtgctggtgtcctggattatgtggtacgtacctgtgggcatcatgttccttgttggaagcaagatcgtggaaatgaaagacatcatcgtgctggtgaccagcctggggaaatacatcttcgcatctatattgggccatgttattcatggaggaattgttctgccacttatttattttgttttcacacgaaaaaacccattcagattcctcctgggcctcctcgccccatttgcgacagcatttgctacctgctccagctcagcgacccttccctctatgatgaagtgcattgaagagaacaatggtgtggacaagaggatcagcaggtttattctccccatcggggccaccgtgaacatggacggagcagccatcttccagtgtgtggccgcggtgttcattgcgcaactcaacaacgtagagctcaacgcaggacagattttcaccattctagtgactgccacagcgtccagtgttggagcagcaggcgtgccagctggaggggtcctcaccattgccattatcctggaggccattgggctgcctactcatgacctgcctctgatcctggctgtggactggattgtggaccggaccaccacggtggtgaatgtggaaggggatgccctgggtgcaggcattctccaccacctgaatcagaaggcaacaaagaaaggcgagcaggaacttgctgaggtgaaagtggaagccatccccaactgcaagtctgaggaggagacatcgcccctggtgacacaccagaaccccgctggccccgtggccagtgccccagaactggaatccaaggagtcggttctgtgatggggctgggctttgggcttgcctgccagcagtgatgtcccaccctgttcacccagccgccagtcatggacacagggcactgcccttgccaacttttaccctcccaagcaatgctttggcccagtcgctggcctgaggcttacctctcggcactggcattgggctccccagccggaactggttaccaaggacaaggacactctgacattcggcttgatccatgtccaggtgcaactgtgtgtacaccagggatctgtttggaaacaaccccttgagctgccaggctcaagaaatcatggactcacagggtcctgtgtggttacatcttggaaaaaatgcagatgtatttcactctccccggtcagctctgcatcaggtgttttctgagcaaaccaagggggtttatagtcatctgtcgcattgcctcgagttgcagtaattgaaaaaatgctcaaattcttagccatggctggcctttgctgagctgggactcaggtgtttaaagagtttgtgctatagctaggtgtggatagcttctgatccctgggttctgggagactgcaggtgccgcacattgtcaagttagaaatactccaggtgggtgttagcactgtggtggtctctggtccacagccttaggtaaacaacttagattctgaggtcaaagaaaaaaggagagggaatgcagccttgtgggggagaagcggggcagagggttctctaatctaatcaggacaggacaggtttcacatacaattgtcccagttcgcatcccagccctggggcacttttctgcttccttccagaggcctgggcctctgataacactttggctttttctccattcacgctgatttggcaaaaggccagagatgggcctccttccctg

SEQ ID NO: 28497 - DNA, 1217 bp, Homo sapiens
  source 1..1217: mol_type = unassigned DNA
agctgcctggcgggcgacccagccccatcctgatggccccaggacacaagcccaggagcgccccggtgcgcgcggttccgcggcccaggggcgccgggtttggtggcacagcgagccccctttctctagcgaaacctgtttccctccaatcttgtggttgcagctttccgtacgtatgcaaccgattataaagtcgtgacccagaacagcagctctggaaatgtaacccatgaaaagatccccataggcactgagatagaagggatgaacattttaggattggtcctgtttgctctggtgttaggagtggccttaaagaaactaggctccgaaggagaagacctcatccgtttcttcaattccctcaacgaggcgacgatggtgctggtgtcctggattatgtgctcagcgacccttccctctatgatgaagtgcattgaagagaacaatggtgtggacaagaggatcagcaggtttattctccccatcggggccaccgtgaacatggacggagcagccatcttccagtgtgtggccgcggtgttcattgcgcaactcaacaacgtagagctcaacgcaggacagattttcaccattctagtgactgccacagcgtccagtgttggagcagcaggcgtgccagctggaggggtcctcaccattgccattatcctggaggccattgggctgcctactcatgacctgcctctgatcctggctgtggactggattgtggaccggaccaccacggtggtgaatgtggaaggggatgccctgggtgcaggcattctccaccacctgaatcagaaggcaacaaagaaaggcgagcaggaacttgctgaggtgaaagtggaagccatccccaactgcaagtctgaggaggagacatcgcccctggtgacacaccagaaccccgctggccccgtggccagtgccccagaactggaatccaaggagtcggttctgtgatggggctgggctttgggcttgcctgccagcagtgatgtcccaccctgttcacccagccgccagtcatggacacagggcactgcccttgccaacttttaccctcccaagcaatgctttggcccagtcgctggcctgaggcttacctctcggcactggcattgggctccccagccggaactggttaccaaggacaaggacactctgacattcggcttgatccatgtccaggtgcaactgtgtgtacacca

SEQ ID NO: 28498 - DNA, 3722 bp, Homo sapiens
  source 1..3722: mol_type = unassigned DNA
ggaggagccgggcgcgcctgccacgcaaaactaccgggctggcagggcggcgggcgcggtgcgcgatcccgggtggcggcggcaacggcggtggtgacggcggcgactgcagcggccggctctcacctctcccctgtgcacccgcatctcgccgcgccgccgagcagccagcagtccccgggtcgcccagcccacgcgcgcacggccgagcccagcgcacaatagcggcgacagccatggggaaaccggcgaggaaaggatgcgagtggaagcgcttcctgaagaataactgggtgttgctgtccaccgtggccgcggtggtgctaggcattaccacaggagtcttggttcgagaacacagcaacctctcaactctagagaaattctactttgcttttcctggagaaattctaatgcggatgctgaaactcatcattttgccattaattatatccagcatgattacaggtgttgctgcactggattccaacgtatccggaaaaattggtctgcgcgctgtcgtgtattatttctgtaccactctcattgctgttattctaggtattgtgctggtggtgagcatcaagcctggtgtcacccagaaagtgggtgaaattgcgaggacaggcagcacccctgaagtcagtacggtggatgccatgttagatctcatcaggaatatgttccctgagaatcttgtccaggcctgttttcagcagtacaaaactaagcgtgaagaagtgaagcctcccagcgatccagagatgaacatgacagaagagtccttcacagctgtcatgacaactgcaatttccaagaacaaaacaaaggaatacaaaattgttggcatgtattcagatggcataaacgtcctgggcttgattgtcttttgccttgtctttggacttgtcattggaaaaatgggagaaaagggacaaattctggtggatttcttcaatgctttgagtgatgcaaccatgaaaatcgttcagatcatcatgtgttatatgccactaggtattttgttcctgattgctgggaagatcatagaagttgaagactgggaaatattccgcaagctgggcctttacatggccacagtcctgactgggcttgcaatccactccattgtaattctcccgctgatatatttcatagtcgtacgaaagaaccctttccgatttgccatgggaatggcccaggctctcctgacagctctcatgatctcttccagttcagcaacactgcctgtcaccttccgctgtgctgaagaaaataaccaggtggacaagaggatcactcgattcgtgttacccgttggtgcaacaatcaacatggatgggactgcgctctatgaagcagtggcagcggtgtttattgcacagttgaatgacctggacttgggcattgggcagatcatcaccatcagtatcacggccacatctgccagcatcggagctgctggcgtgccccaggctggcctggtgaccatggtgattgtgctgagtgccgtgggcctgcccgccgaggatgtcaccctgatcattgctgtcgactggctcctggaccggttcaggaccatggtcaacgtccttggtgatgcttttgggacgggcattgtggaaaagctctccaagaaggagctggagcagatggatgtttcatctgaagtcaacattgtgaatccctttgccttggaatccacaatccttgacaacgaagactcagacaccaagaagtcttatgtcaatggaggctttgcagtagacaagtctgacaccatctcattcacccagacctcacagttctagggcccctggctgcagatgactggaaacaaggaaggacatttccgtgagagtcatctcaaacactgcttaaggaaaagagaaacactaatggccaagtgtacatttgatttgatatacagacctccagattattttctatatttggattcacagcctttgcgctctgggttttgggatttgggtgtggggtaagttgaagggaaatcaatttaaaggaaagttctattatctgggttttagaaattctataagagacaaagtttggaagtacataaagtaataactgttagaattaggtaatggatatgaaagagaaaatgctttctcatgcatagacaagtgttttgggtttttaaaaaaaatattctgtcattggttacaaatttttactcaggctttctattggcatggatttcctttgacctctcacttttttataaattataatgcatctaaaccacctgtccccagttaatgtgccaaaatgtcaatttttaacttatctccagccaatttcaaagaaaacagaccagcatagttctgcaataacagttttaagatgggcatagggtttggaagaaagggagaaggattcttttttcaatgtactgtattgggacgctggtaactgttaacccagtgttcagcatagagctatatatatatatatatgtatatatttattattttcatataatttgccagacagagatcagaattgaaccgtcaatgtgaaataaagagttctccttgtacttgaataataaccacgattccaacccaggtctgctttggggcttatcagaactcctttctaaggagcactagaatgagaaatcatgttgttcgatcgtttcacatctgtatatcagctctaaagcagagatgtattatggtgatactccaaggtggcatagccattcatttacaacttccagatttgagctgcctggagggaatccatatcagctctgcataagattatatacaaagctgtcactcacaaaaggctggatgtgctttcatccaactggaaggctttattcttccaagttcattcatactcaaagaggccagtactttgccatccttgcacttctgttatcagggcccaaataacagtggcaagctaccaactaagttgtattttaataaagattccatgggttgaacaagccacgttgcagaaaaagagcttcccctaacctgggttgttgcagagtaaatcccacgacataagctggtatcagtggttcgggggaaatagttccattctatgactcttgtctcctcctccaggaggactgttctaactagtaatcttggccctattcattacatcctctgcttgtcattctgctaatttatgaagatagtttattatagtctgtacttcagttctcatcttgtaaataatgcttaacataaacttgtacttacactgaaatccaaaatagtcatgtttctgcagtattctgtagccaacttaaacctgtgctttcatgtttaagaaatgagaaattgtgccaaagatagcagaagagtagataagtgctcagtattgacgacctacatctgaaatctacaacataatgatactgaattgttatgtaaacatcataaatagtaaataatgattcaatgtgaattttaaaatgcaaatattgctattgtttataggaaataaatctaaatataaatgaaattgaatcagtaatttatcttgggctaaatggttctaccccttactaggttgccccaattagtggcactagttggcagagctgttcatgagctgccagttatcattttggagtcagtttgaaaccagcctcttaacacactgctgttaactcataaaagagaagagtgttccatttcagtctcaataaacacttccctcattctttc

SEQ ID NO: 28499 - DNA, 726 bp, Homo sapiens
  source 1..726: mol_type = unassigned DNA
tttcttcaatgctttgagtgatgcaaccatgaaaatcgttcagatcatcatgtgttatatgccactaggtattttgttcctgattgctgggaagatcatagaagttgaagactgggaaatattccgcaagctgggcctttacatggccacagtcctgactgggcttgcaatccactccattgtaattctcccgctgatatatttcatagtcgtacgaaagaaccctttccgatttgccatgggaatggcccaggctctcctgacagctctcatgatctcttccagttcagcaacactgcctgtcaccttccgctgtgctgaagaaaataaccaggtggacaagaggatcactcgattcgtgttacccgttggtgcaacaatcaacatggatgggactgcgctctatgaagcagtggcagcggtgtttattgcacagttgaatgacctggacttgggcattgggcagatcatcaccatcagggaccggttcaggaccatggtcaacgtccttggtgatgcttttgggacgggcattgtggaaaagctctccaagaaggagctggagcagatggatgtttcatctgaagtcaacattgtgaatccctttgccttggaatccacaatccttgacaacgaagactcagacaccaagaagtcttatgtcaatggaggctttgcagtagacaagtctgacaccatctcattcacccagacctcacagttcta

SEQ ID NO: 28500 - DNA, 2880 bp, Homo sapiens
  source 1..2880: mol_type = unassigned DNA
agagccacgcggcacgcccgggaggctttctctggctggtaaccgctactcccggacaccagaccaccgccttccgtacacaggggcccgcatcccaccctcccggacctaagagcctgggtcccctgtttccggaggtccgcttcccggcccccagattctggcatcccagccctcagtgtccaagacccaggcagcccgggtccccgcctcccggatccaggcgtccgggatctgcgccaccagaacctagcctcctgcagacctccgccatctgggggcactcaacctcctggagccaagggccccacgtcccacccagagaaactctcgtattcccagctcctagggccaaggaacccgggcgctccgaactcccagctttcggacatctggcacacggggcagagcagagaagcctcagcgcccagcctggggaatttaaacactccagcttccaagagccaaggaacttcagtgctgtgaactcacaactctaaggagccctccaaagttccagtctccaggtgctgttactcaactcagtcctaggaacgtcgggtcctgggaaggagcccaagcgctcccagccagcttccaggcgctaagaaaccccggtgcttcccatcatggtggccgatcctcctcgagactccaaggggctcgcagcggcggagcccaccgccaacgggggcctggcgctggcctccatcgaggaccaaggcgcggcagcaggcggctactgcggttcccgggaccaggtgcgccgctgccttcgagccaacctgcttgtgctgctgacagtggtggccgtggtggccggcgtggcgctgggactgggggtgtcgggggccgggggtgcgctggcgttgggcccggagcgcttgagcgccttcgtcttcccgggcgagctgctgctgcgtctgctgcggatgatcatcttgccgctggtggtgtgcagcttgatcggcggcgccgccagcctggaccccggcgcgctcggccgtctgggcgcctgggcgctgctctttttcctggtcaccacgctgctggcgtcggcgctcggagtgggcttggcgctggctctgcagccgggcgccgcctccgccgccatcaacgcctccgtgggagccgcgggcagtgccgaaaatgcccccagcaaggaggtgctcgattcgttcctggatcttgcgagaaatatcttcccttccaacctggtgtcagcagcctttcgctcatactctaccacctatgaagagaggaatatcaccggaaccagggtgaaggtgcccgtggggcaggaggtggaggggatgaacatcctgggcttggtagtgtttgccatcgtctttggtgtggcgctgcggaagctggggcctgaaggggagctgcttatccgcttcttcaactccttcaatgaggccaccatggttctggtctcctggatcatgtggtacgcccctgtgggcatcatgttcctggtggctggcaagatcgtggagatggaggatgtgggtttactctttgcccgccttggcaagtacattctgtgctgcctgctgggtcacgccatccatgggctcctggtactgcccctcatctacttcctcttcacccgcaaaaacccctaccgcttcctgtggggcatcgtgacgccgctggccactgcctttgggacctcttccagttccgccacgctgccgctgatgatgaagtgcgtggaggagaataatggcgtggccaagcacatcagccgtttcatcctgcccatcggcgccaccgtcaacatggacggtgccgcgctcttccagtgcgtggccgcagtgttcattgcacagctcagccagcagtccttggacttcgtaaagatcatcaccatcctggtcacggccacagcgtccagcgtgggggcagcgggcatccctgctggaggtgtcctcactctggccatcatcctcgaagcagtcaacctcccggtcgaccatatctccttgatcctggctgtggactggctagtcgaccggtcctgtaccgtcctcaatgtagaaggtgacgctctgggggcaggactcctccaaaattacgtggaccgtacggagtcgagaagcacagagcctgagttgatacaagtgaagagtgagctgcccctggatccgctgccagtccccactgaggaaggaaaccccctcctcaaacactatcgggggcccgcaggggatgccacggtcgcctctgagaaggaatcagtcatgtaaaccccgggagggaccttccctgccctgctgggggtgctctttggacactggattatgaggaatggataaatggatgagctagggctctgggggtctgcctgcacactctggggagccaggggccccagcaccctccaggacaggagatctgggatgcctggctgctggagtacatgtgttcacaagggttactcctcaaaacccccagttctcactcatgtccccaactcaaggctagaaaacagcaagatggagaaataatgttctgctgcgtccccaccgtgacctgcctggcctcccctgtctcagggagcaggtcacaggtcaccatggggaattctagcccccactggggggatgttacaacaccatgctggttattttggcggctgtagttgtggggggatgtgtgtgtgcacgtgtgtgtgtgtgtgtgtgtgtgtgtgtgtgtgtgtgttctgtgacctcctgtccccatggtacgtcccaccctgtccccagatcccctattccctccacaataacagaaacactcccagggactctggggagaggctgaggacaaatacctgctgtcactccagaggacattttttttagcaataaaattgagtgtcaactattt

SEQ ID NO: 28501 - DNA, 1737 bp, Homo sapiens
  source 1..1737: mol_type = unassigned DNA
cttaggaaaactcgacaggatattgaggggaggctccagccctcgggagtaaatatcttcccttccaacctggtgtcagcagcctttcgctcatactctaccacctatgaagagaggaatatcaccggaaccagggtgaaggtgcccgtggggcaggaggtggaggggatgaacatcctgggcttggtagtgtttgccatcgtctttggtgtggcgctgcggaagctggggcctgaaggggagctgcttatccgcttcttcaactccttcaatgaggccaccatggttctggtctcctggatcatgtggtacgcccctgtgggcatcatgttcctggtggctggcaagatcgtggagatggaggatgtgggtttactctttgcccgccttggcaagtacattctgtgctgcctgctgggtcacgccatccatgggctcctggtactgcccctcatctacttcctcttcacccgcaaaaacccctaccgcttcctgtggggcatcgtgacgccgctggccactgcctttgggacctcttccagttccgccacgctgccgctgatgatgaagtgcgtggaggagaataatggcgtggccaagcacatcagccgtttcatcctgcccatcggcgccaccgtcaacatggacggtgccgcgctcttccagtgcgtggccgcagtgttcattgcacagctcagccagcagtccttggacttcgtaaagatcatcaccatcctggtcacggccacagcgtccagcgtgggggcagcgggcatccctgctggaggtgtcctcactctggccatcatcctcgaagcagtcaacctcccggtcgaccatatctccttgatcctggctgtggactggctagtcgaccggtcctgtaccgtcctcaatgtagaaggtgacgctctgggggcaggactcctccaaaattacgtggaccgtacggagtcgagaagcacagagcctgagttgatacaagtgaagagtgagctgcccctggatccgctgccagtccccactgaggaaggaaaccccctcctcaaacactatcgggggcccgcaggggatgccacggtcgcctctgagaaggaatcagtcatgtaaaccccgggagggaccttccctgccctgctgggggtgctctttggacactggattatgaggaatggataaatggatgagctagggctctgggggtctgcctgcacactctggggagccaggggccccagcaccctccaggacaggagatctgggatgcctggctgctggagtacatgtgttcacaagggttactcctcaaaacccccagttctcactcatgtccccaactcaaggctagaaaacagcaagatggagaaataatgttctgctgcgtccccaccgtgacctgcctggcctcccctgtctcagggagcaggtcacaggtcaccatggggaattctagcccccactggggggatgttacaacaccatgctggttattttggcggctgtagttgtggggggatgtgtgtgtgcacgtgtgtgtgtgtgtgtgtgtgtgtgtgtgtgtgtgtgttctgtgacctcctgtccccatggtacgtcccaccctgtccccagatcccctattccctccacaataacagaaacactcccagggactctggggagaggctgaggacaaatacctgctgtcactccagaggacattttttttagcaataaaattgagtgtcaactatttaa

SEQ ID NO: 28502 - DNA, 1927 bp, Homo sapiens
  source 1..1927: mol_type = unassigned DNA
atggggtggagctgaggcccggggcgacctgccctggcctgccgtgggaggccagcattcctcaccccgaacccacaatgcctcagggctagcacgccagcctcttggggctgaaggaggctgactccccaagtcctgcaaaggggtgcaagcctagttccaaccctgccgggctgaggcatgagtaggggctgtatttgcgtgcaggcgggcccccaaagcttccactcgctgccttaaaacgccaacccagcctctcagacaatgctgccctcccactatgtactctaccacctatgaagagaggaatatcaccggaaccagggtgaaggtgcccgtggggcaggaggtggaggggatgaacatcctgggcttggtagtgtttgccatcgtctttggtgtggcgctgcggaagctggggcctgaaggggagctgcttatccgcttcttcaactccttcaatgaggccaccatggttctggtctcctggatcatgtggtacgcccctgtgggcatcatgttcctggtggctggcaagatcgtggagatggaggatgtgggtttactctttgcccgccttggcaagtacattctgtgctgcctgctgggtcacgccatccatgggctcctggtactgcccctcatctacttcctcttcacccgcaaaaacccctaccgcttcctgtggggcatcgtgacgccgctggccactgcctttgggacctcttccagttccgccacgctgccgctgatgatgaagtgcgtggaggagaataatggcgtggccaagcacatcagccgtttcatcctgcccatcggcgccaccgtcaacatggacggtgccgcgctcttccagtgcgtggccgcagtgttcattgcacagctcagccagcagtccttggacttcgtaaagatcatcaccatcctggtcacggccacagcgtccagcgtgggggcagcgggcatccctgctggaggtgtcctcactctggccatcatcctcgaagcagtcaacctcccggtcgaccatatctccttgatcctggctgtggactggctagtcgaccggtcctgtaccgtcctcaatgtagaaggtgacgctctgggggcaggactcctccaaaattacgtggaccgtacggagtcgagaagcacagagcctgagttgatacaagtgaagagtgagctgcccctggatccgctgccagtccccactgaggaaggaaaccccctcctcaaacactatcgggggcccgcaggggatgccacggtcgcctctgagaaggaatcagtcatgtaaaccccgggagggaccttccctgccctgctgggggtgctctttggacactggattatgaggaatggataaatggatgagctagggctctgggggtctgcctgcacactctggggagccaggggccccagcaccctccaggacaggagatctgggatgcctggctgctggagtacatgtgttcacaagggttactcctcaaaacccccagttctcactcatgtccccaactcaaggctagaaaacagcaagatggagaaataatgttctgctgcgtccccaccgtgacctgcctggcctcccctgtctcagggagcaggtcacaggtcaccatggggaattctagcccccactggggggatgttacaacaccatgctggttattttggcggctgtagttgtggggggatgtgtgtgtgcacgtgtgtgtgtgtgtgtgtgtgtgtgtgtgtgtgtgtgttctgtgacctcctgtccccatggtacgtcccaccctgtccccagatcccctattccctccacaataacagaaacactcccagggactctggggagaggctgaggacaaatacctgctgtcactccagaggacattttttttagcaataaaattgagtgtcaactatttaa

SEQ ID NO: 28503 - DNA, 2873 bp, Homo sapiens
  source 1..2873: mol_type = unassigned DNA
cggcacgcccgggaggctttctctggctggtaaccgctactcccggacaccagaccaccgccttccgtacacaggggcccgcatcccaccctcccggacctaagagcctgggtcccctgtttccggaggtccgcttcccggcccccagattctggcatcccagccctcagtgtccaagacccaggcagcccgggtccccgcctcccggatccaggcgtccgggatctgcgccaccagaacctagcctcctgcagacctccgccatctgggggcactcaacctcctggagccaagggccccacgtcccacccagagaaactctcgtattcccagctcctagggccaaggaacccgggcgctccgaactcccagctttcggacatctggcacacggggcagagcagagaagcctcagcgcccagcctggggaatttaaacactccagcttccaagagccaaggaacttcagtgctgtgaactcacaactctaaggagccctccaaagttccagtctccaggtgctgttactcaactcagtcctaggaacgtcgggtcctgggaaggagcccaagcgctcccagccagcttccaggcgctaagaaaccccggtgcttcccatcatggtggccgatcctcctcgagactccaaggggctcgcagcggcggagcccaccgccaacgggggcctggcgctggcctccatcgaggaccaaggcgcggcagcaggcggctactgcggttcccgggaccaggtgcgccgctgccttcgagccaacctgcttgtgctgctgacagtggtggccgtggtggccggcgtggcgctgggactgggggtgtcgggggccgggggtgcgctggcgttgggcccggagcgcttgagcgccttcgtcttcccgggcgagctgctgctgcgtctgctgcggatgatcatcttgccgctggtggtgtgcagcttgatcggcggcgccgccagcctggaccccggcgcgctcggccgtctgggcgcctgggcgctgctctttttcctggtcaccacgctgctggcgtcggcgctcggagtgggcttggcgctggctctgcagccgggcgccgcctccgccgccatcaacgcctccgtgggagccgcgggcagtgccgaaaatgcccccagcaaggaggtgctcgattcgttcctggatcttgcgagaaatatcttcccttccaacctggtgtcagcagcctttcgctcatactctaccacctatgaagagaggaatatcaccggaaccagggtgaaggtgcccgtggggcaggaggtggaggggatgaacatcctgggcttggtagtgtttgccatcgtctttggtgtggcgctgcggaagctggggcctgaaggggagctgcttatccgcttcttcaactccttcaatgaggccaccatggttctggtctcctggatcatgtggtacgcccctgtgggcatcatgttcctggtggctggcaagatcgtggagatggaggatgtgggtttactctttgcccgccttggcaagtacattctgtgctgcctgctgggtcacgccatccatgggctcctggtactgcccctcatctacttcctcttcacccgcaaaaacccctaccgcttcctgtggggcatcgtgacgccgctggccactgcctttgggacctcttccagttccgccacgctgccgctgatgatgaagtgcgtggaggagaataatggcgtggccaagcacatcagccgtttcatcctgcccatcggcgccaccgtcaacatggacggtgccgcgctcttccagtgcgtggccgcagtgttcattgcacagctcagccagcagtccttggacttcgtaaagatcatcaccatcctggtcacggccacagcgtccagcgtgggggcagcgggcatccctgctggaggtgtcctcactctggccatcatcctcgaagcagtcaacctcccggtcgaccatatctccttgatcctggctgtggactggctagtcgaccggtcctgtaccgtcctcaatgtagaaggtgacgctctgggggcaggactcctccaaaattacgtggaccgtacggagtcgagaagcacagagcctgagttgatacaagtgaagagtgagctgcccctggatccgctgccagtccccactgaggaaggaaaccccctcctcaaacactatcgggggcccgcaggggatgccacggtcgcctctgagaaggaatcagtcatgtaaaccccgggagggaccttccctgccctgctgggggtgctctttggacactggattatgaggaatggataaatggatgagctagggctctgggggtctgcctgcacactctggggagccaggggccccagcaccctccaggacaggagatctgggatgcctggctgctggagtacatgtgttcacaagggttactcctcaaaacccccagttctcactcatgtccccaactcaaggctagaaaacagcaagatggagaaataatgttctgctgcgtccccaccgtgacctgcctggcctcccctgtctcagggagcaggtcacaggtcaccatggggaattctagcccccactggggggatgttacaacaccatgctggttattttggcggctgtagttgtggggggatgtgtgtgtgcacgtgtgtgtgtgtgtgtgtgtgtgtgtgtgtgtgtgtgttctgtgacctcctgtccccatggtacgtcccaccctgtccccagatcccctattccctccacaataacagaaacactcccagggactctggggagaggctgaggacaaatacctgctgtcactccagaggacattttttttagcaataaaattgagtgtcaactatttaa

SEQ ID NO: 28504 - DNA, 2049 bp, Homo sapiens
  source 1..2049: mol_type = unassigned DNA
ttctatttgcccagagcttttgtccagaaactctctgtcctgagaggtgattaaagaaggcatccagcaagaactgcacaagaaacggagtcagccggagaacaaggagtggtcttccactgcctcacaggaggatggaggcccacaacgcgtctgccccattcaacttcaccctgccacccaactttggcaagcgccccacagacctggcactgagcgtcatcctggtgttcatgttgttcttcatcatgctctcgctgggctgcaccatggagttcagcaagatcaaggctcacttatggaagcctaaagggctggccatcgccctggtggcacagtatggcatcatgcccctcacggcctttgtgctgggcaaggtcttccggctgaagaacattgaggcactggccatcttggtctgtggctgctcacctggagggaacctgtccaatgtcttcagtctggccatgaagggggacatgaacctcagcattgtgatgaccacctgctccaccttctgtgcccttggcatgatgcctctcctcctgtacatctactccagggggatctatgatggggacctgaaggacaaggtgccctataaaggcatcgtgatatcactggtcctggttctcattccttgcaccatagggatcgtcctcaaatccaaacggccacaatacatgcgctatgtcatcaagggagggatgatcatcattctcttgtgcagtgtggccgtcacagttctctctgccatcaatgtggggaagagcatcatgtttgccatgacaccactcttgattgccacctcctccctgatgccttttattggctttctgctgggttatgttctctctgctctcttctgcctcaatggacggtgcagacgcactgtcagcatggagactggatgccaaaatgtccaactctgttccaccatcctcaatgtggcctttccacctgaagtcattggaccacttttcttctttcccctcctctacatgattttccagcttggagaagggcttctcctcattgccatattttggtgctatgagaaattcaagactcccaaggataaaacaaaaatgatctacacagctgccacaactgaagaaacaattccaggagctctgggaaatggcacctacaaaggggaggactgctccccttgcacagcctagcccttcccctggtggcctggattctggtcccaaagcaattctgaaagccagtgtggtaaactagagagagcagcaaaaacaccagtcttgcctgagtctttctccagcatttccagtacatctatcagaatcatcaagtcttggccgggaacacagacagggtgtctacccaagaagcctcacctatccccaacttagaatttgctacttattttaaagacttgttcagtgactgtaaactctatgaaaccagaaaccgaatctgcctcttgctgggatctctaaaagtgtctgataagcatcttaaagtcactcaattcctgaactaatcaatatatatgtttaacccattactcaaatacccaaatcccattccaagttttgtgacccaaaagagaaataaatgctcacaagtgctgtagaattaaacttcagaagttctaacctaaaaagttcagatcctattccttcccttttgacattattgggatgatgctcccgaaaagtcaaatttgacatcaagtatgcaaaagtgaacacagtaagatgcaatcaggcaaaacaaactcaaaaaatagctaatgaaatgaaaaaactgggcgaatgcatcatgttagtagaggaggaaaacttttgacaaggaaaaaccaggaaacaaacacatacattaacacaatgttacctcactaataatctcttttttaagttcagtaggtatttggttttaacacaaggcgcccccaaaactgggtacagcaaactactgccaaaatgagtcgtttcccaattcaaagaaaaatgttcaaatacctagaattcacaaatttcaaattgtctctaataaaatttaaacattttgcatatc

SEQ ID NO: 28505 - DNA, 3777 bp, Homo sapiens
  source 1..3777: mol_type = unassigned DNA
ttctattgaaagggaaatgggagaacaatatgtgttcctatggctcagtccctataagattctgtactattcagagttgattttaagtgtcacttaactgaaattatccaacaaaccttcatggcatgaaacattaacacagctctttttatatggcatggttcctatggctcaatccctataagattctgtactattcagagttgattttaaaagtcacttaactgaaattatccaacaaaccctcgaggacattaaacattaacgtggctctttttatatggcatggttcattatcatgccaataaatgattaatcgtaactctctgtcttgaccaataattttgctggacttttgtgattcacaacgtgctctgtgttgtaatgctacctcttgaaactgacatcctagctttattgttttttattacttccctaaggtggctttcaaaagagacaccaagtgacatatttttaggaggggtttaaaagtttgatggggtagaagtaaacgttgcttaactcaaccagcagcagagccagggcccagggaccagcgcttctgtggacttggcctttccagcagcagacccagcaatgaatgatccgaacagctgtgtggacaatgcaacagtttgctctggtgcatcctgtgtggtacctgagagcaatttcaataacatcctaagtgtggtcctaagtacggtgctgaccatcctgttggccttggtgatgttctccatgggatgcaacgtggaaatcaagaaatttctagggcacataaagcggccgtggggcatttgtgttggcttcctctgtcagtttggaatcatgcccctcacaggattcatcctgtcggtggcctttgacatcctcccgctccaggccgtagtggtgctcattataggatgctgccctggaggaactgcctccaatatcttggcctattgggtcgatggcgacatggacctgagcgtcagcatgaccacatgctccacactgcttgccctcggaatgatgccgctgtgcctccttatctataccaaaatgtgggtcgactctgggagcatcgtaattccctatgataacataggtacatctctggtttctctcgttgttcctgtttccattggaatgtttgttaatcacaaatggccccaaaaagcaaagatcatacttaaaattgggtccatcgcgggcgccatcctcattgtgctcatagctgtggttggaggaatattgtaccaaagcgcctggatcattgctcccaaactgtggattataggaacaatatttcctgtggcgggttactccctggggtttcttctggctagaattgctggtctaccctggtacaggtgccgaacggttgcttttgaaacggggatgcagaacacgcagctatgttccaccatcgttcagctctccttcactcctgaggagctcaatgtcgtattcaccttcccgctcatctacagcattttccagctcgcctttgccgcaatattcttaggattttatgtggcatacaagaaatgtcatggaaaaaacaaggcagaaattccagagagcaaagaaaatggaacggagccagagtcatcgttttataaggcaaatggaggatttcaacctgacgaaaagtagacatcaagtggacaaaacagacgagttccaaattacgttcttaaaccgtaactatatttaattatttgttttggtaggacagttggcagaaaagagttaaagtgaaaattggaatttcattggaattcatgtattggtttcagtaccaagtgactggtggcccaattctttaatgggacaaatattgtttcctatatatatgtatatgttttatatatgtatgtatactcatatagatatattgtcattgaaatattcccccaaaatattctcagactaaacctgacatagggaacaccgagaatgaaaacatctttaacaccaaaactgaattcttatgcagaatttcctagcccatagatgacaacctgactttctgtatgttaaagtagatgtaatgaattattattattacagtggtcacgattttcttcagtgtttatgattataaaaattgacatgaacatctttcactgacattttaatcattattttaaaagctttgcaacctatatatttatataactttgtaatataacatgggcaaatatctgacttctgtatttttaaaaagttgccttctccagtggcagtccaaaagcagaaatgagaggaaattattacaaaatagaattcaataaccatattggatgcaggctcttaactcagcagggatatcgtacatctattgctctacctcaggggtccagtgatacccactagatcttccaaggaaaaacataattctttcaaacggtgtgtatttggcaaagagctcttcaaatctgggagagggacttcctcaaggttttcctgtgtgcagtggatccacatagctaatatgacagctagtcagttgacagggaccacccacagtaagcaccatggtcagggaggtggcaggaggtgcaaagacagaagtattgagagaaacaccaagactctagtggaggaattaattcaatgggagatagtataaaatacatagaaaacacaagtaacagaaacctggttgaaatgcttaactagagtcaattagatgtgcaggagtaagtagtataagaagaatcaagtccgagagtgatcaggaaatgagtattaaacagtatttgaaacagagaacgtgtcccagggcccaaaagtcagaagggccccaccagccaggaaagttgtttcaatgctgtaagtaggtgtagccaagggaagccaggactatctgatatacggtagcaggggtttacggctgccaggggaaaataactcatcaagtgttggactttcaattataagatcgaatttaatttcctttccctcattctgcagcaatcagaatacacaatcttaaccactcggtccttagtggttttgttccattttgcattgggtattttcactgcctcatagagtctatttcaagtgttttggctgaaagggctttttgcatttgcatgttctgagttcagattctgctggtgcacccaagcattatgggaacaggaactcaacttagctcttccagtagaggggtgagggattctgcttttcaaattcataacattgatctttttatgcaagatttccatttacagttgaataagtacttcatatttttccatcattagacaaatacaaaatggactaaataattttaagagatagtggaggagagggggtacagacttccttcttagagagtgtcagagaatatgctcccaatggtggaaaggaagatttacagtctagcggctaagtacctcctacacatttcccatcaatcagaaaatagacaggtacactaaagggaccctgagaactcctcttgtaatttcaacacacccaaaatcaagggcctggatgccagcagctgcagcaagcaggtttttcctccctgttgagcaagacaggtgagcaagataggacttggctttcttacatgatgcggtaacttgtgacttgagtctttttccctaatttgctagtgggaagaaaaatagctgagctttctaaaatgatagctctctatttttaaatgaatttgaaaagtcgattaaattatgtattttattgcctctgagtatcatattaaatgaatattttattttaaaggcttaaataaatgaaaatgatttttgt

SEQ ID NO: 28506 - DNA, 2127 bp, Homo sapiens
  source 1..2127: mol_type = unassigned DNA
acaggccgagctcgcgggcgactgcctgccaggcagacgctgcagctaagctgcgcggtggctgtggcaggtgagagcctccggaagggaggcggcctctggccccgaccctgctccgcgatcgcccactcgggcgcccggccgggcctggcagggaagggccgccgccgccgccgcgcgtttgcgaggcctggcggggccgcggggcccaggaatggcgtaaggggcccccccagactccgagacggcccgagcgggtcgccggctgtgggacggcggcgtgcccttcctttcctccctcccaggttcgcgcccgagctctgctagccacccgtccgacaacttccggactcccagggacagccctgccatcaaggaagacagcacaggactgggacccacccatgaacccttctcaggacaacccaacagcaccagtggggatgttctcctaagccgcagagggcctgggcacgccatccgtcctccaggaagagccatggtgttaatgcaggacaagggcagctctcagcagtggcctggtctggggggcgagggtggtggcacaggtcccttaagcatgctcagagctgccctgctgctcatcagcctgccatggggggcccaagggacagccagcaccagcctcagcactgctgggggtcacaccgtgccaccgactgggggccgctacttgagcattggagatggctctgtgatggagtttgagtttcctgaggacagtgagggcatcatcgtgatctccagccagtacccaggccaggccaacaggacggcgcctggccccatgctcagggtcacctccctggacacagaggtgctgaccatcaagaacgtgagtgctataacctggggaggcgggggtggctttgtggtgagcatccactcaggcctggctgggctggccccactccacatccagctcgtggacgcccatgaggccccgcccacactgattgaggagcggagagacttctgcatcaaggtctcacctgctgaagacacgcctgccaccctcagcgccgacctggcccacttctcggaaaacccaatcctctacctgctcctgcctcttatctttgtcaacaagtgttcgtttgggtgcaaagtggaactcgaggttctgaaggggctcatgcagagcccccagcccatgctgctgggcctcctgggccagtttctggtcatgcccttgtacgctttcctcatggccaaggtcttcatgctgcccaaggccctggctctgggcctcatcatcacctgctcgtcgcctggcggcggggggagctacctcttcagcctccttcttggaggggacgtcaccctggccatctccatgactttcctctctacggtggctgccactggcttcttgcctctgtcttcggccatctacagccgcctgctcagcatccatgagacgctccacgtgcccatctccaagatcctggggaccctgctgttcattgccatccccatagccgtgggcgtgctgatcaagtccaagctccccaagttctcccagctgctgctgcaggtcgtcaagcccttcagctttgtgctcctcctgggcggcctcttcctggcctatcgcatgggggtcttcatcctggcaggcatccggctacccatcgtactggtgggtatcacggtgcccctggttggcctgttggtgggctactgcctagccacgtgtctgaagctgccagtggcccagcggcggacggtcagcattgaggtaggggtgcagaacagcctgctggccttggccatgctgcagctatccctccgccgccttcaagctgactatgcctcccaggcccccttcattgtggcgctgagcggcacctccgagatgctggccttggtcattggccacttcatctacagcagcctgttcccagttccctgaggcctctgggtcaagctttcatcagccccagcccccacactccaccaaagttctcatgcactatgcactcagaaaaatccaggcttattttttttactgattttttattctccagctttcagtgccaaagaggccatgctgagttaggtaggtgggcgctgcccagaaaatatatttcaataaaagagagaagc

SEQ ID NO: 28507 - DNA, 1763 bp, Homo sapiens
  source 1..1763: mol_type = unassigned DNA
gctgcgcggtggctgtggcaggttcgcgcccgagctctgctagccacccgtccgacaacttccggactcccagggacagccctgccatcaaggaagacagcacaggactgggacccacccatgaacccttctcaggacaacccaacagcaccagtggggatgttctcctaagccgcagagggcctgggcacgccatccgtcctccaggaagagccatggtgttaatgcaggacaagggcagctctcagcagtggcctggtctggggggcgagggtggtggcacaggtcccttaagcatgctcagagctgccctgctgctcatcagcctgccatggggggcccaagggacagccagcaccagcctcagcactgctgggggtcacaccgtgccaccgactgggggccgctacttgagcattggagatggctctgtgatggagtttgagtttcctgaggacagtgagggcatcatcgtgatctccagccagtacccaggccaggccaacaggacggcgcctggccccatgctcagggtcacctccctggacacagaggtgctgaccatcaagaacctcgtggacgcccatgaggccccgcccacactgattgaggagcggagagacttctgcatcaaggtctcacctgctgaagacacgcctgccaccctcagcgccgacctggcccacttctcggaaaacccaatcctctacctgctcctgcctcttatctttgtcaacaagtgttcgtttgggtgcaaagtggaactcgaggttctgaaggggctcatgcagagcccccagcccatgctgctgggcctcctgggccagtttctggtcatgcccttgtacgctttcctcatggccaaggtcttcatgctgcccaaggccctggctctgggcctcatcatcacctgctcgtcgcctggcggcggggggagctacctcttcagcctccttcttggaggggacgtcaccctggccatctccatgactttcctctctacggtggctgccactggcttcttgcctctgtcttcggccatctacagccgcctgctcagcatccatgagacgctccacgtgcccatctccaagatcctggggaccctgctgttcattgccatccccatagccgtgggcgtgctgatcaagtccaagctccccaagttctcccagctgctgctgcaggtcgtcaagcccttcagctttgtgctcctcctgggcggcctcttcctggcctatcgcatgggggtcttcatcctggcaggcatccggctacccatcgtactggtgggtatcacggtgcccctggttggcctgttggtgggctactgcctagccacgtgtctgaagctgccagtggcccagcggcggacggtcagcattgaggtaggggtgcagaacagcctgctggccttggccatgctgcagctatccctccgccgccttcaagctgactatgcctcccaggcccccttcattgtggcgctgagcggcacctccgagatgctggccttggtcattggccacttcatctacagcagcctgttcccagttccctgaggcctctgggtcaagctttcatcagccccagcccccacactccaccaaagttctcatgcactatgcactcagaaaaatccaggcttattttttttactgattttttattctccagctttcagtgccaaagaggccatgctgagttaggtaggtgggcgctgcccagaaaatatatttcaataaaagagagaagcaagcttg

SEQ ID NO: 28508 - DNA, 1893 bp, Homo sapiens
  source 1..1893: mol_type = unassigned DNA
gacgctgcagctaagctgcgcggtggctgtggcagctcctgtactttgcctctcccaccccactggttttcctgcctccctcttcagaggtaagacacatggctggaccaaggcctccaggggacagccctgccatcaaggaagacagcacaggactgggacccacccatgaacccttctcaggacaacccaacagcaccagtggggatgttctcctaagccgcagagggcctgggcacgccatccgtcctccaggaagagccatggtgttaatgcaggacaagggcagctctcagcagtggcctggtctggggggcgagggtggtggcacaggtcccttaagcatgctcagagctgccctgctgctcatcagcctgccatggggggcccaagggacagccagcaccagcctcagcactgctgggggtcacaccgtgccaccgactgggggccgctacttgagcattggagatggctctgtgatggagtttgagtttcctgaggacagtgagggcatcatcgtgatctccagccagtacccaggccaggccaacaggacggcgcctggccccatgctcagggtcacctccctggacacagaggtgctgaccatcaagaacgtgagtgctataacctggggaggcgggggtggctttgtggtgagcatccactcaggcctggctgggctggccccactccacatccagctcgtggacgcccatgaggccccgcccacactgattgaggagcggagagacttctgcatcaaggtctcacctgctgaagacacgcctgccaccctcagcgccgacctggcccacttctcggaaaacccaatcctctacctgctcctgcctcttatctttgtcaacaagtgttcgtttgggtgcaaagtggaactcgaggttctgaaggggctcatgcagagcccccagcccatgctgctgggcctcctgggccagtttctggtcatgcccttgtacgctttcctcatggccaaggtcttcatgctgcccaaggccctggctctgggcctcatcatcacctgctcgtcgcctggcggcggggggagctacctcttcagcctccttcttggaggggacgtcaccctggccatctccatgactttcctctctacggtggctgccactggcttcttgcctctgtcttcggccatctacagccgcctgctcagcatccatgagacgctccacgtgcccatctccaagatcctggggaccctgctgttcattgccatccccatagccgtgggcgtgctgatcaagtccaagctccccaagttctcccagctgctgctgcaggtcgtcaagcccttcagctttgtgctcctcctgggcggcctcttcctggcctatcgcatgggggtcttcatcctggcaggcatccggctacccatcgtactggtgggtatcacggtgcccctggttggcctgttggtgggctactgcctagccacgtgtctgaagctgccagtggcccagcggcggacggtcagcattgaggtaggggtgcagaacagcctgctggccttggccatgctgcagctatccctccgccgccttcaagctgactatgcctcccaggcccccttcattgtggcgctgagcggcacctccgagatgctggccttggtcattggccacttcatctacagcagcctgttcccagttccctgaggcctctgggtcaagctttcatcagccccagcccccacactccaccaaagttctcatgcactatgcactcagaaaaatccaggcttattttttttactgattttttattctccagctttcagtgccaaagaggccatgctgagttaggtaggtgggcgctgcccagaaaatatatttcaataaaagagagaagcaa

SEQ ID NO: 28509 - DNA, 1862 bp, Homo sapiens
  source 1..1862: mol_type = unassigned DNA
acaggccgagctcgcgggcgactgcctgccaggcagacgctgcagctaagctgcgcggtggctgtggcaggttcgcgcccgagctctgctagccacccgtccgacaacttccggactcccagggacagccctgccatcaaggaagacagcacaggactgggacccacccatgaacccttctcaggacaacccaacagcaccagtggggatgttctcctaagccgcagagggcctgggcacgccatccgtcctccaggaagagccatggtgttaatgcaggacaagggcagctctcagcagtggcctggtctggggggcgagggtggtggcacaggtcccttaagcatgctcagagctgccctgctgctcatcagcctgccatggggggcccaagggacagccagcaccagcctcagcactgctgggggtcacaccgtgccaccgactgggggccgctacttgagcattggagatggctctgtgatggagtttgagtttcctgaggacagtgagggcatcatcgtgatctccagccagtacccaggccaggccaacaggacggcgcctggccccatgctcagggtcacctccctggacacagaggtgctgaccatcaagaacgtgagtgctataacctggggaggcgggggtggctttgtggtgagcatccactcaggcctggctgggctggccccactccacatccagctcgtggacgcccatgaggccccgcccacactgattgaggagcggagagacttctgcatcaaggtctcacctgctgaagacacgcctgccaccctcagcgccgacctggcccacttctcggaaaacccaatcctctacctgctcctgcctcttatctttgtcaacaagtgttcgtttgggtgcaaagtggaactcgaggttctgaaggggctcatgcagagcccccagcccatgctgctgggcctcctgggccagtttctggtcatgcccttgtacgctttcctcatggccaaggtcttcatgctgcccaaggccctggctctgggcctcatcatcacctgctcgtcgcctggcggcggggggagctacctcttcagcctccttcttggaggggacgtcaccctggccatctccatgactttcctctctacggtggctgccactggcttcttgcctctgtcttcggccatctacagccgcctgctcagcatccatgagacgctccacgtgcccatctccaagatcctggggaccctgctgttcattgccatccccatagccgtgggcgtgctgatcaagtccaagctccccaagttctcccagctgctgctgcaggtcgtcaagcccttcagctttgtgctcctcctgggcggcctcttcctggcctatcgcatgggggtcttcatcctggcaggcatccggctacccatcgtactggtgggtatcacggtgcccctggttggcctgttggtgggctactgcctagccacgtgtctgaagctgccagtggcccagcggcggacggtcagcattgaggtaggggtgcagaacagcctgctggccttggccatgctgcagctatccctccgccgccttcaagctgactatgcctcccaggcccccttcattgtggcgctgagcggcacctccgagatgctggccttggtcattggccacttcatctacagcagcctgttcccagttccctgaggcctctgggtcaagctttcatcagccccagcccccacactccaccaaagttctcatgcactatgcactcagaaaaatccaggcttattttttttactgattttttattctccagctttcagtgccaaagaggccatgctgagttaggtaggtgggcgctgccc

SEQ ID NO: 28510 - DNA, 1167 bp, Homo sapiens
  source 1..1167: mol_type = unassigned DNA
ggggcggggccctgacaggccgagctcgcgggcgactgcctgccaggcagacgctgcagctaagctgcgcggtggctgtggcaggtgagagcctccggaagggaggcggcctctggccccgaccctgctccgcgatcgcccactcgggcgcccggccgggcctggcagggaagggccgccgccgccgccgcgcgtttgcgaggcctggcggggccgcggggcccaggaatggcgtaaggggcccccccagactccgagacggcccgagcgggtcgccggctgtgggacggcggcgtgcccttcctttcctccctcccaggttcgcgcccgagctctgctagccacccgtccgacaacttccggactcccagggacagccctgccatcaaggaagacagcacaggactgggacccacccatgaacccttctcaggacaacccaacagcaccagtggggatgttctcctaagccgcagagggcctgggcacgccatccgtcctccaggaagagccatggtgttaatgcaggacaagggcagctctcagcagtggcctggtctggggggcgagggtggtggcacaggtcccttaagcatgctcagagctgccctgctgctcatcagcctgccatggggggcccaagggacagccagcaccagcctcagcactgctgggggtcacaccgtgccaccgactgggggccgctacttgagcattggagatggctctgtgatggagtttgagtttcctgaggacagtgagggcatcatcgtgatctccagccagtacccaggccaggccaacaggacggcgcctggccccatgctcagggtcacctccctggacacagaggtgctgaccatcaagaacgtgagtgctataacctggggaggcgggggtggctttgtggtgagcatccactcaggcctggctgggctggccccactccacatccagctcgtggacgcccatgaggccccgcccacactgattgaggagcggagagacttctgcatcaaggtctcacctgctgaagacacgcctgccaccctcagcgccgacctggcccacttctcggaaaacccaatcctctacctgctcctgcctcttatctttgtcaacaagtgttcgtttgggtgcaaagtggaactcgaggttctgaagggg

SEQ ID NO: 28511 - DNA, 1790 bp, Homo sapiens
  source 1..1790: mol_type = unassigned DNA
acccggggggccgcgctgcgcggagtgccaggctgcgggcggctgcagacctgggagcggagaccggcccgccgcccccgacgccgccgagcacgtcagcggcgcgcagccggggctcggagaccgacgggcagaacgacgggcggcgactgcggcgaccgcgggacggcgagaggcacgcggcgggaggggaccggaatccgcagctccggccgcgccatggacggcaacgacaacgtgaccctgctcttcgcccctctgctgcgggacaactacaccctggcgcccaatgccagcagcctgggccccggcacggacctcgccctcgcccctgcctccagcgccggccccggccctgggctcagcctcgggccgggtccgagcttcggcttcagccccggccccactccgaccccggagcccacgaccagcggcctcgcgggcggcgcggcgagccacggcccttccccgttccctcggccctgggcgccccacgcgctcccgttctgggacacgccgctgaaccacgggctgaacgtgttcgtgggcgccgccctgtgcatcaccatgctgggcctgggctgcacggtggacgtgaaccacttcggggcgcacgtccgtcggcccgtgggcgcgctgctggcagcgctctgccagttcggcctcctgccgctgctggccttcctgctggccctcgccttcaagctggacgaggtggccgccgtggcggtgctcctgtgtggctgctgtcccggcggcaatctctccaatcttatgtccctgctggttgacggcgacatgaacctcagcatcatcatgaccatctcctccacgcttctggccctcgtcttgatgcccctgtgcctgtggatctacagctgggcttggatcaacacccctatcgtgcagttactacccctagggaccgtgaccctgactctctgcagcactctcatacctatcgggttgggcgtcttcattcgctacaaatacagccgggtggctgactacattgtgaaggtttccctgtggtctctgctagtgactctggtggtccttttcataatgaccggcactatgttaggacctgaactgctggcaagtatccctgcagctgtttatgtgatagcaatttttatgcctttggcaggctacgcttcaggttatggtttagctactctcttccatcttccacccaactgcaagaggactgtatgtctggaaacaggtagtcagaatgtgcagctctgtacagccattctaaaactggcctttccaccgcaattcataggaagcatgtacatgtttcctttgctgtatgcacttttccagtctgcagaagcggggatttttgttttaatctataaaatgtatggaagtgaaatgttgcacaagcgagatcctctagatgaagatgaagatacagatatttcttataaaaaactaaaagaagaggaaatggcagacacttcctatggcacagtgaaagcagaaaatataataatgatggaaaccgctcagacttctctctaaatgtggagatacacaggagcttctatcttgctgaaatattgcttcatatttatagcctgtggtagtgcacatggttaacataaaagataacactggttcacatcatacatgtaacaattctgatctttttaaggttcactggtgtattaaccaaacgttgtcacaaattacaaatcaatgctgtaatataatttgcacctggaatggctaacgtgaagcctgaattaaatgtggtttttagtttttaccatcaccaa

SEQ ID NO: 28512 - DNA, 1502 bp, Homo sapiens
  source 1..1502: mol_type = unassigned DNA
ttaggatgaatcaccttgctggccaacagttattggaatgattctccatgtgtgacttcgttgcactattacaaaatgtggcaggatagacctgcccagccattgttgccgatgttcatttgtaatgctgccttaaggagatgaggagatgagagccaattgttccagcagctcagcctgccctgccaacagttcagaggaggagctgccagtgggactggaggtgcatggaaacctggagctcgttttcacagtggtgtccactgtgatgatggggctgctcatgttctctttgggatgttccgtggagatccggaagctgtggtcgcacatcaggagaccctggggcattgctgtgggactgctctgccagtttgggctcatgccttttacagcttatctcctggccattagcttttctctgaagccagtccaagctattgctgttctcatcatgggctgctgcccggggggcaccatctctaacattttcaccttctgggttgatggagatatggatctcagcatcagtatgacaacctgttccaccgtggccgccctgggaatgatgccactctgcatttatctctacacctggtcctggagtcttcagcagaatctcaccattccttatcagaacataggaattacccttgtgtgcctgaccattcctgtggcctttggtgtctatgtgaattacagatggccaaaacaatccaaaatcattctcaagattggggccgttgttggtggggtcctccttctggtggtcgcagttgctggtgtggtcctggcgaaaggatcttggaattcagacatcacccttctgaccatcagtttcatctttcctttgattggccatgtcacgggttttctgctggcactttttacccaccagtcttggcaaaggtgcaggacaatttccttagaaactggagctcagaatattcagatgtgcatcaccatgctccagttatctttcactgctgagcacttggtccagatgttgagtttcccactggcctatggactcttccagctgatagatggatttcttattgttgcagcatatcagacgtacaagaggagattgaagaacaaacatggaaaaaagaactcaggttgcacagaagtctgccatacgaggaaatcgacttcttccagagagaccaatgccttcttggaggtgaatgaagaaggtgccatcactcctgggccaccagggccaatggattgccacagggctctcgagccagttggccacatcacttcatgtgaatagcagggactagctggctggactggcccccttctttttcagtggccagtaaagacagtgtgcagctgacacatgaatcttgttggtagggccagtgtgaatatttaagtgttcaatgttagaatatttatattttcatgtggattgtgaattgtgatgggatcacttttggagattcccatttcagggagtttcttctgggggttaacataacgtatcaatg

SEQ ID NO: 28513 - DNA, 3852 bp, Homo sapiens
  source 1..3852: mol_type = unassigned DNA
acagaacacggggtgcctggaaggggaacagatgtgttgtggggcacagggcaggctgggaggggaacaaaggtccactccatgggtaaccagacccttccgccagggctggccacttctgcctttggaaaatgtttcacaacgccccatgttgtgtgtgtgtgtgaatcggccgatgtgaaccgaatgttgatgtaagaggcagggcactcggctgcggatgggtaacagggcgtgggctggcacacttacttgcaccagtgcccagagagggggtgcaggctgaggagctgcccagagcaccgctcacactcccagagtacctgaagtcggcatttcaatgacaggtgacaagggtccccaaaggctaagcgggtccagctatggttccatctccagcccgaccagcccgaccagcccagggccacagcaagcacctcccagagagacctacctgagtgagaagatccccatcccagacacaaaaccgggcaccttcagcctgcggaagctatgggccttcacggggcctggcttcctcatgagcattgctttcctggacccaggaaacatcgagtcagatcttcaggctggcgccgtggcgggattcaaacttctctgggtgctgctctgggccaccgtgttgggcttgctctgccagcgactggctgcacgtctgggcgtggtgacaggcaaggacttgggcgaggtctgccatctctactaccctaaggtgccccgcaccgtcctctggctgaccatcgagctagccattgtgggctccgacatgcaggaagtcatcggcacggccattgcattcaatctgctctcagctggacgaatcccactctggggtggcgtcctcatcaccatcgtggacaccttcttcttcctcttcctcgataactacgggctgcggaagctggaagctttttttggactccttataaccattatggccttgacctttggctatgagtatgtggtggcgcgtcctgagcagggagcgcttcttcggggcctgttcctgccctcgtgcccgggctgcggccaccccgagctgctgcaggcggtgggcattgttggcgccatcatcatgccccacaacatctacctgcactcggccctggtcaagtctcgagagatagaccgggcccgccgagcagacatcagagaagccaacatgtacttcctgattgaggccaccatcgccctgtccgtctcctttatcatcaacctctttgtcatggctgtctttgggcaggccttctaccagaaaaccaaccaggctgcgttcaacatctgtgccaacagcagcctccacgactacgccaagatcttccccatgaacaacgccaccgtggccgtggacatttaccaggggggcgtgatcctgggctgcctgttcggccccgcggccctctacatctgggccataggtctcctggcggctgggcagagctccaccatgacgggcacctacgcgggacagttcgtgatggagggcttcctgaggctgcggtggtcacgcttcgcccgtgtcctcctcacccgctcctgcgccatcctgcccaccgtgctcgtggctgtcttccgggacctgagggacttgtcgggcctcaatgatctgctcaacgtgctgcagagcctgctgctcccgttcgccgtgctgcccatcctcacgttcaccagcatgcccaccctcatgcaggagtttgccaatggcctgctgaacaaggtcgtcacctcttccatcatggtgctagtctgcgccatcaacctctacttcgtggtcagctatctgcccagcctgccccaccctgcctacttcggccttgcagccttgctggccgcagcctacctgggcctcagcacctacctggtctggacctgttgccttgcccacggagccacctttctggcccacagctcccaccaccacttcctgtatgggctccttgaagaggaccagaaaggggagacctctggctaggcccacaccagggcctggctgggagtggcatgtatgacgtgactggcctgctggatgtggagggggcgcgtgcaggcagcaggatagagtgggacagttcctgagaccagccaacctgggggctttagggacctgctgtttcctagcgcagccatgtgattaccctctgggtctcagtgtcctcatctgtaaaatggagacaccaccacccttgccatggaggttaagcactttaacacagtgtctggcacttgggacaaaaacaaacaaacgaaaaacatttcaaaaggtatttattgagcacctgcaggcgtgacctgacagcccaagggtgggtggggtgagggcttgaggacttgggcgggacacaggctccaaactggagcttgaaatagtgtctgatgaatgttaaattatctatctatctatttatttatttatttgagacagggaaagggtctccctctgttgccaaggctggagtgcagtggcgcaatcttaactcattgcaacctccaccttctgggttcaagcgattctctttattcagccccgggagtggcgcgcgccaccacgcccagctaatttgtgtattttcagcagagacggggtttgccatgctggccaggctggtctcgaactgctggattcaagtgatccgcccatctccgtctcccaaagtgctgggaattacaggcgtgagccaccaaacccggcctgattaaagttaaataaatactagttcccttctcgtccaaaggagcagggaatgggaaccgggaaggcacgaagtctctaaagcatccagaagacccctacaccagggtctggtccgctcctattcgccgcagcctttctgttccgcctgcaacccattttccagacagtaaaacggcggcgcacttctttctccgtcaggcaccaggtcataaggaacccaagagtctgtgcctctgaggcccaaattatttgctgtttcctcaggggagccggcggccgcgactcccacgccgcgccgttaccgctccctctctgctgactgctccccctaggggcagagacggtcccgacgcccgccatcccgccccggcctcacccctccccgccaggcggaacgacgcggggaggcgggcgctcggggctcgcgccaggggccccagaatccttcggggagagtgggtgggaggaagctgtgtgggcggggagccccctctgccttagggagcggctgggcacccattcgccccattcaggggctgcactttatagacgttccctaggctgtttctaggctcccccaagtccctcctccagcctcgtcgggtccctcagaccccagcccaggacctgcggagggccgcagcgaggagaggccaacaggcctttccctagagttgaacctgggccgggtgttgcacctggaagaacccccgatttcctggggacccagcagggcaggcggcctggctccgcgctcaggtccggacgcttgtttatgagaagaatttcctctttcttaaaagggcaacgatgcgagtgggtccctcaaggagagaagagatgggaccggtctggtgcgacctgggcaagcgctgcagagggtacctgggcaagagggccgcccgcctcctctgggtttggcactggagaagatgggtccatgccagctgaaggaggagatggatgggggacgtttagcgaagaaaggcatctcccagatcctttagcctcctggaagtgcccccgttgtaccccctacacacccctcttggcattgagtgccagtcctctgccaggctctgtgttacaagttggggagggcggcaaagtcccgaattaaagatgtcagttctcaagga

SEQ ID NO: 28514 - DNA, 2136 bp, Homo sapiens
  source 1..2136: mol_type = unassigned DNA
gatgggtaacagggcgtgggctggcacacttacttgcaccagtgcccagagagggggtgcaggctgaggagctgcccagagcaccgctcacactcccagagtacctgaagtcggcatttcaatgacaggtgacaagggtccccaaaggctaagcgggtccagctatggttccatctccagcccgaccagcccgaccagcccagggccacagcaagcacctcccagagagacctacctgagtgagaagatccccatcccagacacaaaaccgggcaccttcagcctgcggaagctatgggccttcacggggcctggcttcctcatgagcattgctttcctggacccaggaaacatcgagtcagatcttcaggctggcgccgtggcgggattcaaacttctctgggtgctgctctgggccaccgtgttgggcttgctctgccagcgactggctgcacgtctgggcgtggtgacaggcaaggacttgggcgaggtctgccatctctactaccctaagtcggagtctcgctccgtcgcccagtcaggagtgcaatggtgcgatgtcagctcactgcaacctctacctcccaggtgccccgcaccgtcctctggctgaccatcgagctagccattgtgggctccgacatgcaggaagtcatcggcacggccattgcattcaatctgctctcagctggacgaatcccactctggggtggcgtcctcatcaccatcgtggacaccttcttcttcctcttcctcgataactacgggctgcggaagctggaagctttttttggactccttataaccattatggccttgacctttggctatgagtatgtggtggcgcgtcctgagcagggagcgcttcttcggggcctgttcctgccctcgtgcccgggctgcggccaccccgagctgctgcaggcggtgggcattgttggcgccatcatcatgccccacaacatctacctgcactcggccctggtcaagtctcgagagatagaccgggcccgccgagcagacatcagagaagccaacatgtacttcctgattgaggccaccatcgccctgtccgtctcctttatcatcaacctctttgtcatggctgtctttgggcaggccttctaccagaaaaccaaccaggctgcgttcaacatctgtgccaacagcagcctccacgactacgccaagatcttccccatgaacaacgccaccgtggccgtggacatttaccaggggggcgtgatcctgggctgcctgttcggccccgcggccctctacatctgggccataggtctcctggcggctgggcagagctccaccatgacgggcacctacgcgggacagttcgtgatggagggcttcctgaggctgcggtggtcacgcttcgcccgtgtcctcctcacccgctcctgcgccatcctgcccaccgtgctcgtggctgtcttccgggacctgagggacttgtcgggcctcaatgatctgctcaacgtgctgcagagcctgctgctcccgttcgccgtgctgcccatcctcacgttcaccagcatgcccaccctcatgcaggagtttgccaatggcctgctgaacaaggtcgtcacctcttccatcatggtgctagtctgcgccatcaacctctacttcgtggtcagctatctgcccagcctgccccaccctgcctacttcggccttgcagccttgctggccgcagcctacctgggcctcagcacctacctggtctggacctgttgccttgcccacggagccacctttctggcccacagctcccaccaccacttcctgtatgggctccttgaagaggaccagaaaggggagacctctggctaggcccacaccagggcctggctgggagtggcatgtatgacgtgactggcctgctggatgtggagggggcgcgtgcaggcagcaggatagagtgggacagttcctgagaccagccaacctgggggctttagggacctgctgtttcctagcgcagccatgtgattaccctctgggtctcagtgtcctcatctgtaaaatggagacaccaccacccttgccatggaggttaagcactttaacacagtgtctggcacttgggacaaaaacaaacaaacgaaaaacatttcaaaa

SEQ ID NO: 28515 - DNA, 2043 bp, Homo sapiens
  source 1..2043: mol_type = unassigned DNA
ggctgaggagctgcccagagcaccgctcacactcccagagtacctgaagtcggcatttcaatgacaggtgacaagggtccccaaaggctaagcgggtccagctatggttccatctccagcccgaccagcccgaccagcccagggccacagcaagcacctcccagagagacctacctgagtgagaagatccccatcccagacacaaaaccgggcaccttcagcctgcggaagctatgggccttcacggggcctggcttcctcatgagcattgctttcctggacccaggaaacatcgagtcagatcttcaggctggcgccgtggcgggattcaaacttctctgggtgctgctctgggccaccgtgttgggcttgctctgccagcgactggctgcacgtctgggcgtggtgacaggcaaggacttgggcgaggtctgccatctctactaccctaagtcggagtctcgctccgtcgcccagtcaggagtgcaatggtgcgatgtcagctcactgcaacctctacctcccaggtgccccgcaccgtcctctggctgaccatcgagctagccattgtgggctccgacatgcaggaagtcatcggcacggccattgcattcaatctgctctcagctggacgaatcccactctggggtggcgtcctcatcaccatcgtggacaccttcttcttcctcttcctcgataactacgggctgcggaagctggaagctttttttggactccttataaccattatggccttgacctttggctatgagtatgtggtggcgcgtcctgagcagggagcgcttcttcggggcctgttcctgccctcgtgcccgggctgcggccaccccgagctgctgcaggcggtgggcattgttggcgccatcatcatgccccacaacatctacctgcactcggccctggtcaagtctcgagagatagaccgggcccgccgagcagacatcagagaagccaacatgtacttcctgattgaggccaccatcgccctgtccgtctcctttatcatcaacctctttgtcatggctgtctttgggcaggccttctaccagaaaaccaaccaggctgcgttcaacatctgtgccaacagcagcctccacgactacgccaagatcttccccatgaacaacgccaccgtggccgtggacatttaccaggggggcgtgatcctgggctgcctgttcggccccgcggccctctacatctgggccataggtctcctggcggctgggcagagctccaccatgacgggcacctacgcgggacagttcgtgatggagggcttcctgaggctgcggtggtcacgcttcgcccgtgtcctcctcacccgctcctgcgccatcctgcccaccgtgctcgtggctgtcttccgggacctgagggacttgtcgggcctcaatgatctgctcaacgtgctgcagagcctgctgctcccgttcgccgtgctgcccatcctcacgttcaccagcatgcccaccctcatgcaggagtttgccaatggcctgctgaacaaggtcgtcacctcttccatcatggtgctagtctgcgccatcaacctctacttcgtggtcagctatctgcccagcctgccccaccctgcctacttcggccttgcagccttgctggccgcagcctacctgggcctcagcacctacctggtctggacctgttgccttgcccacggagccacctttctggcccacagctcccaccaccacttcctgtatgggctccttgaagaggaccagaaaggggagacctctggctaggcccacaccagggcctggctgggagtggcatgtatgacgtgactggcctgctggatgtggagggggcgcgtgcaggcagcaggatagagtgggacagttcctgagaccagccaacctgggggctttagggacctgctgtttcctagcgcagccatgtgattaccctctgggtctcagtgtcctcatctgtaaaatggagacaccaccacccttgccatggaggttaagcactttaacacagtgtctggcacttggg

SEQ ID NO: 28516 - DNA, 5989 bp, Homo sapiens
  source 1..5989: mol_type = unassigned DNA
gagacagagctacagcgaacgagagagcggcgaaggcgggtagaggggcgcgggcgaggcggcgcagccatccccggaccaggggccgcgccgccaccatgctaaacaacctgacggactgcgaggacggcgatgggggagccaacccgggtgatggcaaccccaaggaaagcagtcccttcatcaacagcaccgacacagagaagggaaaggagtatgatggcaagaacatggccttgtttgaggaggagatggacaccagccctatggtgtcctccttgctcagtggcctggccaactacaccaacctgccccagggaagtagggagcatgaagaggcagaaaacaatgagggtggaaaaaagaagccggtgcaggccccacgcatgggcaccttcatgggcgtgtacctgccgtgcctgcagaacatctttggcgtcatcctcttcctgcggctcacctgggtggtgggcattgcaggcatcatggagtccttctgcatggtgttcatctgctgctcctgtacgatgctcacggccatctccatgagtgcaattgcaacgaatggtgttgtgcctgctggtggctcctactacatgatttccaggtctctgggcccagagtttgggggtgccgtgggcctctgcttctacctgggcactacctttgcaggagccatgtacatcctgggcaccatcgaaatcctgctggcttacctcttcccagccatggccatcttcaaggcagaagatgccagtggggaggcagcagccatgctgaacaacatgcgtgtttacggcacctgtgtgctcacctgcatggccactgtggtgtttgtgggtgtcaagtatgtcaacaagtttgcccttgtcttcctgggttgtgtcatcctctccatcctggccatctatgctggggtcatcaagtctgccttcgacccacccaacttcccgatctgcctcctgggtaaccgcacgctgtctcgccatggctttgatgtctgtgccaagctggcttgggaaggaaatgagacggtgaccacacggctatggggccttttctgctcctctcgcttcctcaacgccacctgtgatgaatacttcacccgaaacaatgtcacagagatccagggcatccctggtgctgccagtggcctcatcaaagagaacctctggagctcctacctgaccaagggcgtgattgtggagaggagtgggatgacctcggtgggcctggccgatggcactcctatcgacatggaccacccttatgtcttcagtgatatgacctcctacttcaccctgctggttggcatctacttcccctcagtcacagggatcatggctggttctaaccgctctggggacctgagggatgcccagaagtcaatccccactggcaccatcctggccatcgccaccacctctgctgtctacatcagctccgttgttctgtttggggcctgcattgagggggtcgtcctgcgggacaagtttggcgaagctgtgaatggcaacctcgtggtgggcactctggcctggccatctccatgggtaattgtcatcggatccttcttctccacctgtggggctgggctgcagagcctcacgggggccccacgcctgctgcaggccatctcgagggatggcattgtgcccttcctgcaggtctttggccatggcaaggccaatggagagccgacctgggccctgctcctgactgcctgcatctgcgagattggcatcctcattgcatccctcgacgaggtggcccccatcctctctatgttcttcctgatgtgctacatgtttgtgaatctggcctgtgcagtgcagacgctgctgaggacacccaactggaggccacgctttcgatattaccactggaccctctccttcctgggcatgagcctctgcctggccctcatgttcatctgctcctggtattatgcactggtagccatgctcattgctggactcatctacaagtacattgagtaccgtggggcagagaaggagtggggcgatgggatacgaggtctgtctctcagtgcggctcgctatgccctcttacgcctggaggaagggcccccacacaccaagaactggaggccacagctgctggtgctggtgcgtgtggaccaagaccagaatgtggtgcacccccagctgctctcactgacctcccagctgaaggcggggaagggcctgaccatcgtgggctctgtccttgagggcacctttctggaaaatcatccacaggcccagcgggcagaagagtctatcaggcgcctgatggaggcagagaaggtgaagggcttctgccaggtggtgatctcctccaacttgcgtgatggcgtgtcccatctgatccagtccgggggcctcggggggctgcagcacaacactgtgcttgttggctggccccgcaactggcgccagaaggaagatcatcagacgtggaggaacttcattgagctggtccgggaaaccacagctggccacttagccctgctggtcaccaagaacgtttccatgtttcctgggaaccctgagcgcttctctgagggcagcatcgacgtttggtggattgtgcacgatggaggcatgctcatgctgctgcccttcctgctgcggcaccacaaggtctggcggaagtgcaagatgcgtatcttcactgtggcccagatggatgacaatagcatccagatgaagaaggatctgaccacatttctgtatcatttacgcatcactgcggaggtcgaggtggtggagatgcatgagagcgacatctcagcttacacctatgagaagacgttggtgatggagcagcgttcccagatcctcaaacagatgcatttaaccaagaatgagcgggagcgggagatccagagtatcacagatgagtcacgaggctcaatccggagaaagaatccagccaacacgcggctccgcctgaacgtcccagaagagacggctggtgacagtgaagagaagccagaggaggaggtgcagctgatccacgatcagagtgctcccagctgccccagcagctccccgtccccaggggaggagcctgagggggaaggggagacagatccggagaaggtgcatctcacctggaccaaggacaagtcggtggcagagaagaataagggccccagtcctgtctcctctgagggcatcaaggacttcttcagcatgaagccggagtgggagaacttgaaccagtccaacgtgcggcgcatgcacacggccgtgcggctgaacgaggtcatcgtgaagaaatcccgggacgccaagcttgttttgctcaacatgcctgggcctccccgcaaccgcaatggtgatgaaaactacatggagtttctcgaggtcctcacagagcacctggaccgggtgatgctggtccgcggcggcggccgcgaggtcatcaccatctactcctgagaaccaggacctgccacccgggcccgagcgcgcccggcccgcggctccggagccctcgccgcgccccccgccgctgtcaccgtttacatacagaccctgtgcccgtgtcctggccccttaccccgctgcctgaagcccggaggccacgcctgttggggctgattcggagagggcgccccgccgcgcagagaccagagctcctcagtgccagtttggcccctgggtcttcgctgccctttttctaagcccggcctcgtctcgccggaggagacgctgcaataaaggttgggagaaggcgcggaaaggagaggagctggggccttggggacccccaggtagtccatgcggcccattcctccccttcccactcccgccgcggtcctcgctctgcgctcctccggcgctgctccctggctcccggcggcccggaggcccgcggggtgggaaggccgcgcttgccgtctccgccgccccttctcgccgagccgtggggcgcgggcggccgagcctatacatagtgtacaggagacatcgcgtgtatttttaacgtccccatatttatgtgactagaagcgcaacagacttctcgccatagtcgagctctcccgctgggggcactgcggggaggcgaggcctcgggaagctgaattttccttgacgtccaagagtttgagagcgaaagtgctttaggcccaggcgggggtcgtggcctcgttccctcgacacctccgtcctgctctcgcctcttcgccctttccgcgcgcccttggcttcccaccctcctctccagtccttttccgagatgaggtgagacaagggtccaacttttcctggattcgcctcccagcggacgtgagcttccactgcggctgcagagacgcgagcaacctcttctcatcggctcttatgcaagttggggccaggataggggaggggtgctcctcaagaggaagaaaccgagaggcccgcgccccaccgaggaagccccgccccggtgccttcgctggggagcaggcgtctctcctcagtcggcttgtcgcctgctccccgtatcccatggctcctcgccaaagactgaaattgtggagctggagggcgccccctccccggagtttcctccctgggacaagtgagggaggagggggccgattctggtttaggggccggacccactgagaggccccagagccgcccgtgatgttcctcccccgtccccatctggcagctcctgtctcgcctgagggacccagccgccttctccgtgctctggggccgggcctcgctgcttagcagcggcctctagctccgtctcccggggacctgggcctgagggagggctggagtcgcacgcgctttgtccttagcgcctgtctgctctcctctaactaggacccagggcctttggcttccccagctcatccttggcccttccgctccaccagcctggtctgaggcgtgctctgtccttagagaaggcgcggtggccgggttcccttcccctagggcacattactaagggggtcaggcactgcatgctcgttccagcaccatctgggactgggtacagtacctccagccccagggccctgacctgcgcacctagcttgacatctcacgcacctcccagagctggcgccactgagtaatccggacctcaccacctcttttcctttgagcccaaggcagagctggagctggcgccacccagacagcgtcaggtgtggctggggtaggtttggaggtctgccagttacaccaagtcccctctgagattcgatcaggggactggatagattctttcaggtactcaatcaggaagctggaggtgttagacaccagccccctgcatccttcagtagacctccctctgaacaccacagccaggtcctgccttctgggggcctgaatattccagagctgatgtgatgggctgtgcagaagggggctgtatcaacatcaattagggaaccaaagttgcactatctgggcccagattgtctggttggcaagagcaaagtttccgttgatgaaacagacatcccacaacaaaaacccaagttttctgtgctacatgtgcaatatttgttatgaatgttatcacaagtcattcatcaagttatctttataatcactgtagttagatgtttcatgtccattcaagtgacttttattctgagtgcaatatttcaatagccttgtagtgataactagtgttgcttttgttttagatgatctatgtgcagggcaatgcaatgaagttgaaaacccttgtaaataggagaggttgcaaaccaaatcaagagtatttattactattactgctattattattaggcctgcctttaattttcagtgtaagtgttcagtatgccgcatcctgcctcagtattgatcttgtgttctttgtgccaatatgaaaaggagagggttggttctttcctttattgttgaatgctcccatttaatgctttatggcttttactgtgttacttttttagactcccgtctgcacaaaatgcaataaaaataattttattata

SEQ ID NO: 28517 - DNA, 1549 bp, Homo sapiens
  source 1..1549: mol_type = unassigned DNA
gtgcgccgggcgggcgggcactgcagcttcttcctccgtggagcggagagcgagacagagctacagcgaacgagagagcggcgaaggcgggtagaggggcgcgggcgaggcggcgcagccatccccggaccaggggccgcgccgccaccatgctaaacaacctgacggactgcgaggacggcgatgggggagccaacccgggtgatggcaaccccaaggaaagcagtcccttcatcaacagcaccgacacagagaagggaaaggagtatgatggcaagaacatggccttgtttgaggaggagatggacaccagccctatggtgtcctccttgctcagtggcctggccaactacaccaacctgccccagggaagtagggagcatgaagaggcagaaaacaatgagggtggaaaaaagaagccggtgcaggccccacgcatgggcaccttcatgggcgtgtacctgccgtgcctgcagaacatctttggcgtcatcctcttcctgcggctcacctgggtggtgggcattgcaggcatcatggagtccttctgcatggtgttcatctgctgctcctgtacgatgctcacggccatctccatgagtgcaattgcaacgaatggtgttgtgcctgctggtggctcctactacatgatttccaggtctctgggcccagagtttgggggtgccgtgggcctctgcttctacctgggcactacctttgcaggagccatgtacatcctgggcaccatcgaaatcctgctggcttacctcttcccagccatggccatcttcaaggcagaagatgccagtggggaggcagcagccatgctgaacaacatgcgtgtttacggcacctgtgtgctcacctgcatggccactgtggtgtttgtgggtgtcaagtatgtcaacaagtttgcccttgtcttcctgggttgtgtcatcctctccatcctggccatctatgctggggtcatcaagtctgccttcgacccacccaacttcccgtgagtgctgctgctctgagcccaaggaatcgtcctcctacctccctggccctgtttcagagtctctgccaaactccccctccctgcccctcagaatctcagagtggtgtgggttgggagtagcttcccttgggagggaaaatctctcttagtttgggggcaatctcttcagagtgaggtaacttttctggaggagggaacaatttaccttgtaagagtcaacttcttgctggtagggtggacttaggaagaattaagtgggaatgagttccaaagcaatgaatgctgtctgtggtagggaaacctttcctgggtggggacaacctcctggaatgggacaatctcctagtgttggacaactcctccaggatgggaaaagacacagaagtctacagggtccagggactcagatccaagtccactccatccactgctcagaggtggagggcggcccccgagaccgctgtccacggtgctgaaacacagcattgcactaatgcggtgcttctccaccttggctgcttattagaatcacttggggagctt

SEQ ID NO: 28518 - DNA, 6041 bp, Homo sapiens
  source 1..6041: mol_type = unassigned DNA
ctccctcctagagcctggttgcagccacttgtgcgatcccggaccttgccgcggccgcctggctcctttccgcgccatgagccgcaggttcacggtcacctcgctgccccccgcagggcccgccagaagccctgacccagagtcccgccggcattcggtcgcagacccccgccacctcccgggggaagacgtcaaaggtgatggcaaccccaaggaaagcagtcccttcatcaacagcaccgacacagagaagggaaaggagtatgatggcaagaacatggccttgtttgaggaggagatggacaccagccctatggtgtcctccttgctcagtggcctggccaactacaccaacctgccccagggaagtagggagcatgaagaggcagaaaacaatgagggtggaaaaaagaagccggtgcaggccccacgcatgggcaccttcatgggcgtgtacctgccgtgcctgcagaacatctttggcgtcatcctcttcctgcggctcacctgggtggtgggcattgcaggcatcatggagtccttctgcatggtgttcatctgctgctcctgtacgatgctcacggccatctccatgagtgcaattgcaacgaatggtgttgtgcctgctggtggctcctactacatgatttccaggtctctgggcccagagtttgggggtgccgtgggcctctgcttctacctgggcactacctttgcaggagccatgtacatcctgggcaccatcgaaatcctgctggcttacctcttcccagccatggccatcttcaaggcagaagatgccagtggggaggcagcagccatgctgaacaacatgcgtgtttacggcacctgtgtgctcacctgcatggccactgtggtgtttgtgggtgtcaagtatgtcaacaagtttgcccttgtcttcctgggttgtgtcatcctctccatcctggccatctatgctggggtcatcaagtctgccttcgacccacccaacttcccgatctgcctcctgggtaaccgcacgctgtctcgccatggctttgatgtctgtgccaagctggcttgggaaggaaatgagacggtgaccacacggctatggggccttttctgctcctctcgcttcctcaacgccacctgtgatgaatacttcacccgaaacaatgtcacagagatccagggcatccctggtgctgccagtggcctcatcaaagagaacctctggagctcctacctgaccaagggcgtgattgtggagaggagtgggatgacctcggtgggcctggccgatggcactcctatcgacatggaccacccttatgtcttcagtgatatgacctcctacttcaccctgctggttggcatctacttcccctcagtcacagggatcatggctggttctaaccgctctggggacctgagggatgcccagaagtcaatccccactggcaccatcctggccatcgccaccacctctgctgtctacatcagctccgttgttctgtttggggcctgcattgagggggtcgtcctgcgggacaagtttggcgaagctgtgaatggcaacctcgtggtgggcactctggcctggccatctccatgggtaattgtcatcggatccttcttctccacctgtggggctgggctgcagagcctcacgggggccccacgcctgctgcaggccatctcgagggatggcattgtgcccttcctgcaggtctttggccatggcaaggccaatggagagccgacctgggccctgctcctgactgcctgcatctgcgagattggcatcctcattgcatccctcgacgaggtggcccccatcctctctatgttcttcctgatgtgctacatgtttgtgaatctggcctgtgcagtgcagacgctgctgaggacacccaactggaggccacgctttcgatattaccactggaccctctccttcctgggcatgagcctctgcctggccctcatgttcatctgctcctggtattatgcactggtagccatgctcattgctggactcatctacaagtacattgagtaccgtggggcagagaaggagtggggcgatgggatacgaggtctgtctctcagtgcggctcgctatgccctcttacgcctggaggaagggcccccacacaccaagaactggaggccacagctgctggtgctggtgcgtgtggaccaagaccagaatgtggtgcacccccagctgctctcactgacctcccagctgaaggcggggaagggcctgaccatcgtgggctctgtccttgagggcacctttctggaaaatcatccacaggcccagcgggcagaagagtctatcaggcgcctgatggaggcagagaaggtgaagggcttctgccaggtggtgatctcctccaacttgcgtgatggcgtgtcccatctgatccagtccgggggcctcggggggctgcagcacaacactgtgcttgttggctggccccgcaactggcgccagaaggaagatcatcagacgtggaggaacttcattgagctggtccgggaaaccacagctggccacttagccctgctggtcaccaagaacgtttccatgtttcctgggaaccctgagcgcttctctgagggcagcatcgacgtttggtggattgtgcacgatggaggcatgctcatgctgctgcccttcctgctgcggcaccacaaggtctggcggaagtgcaagatgcgtatcttcactgtggcccagatggatgacaatagcatccagatgaagaaggatctgaccacatttctgtatcatttacgcatcactgcggaggtcgaggtggtggagatgcatgagagcgacatctcagcttacacctatgagaagacgttggtgatggagcagcgttcccagatcctcaaacagatgcatttaaccaagaatgagcgggagcgggagatccagagtatcacagatgagtcacgaggctcaatccggagaaagaatccagccaacacgcggctccgcctgaacgtcccagaagagacggctggtgacagtgaagagaagccagaggaggaggtgcagctgatccacgatcagagtgctcccagctgccccagcagctccccgtccccaggggaggagcctgagggggaaggggagacagatccggagaaggtgcatctcacctggaccaaggacaagtcggtggcagagaagaataagggccccagtcctgtctcctctgagggcatcaaggacttcttcagcatgaagccggagtgggagaacttgaaccagtccaacgtgcggcgcatgcacacggccgtgcggctgaacgaggtcatcgtgaagaaatcccgggacgccaagcttgttttgctcaacatgcctgggcctccccgcaaccgcaatggtgatgaaaactacatggagtttctcgaggtcctcacagagcacctggaccgggtgatgctggtccgcggcggcggccgcgaggtcatcaccatctactcctgagaaccaggacctgccacccgggcccgagcgcgcccggcccgcggctccggagccctcgccgcgccccccgccgctgtcaccgtttacatacagaccctgtgcccgtgtcctggccccttaccccgctgcctgaagcccggaggccacgcctgttggggctgattcggagagggcgccccgccgcgcagagaccagagctcctcagtgccagtttggcccctgggtcttcgctgccctttttctaagcccggcctcgtctcgccggaggagacgctgcaataaaggttgggagaaggcgcggaaaggagaggagctggggccttggggacccccaggtagtccatgcggcccattcctccccttcccactcccgccgcggtcctcgctctgcgctcctccggcgctgctccctggctcccggcggcccggaggcccgcggggtgggaaggccgcgcttgccgtctccgccgccccttctcgccgagccgtggggcgcgggcggccgagcctatacatagtgtacaggagacatcgcgtgtatttttaacgtccccatatttatgtgactagaagcgcaacagacttctcgccatagtcgagctctcccgctgggggcactgcggggaggcgaggcctcgggaagctgaattttccttgacgtccaagagtttgagagcgaaagtgctttaggcccaggcgggggtcgtggcctcgttccctcgacacctccgtcctgctctcgcctcttcgccctttccgcgcgcccttggcttcccaccctcctctccagtccttttccgagatgaggtgagacaagggtccaacttttcctggattcgcctcccagcggacgtgagcttccactgcggctgcagagacgcgagcaacctcttctcatcggctcttatgcaagttggggccaggataggggaggggtgctcctcaagaggaagaaaccgagaggcccgcgccccaccgaggaagccccgccccggtgccttcgctggggagcaggcgtctctcctcagtcggcttgtcgcctgctccccgtatcccatggctcctcgccaaagactgaaattgtggagctggagggcgccccctccccggagtttcctccctgggacaagtgagggaggagggggccgattctggtttaggggccggacccactgagaggccccagagccgcccgtgatgttcctcccccgtccccatctggcagctcctgtctcgcctgagggacccagccgccttctccgtgctctggggccgggcctcgctgcttagcagcggcctctagctccgtctcccggggacctgggcctgagggagggctggagtcgcacgcgctttgtccttagcgcctgtctgctctcctctaactaggacccagggcctttggcttccccagctcatccttggcccttccgctccaccagcctggtctgaggcgtgctctgtccttagagaaggcgcggtggccgggttcccttcccctagggcacattactaagggggtcaggcactgcatgctcgttccagcaccatctgggactgggtacagtacctccagccccagggccctgacctgcgcacctagcttgacatctcacgcacctcccagagctggcgccactgagtaatccggacctcaccacctcttttcctttgagcccaaggcagagctggagctggcgccacccagacagcgtcaggtgtggctggggtaggtttggaggtctgccagttacaccaagtcccctctgagattcgatcaggggactggatagattctttcaggtactcaatcaggaagctggaggtgttagacaccagccccctgcatccttcagtagacctccctctgaacaccacagccaggtcctgccttctgggggcctgaatattccagagctgatgtgatgggctgtgcagaagggggctgtatcaacatcaattagggaaccaaagttgcactatctgggcccagattgtctggttggcaagagcaaagtttccgttgatgaaacagacatcccacaacaaaaacccaagttttctgtgctacatgtgcaatatttgttatgaatgttatcacaagtcattcatcaagttatctttataatcactgtagttagatgtttcatgtccattcaagtgacttttattctgagtgcaatatttcaatagccttgtagtgataactagtgttgcttttgttttagatgatctatgtgcagggcaatgcaatgaagttgaaaacccttgtaaataggagaggttgcaaaccaaatcaagagtatttattactattactgctattattattaggcctgcctttaattttcagtgtaagtgttcagtatgccgcatcctgcctcagtattgatcttgtgttctttgtgccaatatgaaaaggagagggttggttctttcctttattgttgaatgctcccatttaatgctttatggcttttactgtgttacttttttagactcccgtctgcacaaaatgcaataaaaataattttattataccctt

SEQ ID NO: 28519 - DNA, 1105 bp, Homo sapiens
  source 1..1105: mol_type = unassigned DNA
tcttcctccgtggagcggagagcgagacagagctacagcgaacgagagagcggcgaaggcgggtagaggggcgcgggcgaggcggcgcagccatccccggaccaggggccgcgccgccaccatgctaaacaacctgacggactgcgaggacggcgatgggggagccaacccgggtgatggcaaccccaaggaaagcagtcccttcatcaacagcaccgacacagagaagggaaaggagtatgatggcaagaacatggccttgtttgaggaggagatggacaccagccctatggtgtcctccttgctcagtggcctggccaactacaccaacctgccccagggaagtagggagcatgaagaggcagaaaacaatgagggtggaaaaaagaagccggtgcaggccccacgcatgggcaccttcatgggcgtgtacctgccgtgcctgcagaacatctttggcgtcatcctcttcctgcggctcacctgggtggtgggcattgcaggcatcatggagtccttctgcatggtgttcatctgctgctcctgtacgatgctcacggccatctccatgagtgcaattgcaacgaatggtgttgtgcctgctggtggctcctactacatgatttccaggtctttggccatggcaaggccaatggagagccgacctgggccctgctcctgactgcctgcatctgcgagattggcatcctcattgcatccctcgacgaggtggcccccatcctctctatgttcttcctgatgtgctacatgtttgtgaatctggcctgtgcagtgcagacgctgctgaggacacccaactggaggccacgctttcgatattaccactggaccctctccttcctgggcatgagcctctgcctggccctcatgttcatctgctcctggtattatgcactggtagccatgctcattgctggactcatctacaagtacattgagtaccgtggggcagagaaggagtggggcgatgggatacgaggtctgtctctcagtgcggctcgctatgccctcttacgcctggaggaagggcccccacacaccaagaactggaggccacagctgctggtgctggtgcgtgtggacc

SEQ ID NO: 28520 - DNA, 3869 bp, Homo sapiens
  source 1..3869: mol_type = unassigned DNA
gcgagcgggcggggcgtgtcggcccggggcggcggggacagcggcggggacagcggcgggcggctgggacggcgggtgcggcggggccgagcccgcacgatgcctcacttcaccgtggtgccagtggacgggccgaggcgcggcgactatgacaacctcgaggggctcagttgggtggactacggggagcgcgccgagctggatgactcggacggacatggcaaccacagagagagcagcccttttctttcccccttggaggcttccagaggaattgactactatgacaggaacctggcactgtttgaggaagagctggacatccgcccaaaggtatcgtctcttctgggaaagctcgtcagctacaccaacctcacccagggcgccaaagagcatgaggaggccgagagtggggagggcacccgccggagggcagccgaggcacccagcatgggcaccctcatgggggtgtacctgccctgcctgcagaatatctttggggttatcctcttcctgcggctgacctggatggtgggcacagcaggtgtgctacaggccctcctcatcgtgcttatctgctgctgttgtaccctgctgacggccatctccatgagtgccatcgccaccaacggtgtggttccagctgggggctcctatttcatgatctctcgttcactggggccagaatttggaggtgctgtgggcctgtgcttctacctgggaacaacattcgcagcagccatgtacatcctgggggccatcgagatcttgctgacctacattgccccaccagctgccattttttacccatcgggtgctcatgacacgtcgaatgccactttgaacaatatgcgtgtgtatgggaccattttcctgaccttcatgaccctggtggtgtttgtgggggtcaagtatgtgaacaaatttgcctcgctcttcctggcctgtgtgatcatctccatcctctccatctatgctgggggcataaagtctatatttgaccctcccgtgtttccggtatgcatgctgggcaacaggaccctgtcccgggaccagtttgacatctgtgccaagacagctgtagtggacaatgagacagtggccacccagctatggagtttcttctgccacagccccaaccttacgaccgactcctgtgacccctacttcatgctcaacaatgtgaccgagatccctggcatccccggggcagctgctggtgtgctccaggaaaacctgtggagcgcctacctggagaagggtgacatcgtggagaagcatgggctgccctccgcagatgccccgagcctgaaggagagcctgcctctgtacgtggtcgctgacatcgccacatccttcaccgtgctggtcggcatcttcttcccttctgtaacaggcatcatggctggctcaaaccgctctggggaccttcgtgacgcccagaagtctatccctgtggggaccattctggccatcattacaacttccctcgtgtacttcagcagtgtggttctctttggtgcctgcattgagggtgtggttctccgggacaagtatggcgatggtgtcagcaggaacttggtggtgggcacactggcctggccttcaccctgggtcatcgtcatcggctccttcttttcaacgtgtggcgctggcctccagagcctcacaggggcaccacgcctattgcaggccattgccaaggacaacatcatccccttcctccgggtgtttggccacgggaaggtgaatggtgaacccacatgggcactcctcctgacggcactcatcgccgagctgggcatcctcatcgcctccctcgacatggtggcccccatcttatccatgttctttctgatgtgctacctgttcgtgaacctcgcctgtgcggtgcagacactcctgaggacccccaactggcggccccggttcaagtactatcactgggcgctgtccttcctgggcatgagtctctgcctggcccttatgtttgtctcctcctggtactatgccctggtggccatgctcatcgccggcatgatctacaaatacatcgagtaccaaggggctgagaaggagtggggtgacgggatccgaggcctgtccctgagcgctgcccgctacgcgctgttgcggctggaggaggggcctcctcacaccaagaactggcggccgcagctgctggtgctgctgaagctggacgaggacctccacgtgaagtacccgcggctcctcaccttcgcctcccagctcaaggctggcaagggcctgaccattgttggttctgtcatccaggggagcttcttggagagctatggcgaggctcaggccgccgagcagaccatcaagaacatgatggaaattgagaaggtgaagggcttctgccaggtggtggtggccagcaaggtgcgggaggggctggcccacctcatccagtcctgtggcctgggaggcatgcggcataactccgtggtgctgggctggccctacggctggcgacagagcgaggacccccgtgcctggaagaccttcattgacaccgtgcgctgcactacggctgcccacctggccctgctcgtgcccaagaacatcgccttctaccccagcaaccacgagcgctacctggagggccacatagacgtgtggtggatcgtgcacgatggtggcatgctcatgcttctgcccttcctgctgcgccagcataaggtctggaggaagtgccggatgcgcatcttcacagtggcccagatggatgacaacagcatccagatgaagaaggacctggctgtctttctgtaccatctgcgccttgaggccgaggtggaggtggtggagatgcataacagtgacatctctgcatacacctacgagcggacgctgatgatggagcagcggtcgcagatgctgcggcagatgagactgaccaagactgagcgggagcgagaagcccagctggtcaaggatcggcactcggccctgcggctggagagcctgtactcggacgaggaagatgagtctgcagtgggggctgacaagatccagatgacgtggaccagggacaagtacatgactgagacctgggaccccagccatgcccctgacaatttccgggagctggtgcacattaagccggaccaatccaatgtgcggcgcatgcacactgctgtgaagctcaatgaagtcattgtcacgcgctcccacgacgcccgcctggttctcctaaacatgcctggcccacccaggaacagtgagggcgacgagaactacatggagttcctcgaggtgctgaccgagggccttgagcgggtgctgttggtgcgcggtggtggccgtgaagtcatcaccatctactcctgagcccagtgtcatcttgtggcctggagtcgaggtcttggccaggacataacaagctgtggtctggggtaacagcctcttcccagcacccacctgccagccctgcttgcctggccctgtcctggacccagctttgctaggtctccttggaaaccaggcctgggcctcaaaatggagatggatcccaggtcttgtgggaccctgggatgtttggggactttactatctagcaccccagtaggcctgtcctggccagagaagactggtaggggccgagtggggtttgaaggcagccggcccggcccagcccaggagcgctatttattgcatatttattgtttggatgtcaccatcagagacgaagggaagggtagccagggagggagtccagcccagctgcctgcaggaagatctggctcagtctactatgggcagggccccccaccaagctgagccgaatggagacagctgagctgaggcctgactttttcaataaaacattgtgtagttctggg

SEQ ID NO: 28521 - DNA, 3644 bp, Homo sapiens
  source 1..3644: mol_type = unassigned DNA
ggcggggacagcggcggggacagcggcgggcggctgggacggcgggtgcggcggggccgagcccgcacgatgcctcacttcaccgtggtgccagtggacgggccgaggcgcggcgactatgacaacctcgaggggctcagttgggtggactacggggagcgcgccgagctggatgactcggacggacatggcaaccacagagagagcagcccttttctttcccccttggaggcttccagaggaattgactactatgacaggaacctggcactgtttgaggaagagctggacatccgcccaaaggtatcgtctcttctgggaaagctcgtcagctacaccaacctcacccagggcgccaaagagcatgaggaggccgagagtggggagggcacccgccggagggcagccgaggcacccagcatgggcaccctcatgggggtgtacctgccctgcctgcagaatatctttggggttatcctcttcctgcggctgacctggatggtgggcacagcaggtgtgctacaggccctcctcatcgtgcttatctgctgctgttgtaccctgctgacggccatctccatgagtgccatcgccaccaacggtgtggttccagctgggggctcctatttcatgatctctcgttcactggggccagaatttggaggtgctgtgggcctgtgcttctacctgggaacaacattcgcagcagccatgtacatcctgggggccatcgagatcttgctgacctacattgccccaccagctgccattttttacccatcgggtgctcatgacacgtcgaatgccactttgaacaatatgcgtgtgtatgggaccattttcctgaccttcatgaccctggtggtgtttgtgggggtcaagtatgtgaacaaatttgcctcgctcttcctggcctgtgtgatcatctccatcctctccatctatgctgggggcataaagtctatatttgaccctcccgtgtttccggtatgcatgctgggcaacaggaccctgtcccgggaccagtttgacatctgtgccaagacagctgtagtggacaatgagacagtggccacccagctatggagtttcttctgccacagccccaaccttacgaccgactcctgtgacccctacttcatgctcaacaatgtgaccgagatccctggcatccccggggcagctgctggtgtgctccaggaaaacctgtggagcgcctacctggagaagggtgacatcgtggagaagcatgggctgccctccgcagatgccccgagcctgaaggagagcctgcctctgtacgtggtcgctgacatcgccacatccttcaccgtgctggtcggcatcttcttcccttctgtaacaggcatcatggctggctcaaaccgctctggggaccttcgtgacgcccagaagtctatccctgtggggaccattctggccatcattacaacttccctcgtgtacttcagcagtgtggttctctttggtgcctgcattgagggtgtggttctccgggacaagtatggcgatggtgtcagcaggaacttggtggtgggcacactggcctggccttcaccctgggtcatcgtcatcggctccttcttttcaacgtgtggcgctggcctccagagcctcacaggggcaccacgcctattgcaggccattgccaaggacaacatcatccccttcctccgggtgtttggccacgggaaggtgaatggtgaacccacatgggcactcctcctgacggcactcatcgccgagctgggcatcctcatcgcctccctcgacatggtggcccccatcttatccatgttctttctgatgtgctacctgttcgtgaacctcgcctgtgcggtgcagacactcctgaggacccccaactggcggccccggttcaagtactatcactgggcgctgtccttcctgggcatgagtctctgcctggcccttatgtttgtctcctcctggtactatgccctggtggccatgctcatcgccggcatgatctacaaatacatcgagtaccaaggggctgagaaggagtggggtgacgggatccgaggcctgtccctgagcgctgcccgctacgcgctgttgcggctggaggaggggcctcctcacaccaagaactggcggccgcagctgctggtgctgctgaagctggacgaggacctccacgtgaagtacccgcggctcctcaccttcgcctcccagctcaaggctggcaagggcctgaccattgttggttctgtcatccaggggagcttcttggagagctatggcgaggctcaggccgccgagcagacaccgtgcgctgcactacggctgcccacctggccctgctcgtgcccaagaacatcgccttctaccccagcaaccacgagcgctacctggagggccacatagacgtgtggtggatcgtgcacgatggtggcatgctcatgcttctgcccttcctgctgcgccagcataaggtctggaggaagtgccggatgcgcatcttcacagtggcccagatggatgacaacagcatccagatgaagaaggacctggctgtctttctgtaccatctgcgccttgaggccgaggtggaggtggtggagatgcataacagtgacatctctgcatacacctacgagcggacgctgatgatggagcagcggtcgcagatgctgcggcagatgagactgaccaagactgagcgggagcgagaagcccagctggtcaaggatcggcactcggccctgcggctggagagcctgtactcggacgaggaagatgagtctgcagtgggggctgacaagatccagatgacgtggaccagggacaagtacatgactgagacctgggaccccagccatgcccctgacaatttccgggagctggtgcacattaagccggaccaatccaatgtgcggcgcatgcacactgctgtgaagctcaatgaagtcattgtcacgcgctcccacgacgcccgcctggttctcctaaacatgcctggcccacccaggaacagtgagggcgacgagaactacatggagttcctcgaggtgctgaccgagggccttgagcgggtgctgttggtgcgcggtggtggccgtgaagtcatcaccatctactcctgagcccagtgtcatcttgtggcctggagtcgaggtcttggccaggacataacaagctgtggtctggggtaacagcctcttcccagcacccacctgccagccctgcttgcctggccctgtcctggacccagctttgctaggtctccttggaaaccaggcctgggcctcaaaatggagatggatcccaggtcttgtgggaccctgggatgtttggggactttactatctagcaccccagtaggcctgtcctggccagagaagactggtaggggccgagtggggtttgaaggcagccggcccggcccagcccaggagcgctatttattgcatatttattgtttggatgtcaccatcagagacgaagggaagggtagccagggagggagtccagcccagctgcctgcaggaagatctggctcagtctactatgggcagggccccccaccaagctgagccgaatggagacagctgagctgaggcctgactttttcaataaaacattgtgtagttctgggc

SEQ ID NO: 28522 - DNA, 4670 bp, Homo sapiens
  source 1..4670: mol_type = unassigned DNA
cccggggggcgggcggaggaagtgagcgcagcggggaggaatgcgagcgggcggggcgtgtcggcccggggcggcggggacagcggcggggacagcggcgggcggctgggacggcgggtgcggcggggccgagcccgcacgatgcctcacttcaccgtggtgccagtggacgggccgaggcgcggcgactatgacaacctcgaggggctcagttgggtggactacggggagcgcgccgagctggatgactcggacggaagagctggacatccgcccaaaggtatcgtctcttctgggaaagctcgtcagctacaccaacctcacccagggcgccaaagagcatgaggaggccgagagtggggagggcacccgccggagggcagccgaggcacccagcatgggcaccctcatgggggtgtacctgccctgcctgcagaatatctttggggttatcctcttcctgcggctgacctggatggtgggcacagcaggtgtgctacaggccctcctcatcgtgcttatctgctgctgttgtaccctgctgacggccatctccatgagtgccatcgccaccaacggtgtggttccagctgggggctcctatttcatgatctctcgttcactggggccagaatttggaggtgctgtgggcctgtgcttctacctgggaacaacattcgcagcagccatgtacatcctgggggccatcgagatcttgctgacctacattgccccaccagctgccattttttacccatcgggtgctcatgacacgtcgaatgccactttgaacaatatgcgtgtgtatgggaccattttcctgaccttcatgaccctggtggtgtttgtgggggtcaagtatgtgaacaaatttgcctcgctcttcctggcctgtgtgatcatctccatcctctccatctatgctgggggcataaagtctatatttgaccctcccgtgtttccggtatgcatgctgggcaacaggaccctgtcccgggaccagtttgacatctgtgccaagacagctgtagtggacaatgagacagtggccacccagctatggagtttcttctgccacagccccaaccttacgaccgactcctgtgacccctacttcatgctcaacaatgtgaccgagatccctggcatccccggggcagctgctggtgtgctccaggaaaacctgtggagcgcctacctggagaagggtgacatcgtggagaagcatgggctgccctccgcagatgccccgagcctgaaggagagcctgcctctgtacgtggtcgctgacatcgccacatccttcaccgtgctggtcggcatcttcttcccttctgtaacaggcatcatggctggctcaaaccgctctggggaccttcgtgacgcccagaagtctatccctgtggggaccattctggccatcattacaacttccctcgtgtacttcagcagtgtggttctctttggtgcctgcattgagggtgtggttctccgggacaagtatggcgatggtgtcagcaggaacttggtggtgggcacactggcctggccttcaccctgggtcatcgtcatcggctccttcttttcaacgtgtggcgctggcctccagagcctcacaggggcaccacgcctattgcaggccattgccaaggacaacatcatccccttcctccgggtgtttggccacgggaaggtgaatggtgaacccacatgggcactcctcctgacggcactcatcgccgagctgggcatcctcatcgcctccctcgacatggtggcccccatcttatccatgttctttctgatgtgctacctgttcgtgaacctcgcctgtgcggtgcagacactcctgaggacccccaactggcggccccggttcaagtactatcactgggcgctgtccttcctgggcatgagtctctgcctggcccttatgtttgtctcctcctggtactatgccctggtggccatgctcatcgccggcatgatctacaaatacatcgagtaccaaggggctgagaaggagtggggtgacgggatccgaggcctgtccctgagcgctgcccgctacgcgctgttgcggctggaggaggggcctcctcacaccaagaactggcggccgcagctgctggtgctgctgaagctggacgaggacctccacgtgaagtacccgcggctcctcaccttcgcctcccagctcaaggctggcaagggcctgaccattgttggttctgtcatccaggggagcttcttggagagctatggcgaggctcaggccgccgagcagaccatcaagaacatgatggaaattgagaaggtgaagggcttctgccaggtggtggtggccagcaaggtgcgggaggggctggcccacctcatccagtcctgtggcctgggaggcatgcggcataactccgtggtgctgggctggccctacggctggcgacagagcgaggacccccgtgcctggaagaccttcattgacaccgtgcgctgcactacggctgcccacctggccctgctcgtgcccaagaacatcgccttctaccccagcaaccacgagcgctacctggagggccacatagacgtgtggtggatcgtgcacgatggtggcatgctcatgcttctgcccttcctgctgcgccagcataaggtctggaggaagtgccggatgcgcatcttcacagtggcccagatggatgacaacagcatccagatgaagaaggacctggctgtctttctgtaccatctgcgccttgaggccgaggtggaggtggtggagatgcataacagtgacatctctgcatacacctacgagcggacgctgatgatggagcagcggtcgcagatgctgcggcagatgagactgaccaagactgagcgggagcgagaagcccagctggtcaaggatcggcactcggccctgcggctggagagcctgtactcggacgaggaagatgagtctgcagtgggggctgacaagatccagatgacgtggaccagggacaagtacatgactgagacctgggaccccagccatgcccctgacaatttccgggagctggtgcacattaagccggaccaatccaatgtgcggcgcatgcacactgctgtgaagctcaatgaagtcattgtcacgcgctcccacgacgcccgcctggttctcctaaacatgcctggcccacccaggaacagtgagggcgacgagaactacatggagttcctcgaggtgctgaccgagggccttgagcgggtgctgttggtgcgcggtggtggccgtgaagtcatcaccatctactcctgagcccagtgtcatcttgtggcctggagtcgaggtcttggccaggacataacaagctgtggtctggggtaacagcctcttcccagcacccacctgccagccctgcttgcctggccctgtcctggacccagctttgctaggtctccttggaaaccaggcctgggcctcaaaatggagatggatcccaggtcttgtgggaccctgggatgtttggggactttactatctagcaccccagtaggcctgtcctggccagagaagactggtaggggccgagtggggtttgaaggcagccggcccggcccagcccaggagcgctatttattgcatatttattgtttggatgtcaccatcagagacgaagggaagggtagccagggagggagtccagcccagctgcctgcaggaagatctggctcagtctactatgggcagggccccccaccaagctgagccgaatggagacagctgagctgaggcctgactttttcaataaaacattgtgtagttctgggcctcctgctgccccggctctgtttcccctggcgccaagagaagaaggcggaactgaacccaggcccagagccggctccctgaggctgtgcccctttccggcaatctctggccacaacccccactggccaggccgtccctcccactggccctagggcccctcccactcccacaccagataaggacagcccagtgccgctttctctggcagtaggcaccagggctggaatggggccgcccggctccccatggcagtgggtgacgctgctgctggggctgctgctccctcctgccgcccccttctggctcctcaatgtgctcttccccccgcacaccacgcccaaggctgagctcagtaaccacacacggcccgtcatcctcggtaagcccccaccaggcccctgatgcaccacgccagaccctggggagcctgggccccagcccctggcagctgacctggccaaagcccttctgccctgcataagccccgacataagtacctgccctggtgtggggaggggccaaaagcttgtcccttagaggaatgacgtcccttctcccaccacactgtgactctcagttgtctaacccagggggggcggagtgggggacggggtgtgcctgaggtcttggctggggcatcacaagctgtggtcagtcacagccacaccagactctgggccaagccccaccactccttccttggcccccacccaccaaggacaagatgcccagcccaggatcggtgagcaggagaggcccatccatgcccggcccctattaggcccagcccccatgcccccagacctatctgttcccaccttggactttggcaataaaggagcgccagactggg

SEQ ID NO: 28523 - DNA, 4644 bp, Homo sapiens
  source 1..4644: mol_type = unassigned DNA
agtgcatggtggggtagccagccggccacctttgggccatggcagccgaaggtgctgtgtgcggcttcgtctatctggagggcactgcctgggcggtccctgaggacaccgaacccttggcatcctgcacattgggacatggcaaccacagagagagcagcccttttctttcccccttggaggcttccagaggaattgactactatgacaggaacctggcactgtttgaggaagagctggacatccgcccaaaggtatcgtctcttctgggaaagctcgtcagctacaccaacctcacccagggcgccaaagagcatgaggaggccgagagtggggagggcacccgccggagggcagccgaggcacccagcatgggcaccctcatgggggtgtacctgccctgcctgcagaatatctttggggttatcctcttcctgcggctgacctggatggtgggcacagcaggtgtgctacaggccctcctcatcgtgcttatctgctgctgttgtaccctgctgacggccatctccatgagtgccatcgccaccaacggtgtggttccagctgggggctcctatttcatgatctctcgttcactggggccagaatttggaggtgctgtgggcctgtgcttctacctgggaacaacattcgcagcagccatgtacatcctgggggccatcgagatcttgctgacctacattgccccaccagctgccattttttacccatcgggtgctcatgacacgtcgaatgccactttgaacaatatgcgtgtgtatgggaccattttcctgaccttcatgaccctggtggtgtttgtgggggtcaagtatgtgaacaaatttgcctcgctcttcctggcctgtgtgatcatctccatcctctccatctatgctgggggcataaagtctatatttgaccctcccgtgtttccggtatgcatgctgggcaacaggaccctgtcccgggaccagtttgacatctgtgccaagacagctgtagtggacaatgagacagtggccacccagctatggagtttcttctgccacagccccaaccttacgaccgactcctgtgacccctacttcatgctcaacaatgtgaccgagatccctggcatccccggggcagctgctggtgtgctccaggaaaacctgtggagcgcctacctggagaagggtgacatcgtggagaagcatgggctgccctccgcagatgccccgagcctgaaggagagcctgcctctgtacgtggtcgctgacatcgccacatccttcaccgtgctggtcggcatcttcttcccttctgtaacaggcatcatggctggctcaaaccgctctggggaccttcgtgacgcccagaagtctatccctgtggggaccattctggccatcattacaacttccctcgtgtacttcagcagtgtggttctctttggtgcctgcattgagggtgtggttctccgggacaagtatggcgatggtgtcagcaggaacttggtggtgggcacactggcctggccttcaccctgggtcatcgtcatcggctccttcttttcaacgtgtggcgctggcctccagagcctcacaggggcaccacgcctattgcaggccattgccaaggacaacatcatccccttcctccgggtgtttggccacgggaaggtgaatggtgaacccacatgggcactcctcctgacggcactcatcgccgagctgggcatcctcatcgcctccctcgacatggtggcccccatcttatccatgttctttctgatgtgctacctgttcgtgaacctcgcctgtgcggtgcagacactcctgaggacccccaactggcggccccggttcaagtactatcactgggcgctgtccttcctgggcatgagtctctgcctggcccttatgtttgtctcctcctggtactatgccctggtggccatgctcatcgccggcatgatctacaaatacatcgagtaccaaggggctgagaaggagtggggtgacgggatccgaggcctgtccctgagcgctgcccgctacgcgctgttgcggctggaggaggggcctcctcacaccaagaactggcggccgcagctgctggtgctgctgaagctggacgaggacctccacgtgaagtacccgcggctcctcaccttcgcctcccagctcaaggctggcaagggcctgaccattgttggttctgtcatccaggggagcttcttggagagctatggcgaggctcaggccgccgagcagaccatcaagaacatgatggaaattgagaaggtgaagggcttctgccaggtggtggtggccagcaaggtgcgggaggggctggcccacctcatccagtcctgtggcctgggaggcatgcggcataactccgtggtgctgggctggccctacggctggcgacagagcgaggacccccgtgcctggaagaccttcattgacaccgtgcgctgcactacggctgcccacctggccctgctcgtgcccaagaacatcgccttctaccccagcaaccacgagcgctacctggagggccacatagacgtgtggtggatcgtgcacgatggtggcatgctcatgcttctgcccttcctgctgcgccagcataaggtctggaggaagtgccggatgcgcatcttcacagtggcccagatggatgacaacagcatccagatgaagaaggacctggctgtctttctgtaccatctgcgccttgaggccgaggtggaggtggtggagatgcataacagtgacatctctgcatacacctacgagcggacgctgatgatggagcagcggtcgcagatgctgcggcagatgagactgaccaagactgagcgggagcgagaagcccagctggtcaaggatcggcactcggccctgcggctggagagcctgtactcggacgaggaagatgagtctgcagtgggggctgacaagatccagatgacgtggaccagggacaagtacatgactgagacctgggaccccagccatgcccctgacaatttccgggagctggtgcacattaagccggaccaatccaatgtgcggcgcatgcacactgctgtgaagctcaatgaagtcattgtcacgcgctcccacgacgcccgcctggttctcctaaacatgcctggcccacccaggaacagtgagggcgacgagaactacatggagttcctcgaggtgctgaccgagggccttgagcgggtgctgttggtgcgcggtggtggccgtgaagtcatcaccatctactcctgagcccagtgtcatcttgtggcctggagtcgaggtcttggccaggacataacaagctgtggtctggggtaacagcctcttcccagcacccacctgccagccctgcttgcctggccctgtcctggacccagctttgctaggtctccttggaaaccaggcctgggcctcaaaatggagatggatcccaggtcttgtgggaccctgggatgtttggggactttactatctagcaccccagtaggcctgtcctggccagagaagactggtaggggccgagtggggtttgaaggcagccggcccggcccagcccaggagcgctatttattgcatatttattgtttggatgtcaccatcagagacgaagggaagggtagccagggagggagtccagcccagctgcctgcaggaagatctggctcagtctactatgggcagggccccccaccaagctgagccgaatggagacagctgagctgaggcctgactttttcaataaaacattgtgtagttctgggcctcctgctgccccggctctgtttcccctggcgccaagagaagaaggcggaactgaacccaggcccagagccggctccctgaggctgtgcccctttccggcaatctctggccacaacccccactggccaggccgtccctcccactggccctagggcccctcccactcccacaccagataaggacagcccagtgccgctttctctggcagtaggcaccagggctggaatggggccgcccggctccccatggcagtgggtgacgctgctgctggggctgctgctccctcctgccgcccccttctggctcctcaatgtgctcttccccccgcacaccacgcccaaggctgagctcagtaaccacacacggcccgtcatcctcggtaagcccccaccaggcccctgatgcaccacgccagaccctggggagcctgggccccagcccctggcagctgacctggccaaagcccttctgccctgcataagccccgacataagtacctgccctggtgtggggaggggccaaaagcttgtcccttagaggaatgacgtcccttctcccaccacactgtgactctcagttgtctaacccagggggggcggagtgggggacggggtgtgcctgaggtcttggctggggcatcacaagctgtggtcagtcacagccacaccagactctgggccaagccccaccactccttccttggcccccacccaccaaggacaagatgcccagcccaggatcggtgagcaggagaggcccatccatgcccggcccctattaggcccagcccccatgcccccagacctatctgttcccaccttggactttggcaataaaggagcgccagactggg

SEQ ID NO: 28524 - DNA, 4635 bp, Homo sapiens
  source 1..4635: mol_type = unassigned DNA
gagtcctgctagatccccgcaagctaggccagctcctcccactgcctcccttcctctttctcctcctcttactcctttccagccagaccttggctgtctacaggatgggggacaccctgagccccggacatggcaaccacagagagagcagcccttttctttcccccttggaggcttccagaggaattgactactatgacaggaacctggcactgtttgaggaagagctggacatccgcccaaaggtatcgtctcttctgggaaagctcgtcagctacaccaacctcacccagggcgccaaagagcatgaggaggccgagagtggggagggcacccgccggagggcagccgaggcacccagcatgggcaccctcatgggggtgtacctgccctgcctgcagaatatctttggggttatcctcttcctgcggctgacctggatggtgggcacagcaggtgtgctacaggccctcctcatcgtgcttatctgctgctgttgtaccctgctgacggccatctccatgagtgccatcgccaccaacggtgtggttccagctgggggctcctatttcatgatctctcgttcactggggccagaatttggaggtgctgtgggcctgtgcttctacctgggaacaacattcgcagcagccatgtacatcctgggggccatcgagatcttgctgacctacattgccccaccagctgccattttttacccatcgggtgctcatgacacgtcgaatgccactttgaacaatatgcgtgtgtatgggaccattttcctgaccttcatgaccctggtggtgtttgtgggggtcaagtatgtgaacaaatttgcctcgctcttcctggcctgtgtgatcatctccatcctctccatctatgctgggggcataaagtctatatttgaccctcccgtgtttccggtatgcatgctgggcaacaggaccctgtcccgggaccagtttgacatctgtgccaagacagctgtagtggacaatgagacagtggccacccagctatggagtttcttctgccacagccccaaccttacgaccgactcctgtgacccctacttcatgctcaacaatgtgaccgagatccctggcatccccggggcagctgctggtgtgctccaggaaaacctgtggagcgcctacctggagaagggtgacatcgtggagaagcatgggctgccctccgcagatgccccgagcctgaaggagagcctgcctctgtacgtggtcgctgacatcgccacatccttcaccgtgctggtcggcatcttcttcccttctgtaacaggcatcatggctggctcaaaccgctctggggaccttcgtgacgcccagaagtctatccctgtggggaccattctggccatcattacaacttccctcgtgtacttcagcagtgtggttctctttggtgcctgcattgagggtgtggttctccgggacaagtatggcgatggtgtcagcaggaacttggtggtgggcacactggcctggccttcaccctgggtcatcgtcatcggctccttcttttcaacgtgtggcgctggcctccagagcctcacaggggcaccacgcctattgcaggccattgccaaggacaacatcatccccttcctccgggtgtttggccacgggaaggtgaatggtgaacccacatgggcactcctcctgacggcactcatcgccgagctgggcatcctcatcgcctccctcgacatggtggcccccatcttatccatgttctttctgatgtgctacctgttcgtgaacctcgcctgtgcggtgcagacactcctgaggacccccaactggcggccccggttcaagtactatcactgggcgctgtccttcctgggcatgagtctctgcctggcccttatgtttgtctcctcctggtactatgccctggtggccatgctcatcgccggcatgatctacaaatacatcgagtaccaaggggctgagaaggagtggggtgacgggatccgaggcctgtccctgagcgctgcccgctacgcgctgttgcggctggaggaggggcctcctcacaccaagaactggcggccgcagctgctggtgctgctgaagctggacgaggacctccacgtgaagtacccgcggctcctcaccttcgcctcccagctcaaggctggcaagggcctgaccattgttggttctgtcatccaggggagcttcttggagagctatggcgaggctcaggccgccgagcagaccatcaagaacatgatggaaattgagaaggtgaagggcttctgccaggtggtggtggccagcaaggtgcgggaggggctggcccacctcatccagtcctgtggcctgggaggcatgcggcataactccgtggtgctgggctggccctacggctggcgacagagcgaggacccccgtgcctggaagaccttcattgacaccgtgcgctgcactacggctgcccacctggccctgctcgtgcccaagaacatcgccttctaccccagcaaccacgagcgctacctggagggccacatagacgtgtggtggatcgtgcacgatggtggcatgctcatgcttctgcccttcctgctgcgccagcataaggtctggaggaagtgccggatgcgcatcttcacagtggcccagatggatgacaacagcatccagatgaagaaggacctggctgtctttctgtaccatctgcgccttgaggccgaggtggaggtggtggagatgcataacagtgacatctctgcatacacctacgagcggacgctgatgatggagcagcggtcgcagatgctgcggcagatgagactgaccaagactgagcgggagcgagaagcccagctggtcaaggatcggcactcggccctgcggctggagagcctgtactcggacgaggaagatgagtctgcagtgggggctgacaagatccagatgacgtggaccagggacaagtacatgactgagacctgggaccccagccatgcccctgacaatttccgggagctggtgcacattaagccggaccaatccaatgtgcggcgcatgcacactgctgtgaagctcaatgaagtcattgtcacgcgctcccacgacgcccgcctggttctcctaaacatgcctggcccacccaggaacagtgagggcgacgagaactacatggagttcctcgaggtgctgaccgagggccttgagcgggtgctgttggtgcgcggtggtggccgtgaagtcatcaccatctactcctgagcccagtgtcatcttgtggcctggagtcgaggtcttggccaggacataacaagctgtggtctggggtaacagcctcttcccagcacccacctgccagccctgcttgcctggccctgtcctggacccagctttgctaggtctccttggaaaccaggcctgggcctcaaaatggagatggatcccaggtcttgtgggaccctgggatgtttggggactttactatctagcaccccagtaggcctgtcctggccagagaagactggtaggggccgagtggggtttgaaggcagccggcccggcccagcccaggagcgctatttattgcatatttattgtttggatgtcaccatcagagacgaagggaagggtagccagggagggagtccagcccagctgcctgcaggaagatctggctcagtctactatgggcagggccccccaccaagctgagccgaatggagacagctgagctgaggcctgactttttcaataaaacattgtgtagttctgggcctcctgctgccccggctctgtttcccctggcgccaagagaagaaggcggaactgaacccaggcccagagccggctccctgaggctgtgcccctttccggcaatctctggccacaacccccactggccaggccgtccctcccactggccctagggcccctcccactcccacaccagataaggacagcccagtgccgctttctctggcagtaggcaccagggctggaatggggccgcccggctccccatggcagtgggtgacgctgctgctggggctgctgctccctcctgccgcccccttctggctcctcaatgtgctcttccccccgcacaccacgcccaaggctgagctcagtaaccacacacggcccgtcatcctcggtaagcccccaccaggcccctgatgcaccacgccagaccctggggagcctgggccccagcccctggcagctgacctggccaaagcccttctgccctgcataagccccgacataagtacctgccctggtgtggggaggggccaaaagcttgtcccttagaggaatgacgtcccttctcccaccacactgtgactctcagttgtctaacccagggggggcggagtgggggacggggtgtgcctgaggtcttggctggggcatcacaagctgtggtcagtcacagccacaccagactctgggccaagccccaccactccttccttggcccccacccaccaaggacaagatgcccagcccaggatcggtgagcaggagaggcccatccatgcccggcccctattaggcccagcccccatgcccccagacctatctgttcccaccttggactttggcaataaaggagcgccagactggg

SEQ ID NO: 28525 - DNA, 3817 bp, Homo sapiens
  source 1..3817: mol_type = unassigned DNA
ggatcacagtctgaaacgacagcaaggaagaggtaggcagggaaaactaactggaaggaagtttaaatacagaaagagcaaagtattatctaactataacaatgccacattttactgtgactaaggtagaggacccagaggagggggcagcggcttcgatctctcaagagcctagtttagcagacataaaagcccggattcaggattcagatgaaccagacctgagtcagaactccatcacaggggaacacagccaactgttagacgacggacataagaaagctcgaaatgcttatctcaataattccaattatgaagaaggagatgaatattttgataaaaatttggcactctttgaggaagaaatggacaccagaccgaaggtgtcttccctcctcaaccgcatggccaattacactaatctgactcaaggagcaaaggaacatgaagaggcagaaaacatcactgaagggaaaaagaagcccaccaagaccccccaaatgggtaccttcatgggtgtctacctcccatgtctacaaaatatttttggagtgatcctttttttacgccttacatgggtggtgggcacagctggagttcttcaggcttttgcaattgtccttatctgctgctgctgtacaatgttgactgctatctccatgagtgccattgccactaatggagtggtgccagctgggggctcatactttatgatttcccgggcactgggcccagagtttggtggggctgttggcctctgcttttatcttggtaccacatttgcagcagccatgtacatccttggtgccattgaaatctttctggtctatatcgtcccccgagctgccatctttcacagtgatgacgcactcaaggaatcagcagccatgctaaataacatgcgtgtctacggcacagctttcttggtccttatggtattagtggtatttatcggcgtacgctatgtgaacaagtttgcctcacttttcctggcctgtgtcattgtgtccatcttggccatctatgctggagccatcaagtcttcttttgctcctccacacttcccggtctgcatgctgggtaaccgcaccctttcatcaagacacattgacgtttgctctaagaccaaggaaattaacaacatgacagtcccatcaaagttatggggattcttctgtaactcgagtcaatttttcaatgccacctgtgatgaatactttgttcacaataacgtcacttcaatccagggcattcctggattggctagtggtataattacagagaatctttggagtaattacctacccaagggagagatcatcgaaaagccttcagccaaatcttctgatgtcttaggcagcttaaaccatgaatatgttcttgttgacatcaccacctccttcacgcttctggtgggaatcttctttccctctgttacaggtatcatggctggatcaaacagatctggagatctgaaagatgctcagaagtctattccgattggtactatccttgccatcctgaccacctcctttgtttatttaagcaatgttgtcctttttggtgcatgtattgaaggggttgttctcagagacaagttcggtgatgctgtgaaaggtaatttggtggtaggcaccttatcttggccatccccatgggtgattgttattggctccttcttttcaacatgtggggctggacttcagagcctcacaggtgcaccgaggctgctacaagctattgccaaggataacatcataccgtttctgagggtttttggccacagcaaagccaatggggaacctacctgggctttacttctaactgctgccattgcagagcttggaatactcattgcctccctggatcttgtggccccaattctttccatgttttttctcatgtgttacctctttgtaaacttggcatgtgccttgcaaacattacttcgaacacccaactggagaccccgattccgctactaccattgggccctttctttcatgggaatgagtatctgtctggctctgatgttcatttcttcctggtattatgccattgtagccatggtaatagctggtatgatctacaagtacattgaataccaaggagctgagaaagaatggggtgatggtatccgtgggctgtccctcagtgcagcccggtttgctttgcttcgattggaggaaggacctccacacactaaaaactggaggcctcagttgcttgtattactgaaactagatgaagacttacatgtcaagcatcctcgcctcctcacctttgcctcacagctcaaagcaggaaaaggtctcactattgtgggctctgtcatcgtggggaacttcctagagaactacggtgaagctttagctgctgagcagaccataaagcacctaatggaggcagagaaggtaaaaggattctgccagctggtggtggccgccaagctgagagagggcatttcccacctcatccagtcatgtggccttgggggcatgaagcacaacacggtggtgatgggctggcctaatggctggcgtcaaagcgaagatgcccgcgcttggaagacttttattggcacagttcgagtgacaactgctgcccatcttgcactgctggtggctaaaaacatctccttctttcccagcaatgtggagcaattttctgagggcaacattgatgtgtggtggattgtgcatgatggggggatgcttatgctactaccattcctactgaaacagcacaaggtgtggcgaaagtgcagcatacggatcttcacagtagcccaattagaagacaacagtatccaaatgaagaaggacctagccaccttcctatatcacttacgcattgaggcggaggtagaagtggtggagatgcatgacagtgatatatcagcatatacttacgagcgcactttgatgatggaacaaaggtcccagatgctccggcacatgcggctatccaaaacagagcgagacagagaggcacaattggtgaaagaccgaaactcaatgctacgattgaccagcattggctctgatgaggacgaagagacagaaacctatcaggagaaggtgcacatgacttggacaaaagacaagtacatggcatcccggggacaaaaagcgaagtcaatggaaggattccaggacctgcttaacatgcgtccggaccagtccaatgtgaggcggatgcatacagcagtgaaactcaacgaggttatagttaacaagtcccatgaagcaaagctggttttattgaatatgccagggccaccccgaaaccctgagggtgatgaaaactacatggagttcctagaggtgcttaccgagggactagagcgagtcctacttgtccggggtggtggcagtgaagtgatcaccatttattcataacctactctgaatgaccgtgcttgacctgttttcttaaaaggcctacgtcctccatggaagtgccagctcattactaccactcccactcaactagaagcctgtgttctgtacacatcatactgaactcttgatgagctgagcctcaagtacctgtgtaaaagagctcccatctgatctgcagtcattacagaaaaagcaaatattccctcaacatcagaacaatgctcaagtctttcaagccacgtctgagcagtcaaaggcaaattagaattaacaagctgagccaataaatgaattggtaaaagggatgctagaaattcaactgaagaaaaaaagcaagtcaagtacgtattcagcattaaagatgaatctcagaagtcatggttcaatgttgacactgtgaggataacaactag

SEQ ID NO: 28526 - DNA, 4568 bp, Homo sapiens
  source 1..4568: mol_type = unassigned DNA
gcgcacccgcatcagctggcgccgggatactgcacctgcgacctccttctccctcaccctgctgcccagtcaggccagcctgcgtggccgtctcctcctctactgggaccctgaggaagaacgacgagggggtgacctgcgccggggcgggggtaggggagaacgcgcctccggcaaagggggtggctcgtcctgtcacacgcaggagaaacctagcgagcggaccgtggctcagtggactagctacgacttgccacgactctgagctgcagtccgaggtgtcttgatccgctaacctcctcccagaccccgaggacctttctgctaggagaagagcgggcgcgccacccccaccgacctctcggagacaggaatccgctctgcccctgcatcctcctctgctcacccttctctcagtagttcaaaagtagctagcgtaagaggaagattttgcgaggttccccccactttttttgttcttaaaaagaacaaaatgcatcctccagaaaccaccaccaagatggcttcagttcggttcatggtgacaccgacaaagatcgatgacattccaggtttgtcagacaccagtccggacctcagctctcgatctagttcccgagtaagatttagctcccgggaaagcgtgcctgaaacaagccggagtgagcctatgagtgagatgtctggggccaccacttcgctggcaactgttgcactggatccacccagtgaccggacttctcacccccaggatgtcatcgaggacctgagtcagaactccatcacaggggaacacagccaactgttagacgacggacataagaaagctcgaaatgcttatctcaataattccaattatgaagaaggagatgaatattttgataaaaatttggcactctttgaggaagaaatggacaccagaccgaaggtgtcttccctcctcaaccgcatggccaattacactaatctgactcaaggagcaaaggaacatgaagaggcagaaaacatcactgaagggaaaaagaagcccaccaagaccccccaaatgggtaccttcatgggtgtctacctcccatgtctacaaaatatttttggagtgatcctttttttacgccttacatgggtggtgggcacagctggagttcttcaggcttttgcaattgtccttatctgctgctgctgtacaatgttgactgctatctccatgagtgccattgccactaatggagtggtgccagctgggggctcatactttatgatttcccgggcactgggcccagagtttggtggggctgttggcctctgcttttatcttggtaccacatttgcagcagccatgtacatccttggtgccattgaaatctttctggtctatatcgtcccccgagctgccatctttcacagtgatgacgcactcaaggaatcagcagccatgctaaataacatgcgtgtctacggcacagctttcttggtccttatggtattagtggtatttatcggcgtacgctatgtgaacaagtttgcctcacttttcctggcctgtgtcattgtgtccatcttggccatctatgctggagccatcaagtcttcttttgctcctccacacttcccggtctgcatgctgggtaaccgcaccctttcatcaagacacattgacgtttgctctaagaccaaggaaattaacaacatgacagtcccatcaaagttatggggattcttctgtaactcgagtcaatttttcaatgccacctgtgatgaatactttgttcacaataacgtcacttcaatccagggcattcctggattggctagtggtataattacagagaatctttggagtaattacctacccaagggagagatcatcgaaaagccttcagccaaatcttctgatgtcttaggcagcttaaaccatgaatatgttcttgttgacatcaccacctccttcacgcttctggtgggaatcttctttccctctgttacaggtatcatggctggatcaaacagatctggagatctgaaagatgctcagaagtctattccgattggtactatccttgccatcctgaccacctcctttgtttatttaagcaatgttgtcctttttggtgcatgtattgaaggggttgttctcagagacaagttcggtgatgctgtgaaaggtaatttggtggtaggcaccttatcttggccatccccatgggtgattgttattggctccttcttttcaacatgtggggctggacttcagagcctcacaggtgcaccgaggctgctacaagctattgccaaggataacatcataccgtttctgagggtttttggccacagcaaagccaatggggaacctacctgggctttacttctaactgctgccattgcagagcttggaatactcattgcctccctggatcttgtggccccaattctttccatgttttttctcatgtgttacctctttgtaaacttggcatgtgccttgcaaacattacttcgaacacccaactggagaccccgattccgctactaccattgggccctttctttcatgggaatgagtatctgtctggctctgatgttcatttcttcctggtattatgccattgtagccatggtaatagctggtatgatctacaagtacattgaataccaaggagctgagaaagaatggggtgatggtatccgtgggctgtccctcagtgcagcccggtttgctttgcttcgattggaggaaggacctccacacactaaaaactggaggcctcagttgcttgtattactgaaactagatgaagacttacatgtcaagcatcctcgcctcctcacctttgcctcacagctcaaagcaggaaaaggtctcactattgtgggctctgtcatcgtggggaacttcctagagaactacggtgaagctttagctgctgagcagaccataaagcacctaatggaggcagagaaggtaaaaggattctgccagctggtggtggccgccaagctgagagagggcatttcccacctcatccagtcatgtggccttgggggcatgaagcacaacacggtggtgatgggctggcctaatggctggcgtcaaagcgaagatgcccgcgcttggaagacttttattggcacagttcgagtgacaactgctgcccatcttgcactgctggtggctaaaaacatctccttctttcccagcaatgtggagcaattttctgagggcaacattgatgtgtggtggattgtgcatgatggggggatgcttatgctactaccattcctactgaaacagcacaaggtgtggcgaaagtgcagcatacggatcttcacagtagcccaattagaagacaacagtatccaaatgaagaaggacctagccaccttcctatatcacttacgcattgaggcggaggtagaagtggtggagatgcatgacagtgatatatcagcatatacttacgagcgcactttgatgatggaacaaaggtcccagatgctccggcacatgcggctatccaaaacagagcgagacagagaggcacaattggtgaaagaccgaaactcaatgctacgattgaccagcattggctctgatgaggacgaagagacagaaacctatcaggagaaggtgcacatgacttggacaaaagacaagtacatggcatcccggggacaaaaagcgaagtcaatggaaggattccaggacctgcttaacatgcgtccggaccagtccaatgtgaggcggatgcatacagcagtgaaactcaacgaggttatagttaacaagtcccatgaagcaaagctggttttattgaatatgccagggccaccccgaaaccctgagggtgatgaaaactacatggagttcctagaggtgcttaccgagggactagagcgagtcctacttgtccggggtggtggcagtgaagtgatcaccatttattcataacctactctgaatgaccgtgcttgacctgttttcttaaaaggcctacgtcctccatggaagtgccagctcattactaccactcccactcaactagaagcctgtgttctgtacacatcatactgaactcttgatgagctgagcctcaagtacctgtgtaaaagagctcccatctgatctgcagtcattacagaaaaagcaaatattccctcaacatcagaacaatgctcaagtctttcaagccacgtctgagcagtcaaaggcaaattagaattaacaagctgagccaataaatgaattggtaaaagggatgctagaaattcaactgaagaaaaaaagcaagtcaagtacgtattcagcattaaagatgaatctcagaagtcatggttcaatgttgacactgtgaggataacaactagagacagcttcatcttactaaagaatttatggtcaagtatatttggacctattatcctcggcaagccaagatgcaaacattttttagctatatttctttagtatacccactgctgtaattttatattaggatactaacttgaaacatggctgcagcctctacttcttcaaaaacatccccccaaaataccagatttaaatatccaaa

SEQ ID NO: 28527 - DNA, 4096 bp, Homo sapiens
  source 1..4096: mol_type = unassigned DNA
tgcactcggtcaccgcgggctgcggcggctgggcggggctttcgggcgcccgcgggacggttccgccctctcactgcacccccgggcttctcttcgcaaggtttgtcagacaccagtccggacctcagctctcgatctagttcccgagtaagatttagctcccgggaaagcgtgcctgaaacaagccggagtgagcctatgagtgagatgtctggggccaccacttcgctggcaactgttgcactggatccacccagtgaccggacttctcacccccaggatgtcatcgaggacctgagtcagaactccatcacaggggaacacagccaactgttagacgacggacataagaaagctcgaaatgcttatctcaataattccaattatgaagaaggagatgaatattttgataaaaatttggcactctttgaggaagaaatggacaccagaccgaaggtgtcttccctcctcaaccgcatggccaattacactaatctgactcaaggagcaaaggaacatgaagaggcagaaaacatcactgaagggaaaaagaagcccaccaagaccccccaaatgggtaccttcatgggtgtctacctcccatgtctacaaaatatttttggagtgatcctttttttacgccttacatgggtggtgggcacagctggagttcttcaggcttttgcaattgtccttatctgctgctgctgtacaatgttgactgctatctccatgagtgccattgccactaatggagtggtgccagctgggggctcatactttatgatttcccgggcactgggcccagagtttggtggggctgttggcctctgcttttatcttggtaccacatttgcagcagccatgtacatccttggtgccattgaaatctttctggtctatatcgtcccccgagctgccatctttcacagtgatgacgcactcaaggaatcagcagccatgctaaataacatgcgtgtctacggcacagctttcttggtccttatggtattagtggtatttatcggcgtacgctatgtgaacaagtttgcctcacttttcctggcctgtgtcattgtgtccatcttggccatctatgctggagccatcaagtcttcttttgctcctccacacttcccggtctgcatgctgggtaaccgcaccctttcatcaagacacattgacgtttgctctaagaccaaggaaattaacaacatgacagtcccatcaaagttatggggattcttctgtaactcgagtcaatttttcaatgccacctgtgatgaatactttgttcacaataacgtcacttcaatccagggcattcctggattggctagtggtataattacagagaatctttggagtaattacctacccaagggagagatcatcgaaaagccttcagccaaatcttctgatgtcttaggcagcttaaaccatgaatatgttcttgttgacatcaccacctccttcacgcttctggtgggaatcttctttccctctgttacaggtatcatggctggatcaaacagatctggagatctgaaagatgctcagaagtctattccgattggtactatccttgccatcctgaccacctcctttgtttatttaagcaatgttgtcctttttggtgcatgtattgaaggggttgttctcagagacaagttcggtgatgctgtgaaaggtaatttggtggtaggcaccttatcttggccatccccatgggtgattgttattggctccttcttttcaacatgtggggctggacttcagagcctcacaggtgcaccgaggctgctacaagctattgccaaggataacatcataccgtttctgagggtttttggccacagcaaagccaatggggaacctacctgggctttacttctaactgctgccattgcagagcttggaatactcattgcctccctggatcttgtggccccaattctttccatgttttttctcatgtgttacctctttgtaaacttggcatgtgccttgcaaacattacttcgaacacccaactggagaccccgattccgctactaccattgggccctttctttcatgggaatgagtatctgtctggctctgatgttcatttcttcctggtattatgccattgtagccatggtaatagctggtatgatctacaagtacattgaataccaaggagctgagaaagaatggggtgatggtatccgtgggctgtccctcagtgcagcccggtttgctttgcttcgattggaggaaggacctccacacactaaaaactggaggcctcagttgcttgtattactgaaactagatgaagacttacatgtcaagcatcctcgcctcctcacctttgcctcacagctcaaagcaggaaaaggtctcactattgtgggctctgtcatcgtggggaacttcctagagaactacggtgaagctttagctgctgagcagaccataaagcacctaatggaggcagagaaggtaaaaggattctgccagctggtggtggccgccaagctgagagagggcatttcccacctcatccagtcatgtggccttgggggcatgaagcacaacacggtggtgatgggctggcctaatggctggcgtcaaagcgaagatgcccgcgcttggaagacttttattggcacagttcgagtgacaactgctgcccatcttgcactgctggtggctaaaaacatctccttctttcccagcaatgtggagcaattttctgagggcaacattgatgtgtggtggattgtgcatgatggggggatgcttatgctactaccattcctactgaaacagcacaaggtgtggcgaaagtgcagcatacggatcttcacagtagcccaattagaagacaacagtatccaaatgaagaaggacctagccaccttcctatatcacttacgcattgaggcggaggtagaagtggtggagatgcatgacagtgatatatcagcatatacttacgagcgcactttgatgatggaacaaaggtcccagatgctccggcacatgcggctatccaaaacagagcgagacagagaggcacaattggtgaaagaccgaaactcaatgctacgattgaccagcattggctctgatgaggacgaagagacagaaacctatcaggagaaggtgcacatgacttggacaaaagacaagtacatggcatcccggggacaaaaagcgaagtcaatggaaggattccaggacctgcttaacatgcgtccggaccagtccaatgtgaggcggatgcatacagcagtgaaactcaacgaggttatagttaacaagtcccatgaagcaaagctggttttattgaatatgccagggccaccccgaaaccctgagggtgatgaaaactacatggagttcctagaggtgcttaccgagggactagagcgagtcctacttgtccggggtggtggcagtgaagtgatcaccatttattcataacctactctgaatgaccgtgcttgacctgttttcttaaaaggcctacgtcctccatggaagtgccagctcattactaccactcccactcaactagaagcctgtgttctgtacacatcatactgaactcttgatgagctgagcctcaagtacctgtgtaaaagagctcccatctgatctgcagtcattacagaaaaagcaaatattccctcaacatcagaacaatgctcaagtctttcaagccacgtctgagcagtcaaaggcaaattagaattaacaagctgagccaataaatgaattggtaaaagggatgctagaaattcaactgaagaaaaaaagcaagtcaagtacgtattcagcattaaagatgaatctcagaagtcatggttcaatgttgacactgtgaggataacaactagagacagcttcatcttactaaagaatttatggtcaagtatatttggacctattatcctcggcaagccaagatgcaaacattttttagctatatttctttagtatacccactgctgtaattttatattaggatactaacttgaaacatggctgcagcctctacttcttcaaaaacatccccccaaaataccagatttaaatatccaaa

SEQ ID NO: 28528 - DNA, 4194 bp, Homo sapiens
  source 1..4194: mol_type = unassigned DNA
tgagtagaagtattcttagttggggctttttgtgtggtgtgaatcaaggttattgaaatgtgttatttttcaagttatcttttgtattgcagtcaaaagtagctagcgtaagaggaagattttgcgaggttccccccactttttttgttcttaaaaagaacaaaatgcatcctccagaaaccaccaccaagatggcttcagttcggttcatggtgacaccgacaaagatcgatgacattccaggtttgtcagacaccagtccggacctcagctctcgatctagttcccgagtaagatttagctcccgggaaagcgtgcctgaaacaagccggagtgagcctatgagtgagatgtctggggccaccacttcgctggcaactgttgcactggatccacccagtgaccggacttctcacccccaggatgtcatcgaggacgacggacataagaaagctcgaaatgcttatctcaataattccaattatgaagaaggagatgaatattttgataaaaatttggcactctttgaggaagaaatggacaccagaccgaaggtgtcttccctcctcaaccgcatggccaattacactaatctgactcaaggagcaaaggaacatgaagaggcagaaaacatcactgaagggaaaaagaagcccaccaagaccccccaaatgggtaccttcatgggtgtctacctcccatgtctacaaaatatttttggagtgatcctttttttacgccttacatgggtggtgggcacagctggagttcttcaggcttttgcaattgtccttatctgctgctgctgtacaatgttgactgctatctccatgagtgccattgccactaatggagtggtgccagctgggggctcatactttatgatttcccgggcactgggcccagagtttggtggggctgttggcctctgcttttatcttggtaccacatttgcagcagccatgtacatccttggtgccattgaaatctttctggtctatatcgtcccccgagctgccatctttcacagtgatgacgcactcaaggaatcagcagccatgctaaataacatgcgtgtctacggcacagctttcttggtccttatggtattagtggtatttatcggcgtacgctatgtgaacaagtttgcctcacttttcctggcctgtgtcattgtgtccatcttggccatctatgctggagccatcaagtcttcttttgctcctccacacttcccggtctgcatgctgggtaaccgcaccctttcatcaagacacattgacgtttgctctaagaccaaggaaattaacaacatgacagtcccatcaaagttatggggattcttctgtaactcgagtcaatttttcaatgccacctgtgatgaatactttgttcacaataacgtcacttcaatccagggcattcctggattggctagtggtataattacagagaatctttggagtaattacctacccaagggagagatcatcgaaaagccttcagccaaatcttctgatgtcttaggcagcttaaaccatgaatatgttcttgttgacatcaccacctccttcacgcttctggtgggaatcttctttccctctgttacaggtatcatggctggatcaaacagatctggagatctgaaagatgctcagaagtctattccgattggtactatccttgccatcctgaccacctcctttgtttatttaagcaatgttgtcctttttggtgcatgtattgaaggggttgttctcagagacaagttcggtgatgctgtgaaaggtaatttggtggtaggcaccttatcttggccatccccatgggtgattgttattggctccttcttttcaacatgtggggctggacttcagagcctcacaggtgcaccgaggctgctacaagctattgccaaggataacatcataccgtttctgagggtttttggccacagcaaagccaatggggaacctacctgggctttacttctaactgctgccattgcagagcttggaatactcattgcctccctggatcttgtggccccaattctttccatgttttttctcatgtgttacctctttgtaaacttggcatgtgccttgcaaacattacttcgaacacccaactggagaccccgattccgctactaccattgggccctttctttcatgggaatgagtatctgtctggctctgatgttcatttcttcctggtattatgccattgtagccatggtaatagctggtatgatctacaagtacattgaataccaaggagctgagaaagaatggggtgatggtatccgtgggctgtccctcagtgcagcccggtttgctttgcttcgattggaggaaggacctccacacactaaaaactggaggcctcagttgcttgtattactgaaactagatgaagacttacatgtcaagcatcctcgcctcctcacctttgcctcacagctcaaagcaggaaaaggtctcactattgtgggctctgtcatcgtggggaacttcctagagaactacggtgaagctttagctgctgagcagaccataaagcacctaatggaggcagagaaggtaaaaggattctgccagctggtggtggccgccaagctgagagagggcatttcccacctcatccagtcatgtggccttgggggcatgaagcacaacacggtggtgatgggctggcctaatggctggcgtcaaagcgaagatgcccgcgcttggaagacttttattggcacagttcgagtgacaactgctgcccatcttgcactgctggtggctaaaaacatctccttctttcccagcaatgtggagcaattttctgagggcaacattgatgtgtggtggattgtgcatgatggggggatgcttatgctactaccattcctactgaaacagcacaaggtgtggcgaaagtgcagcatacggatcttcacagtagcccaattagaagacaacagtatccaaatgaagaaggacctagccaccttcctatatcacttacgcattgaggcggaggtagaagtggtggagatgcatgacagtgatatatcagcatatacttacgagcgcactttgatgatggaacaaaggtcccagatgctccggcacatgcggctatccaaaacagagcgagacagagaggcacaattggtgaaagaccgaaactcaatgctacgattgaccagcattggctctgatgaggacgaagagacagaaacctatcaggagaaggtgcacatgacttggacaaaagacaagtacatggcatcccggggacaaaaagcgaagtcaatggaaggattccaggacctgcttaacatgcgtccggaccagtccaatgtgaggcggatgcatacagcagtgaaactcaacgaggttatagttaacaagtcccatgaagcaaagctggttttattgaatatgccagggccaccccgaaaccctgagggtgatgaaaactacatggagttcctagaggtgcttaccgagggactagagcgagtcctacttgtccggggtggtggcagtgaagtgatcaccatttattcataacctactctgaatgaccgtgcttgacctgttttcttaaaaggcctacgtcctccatggaagtgccagctcattactaccactcccactcaactagaagcctgtgttctgtacacatcatactgaactcttgatgagctgagcctcaagtacctgtgtaaaagagctcccatctgatctgcagtcattacagaaaaagcaaatattccctcaacatcagaacaatgctcaagtctttcaagccacgtctgagcagtcaaaggcaaattagaattaacaagctgagccaataaatgaattggtaaaagggatgctagaaattcaactgaagaaaaaaagcaagtcaagtacgtattcagcattaaagatgaatctcagaagtcatggttcaatgttgacactgtgaggataacaactagagacagcttcatcttactaaagaatttatggtcaagtatatttggacctattatcctcggcaagccaagatgcaaacattttttagctatatttctttagtatacccactgctgtaattttatattaggatactaacttgaaacatggctgcagcctctacttcttcaaaaacatccccccaaaataccagatttaaatatccaaa

SEQ ID NO: 28529 - DNA, 3660 bp, Homo sapiens
  source 1..3660: mol_type = unassigned DNA
tttcagacctgagtcagaactccatcacaggggaacacagccaactgttagacgacggacataagaaagctcgaaatgcttatctcaataattccaattatgaagaaggagatgaatattttgataaaaatttggcactctttgaggaagaaatggacaccagaccgaaggtgtcttccctcctcaaccgcatggccaattacactaatctgactcaaggagcaaaggaacatgaagaggcagaaaacatcactgaagggaaaaagaagcccaccaagacaatgttgactgctatctccatgagtgccattgccactaatggagtggtgccagctgggggctcatactttatgatttcccgggcactgggcccagagtttggtggggctgttggcctctgcttttatcttggtaccacatttgcagcagccatgtacatccttggtgccattgaaatctttctggtctatatcgtcccccgagctgccatctttcacagtgatgacgcactcaaggaatcagcagccatgctaaataacatgcgtgtctacggcacagctttcttggtccttatggtattagtggtatttatcggcgtacgctatgtgaacaagtttgcctcacttttcctggcctgtgtcattgtgtccatcttggccatctatgctggagccatcaagtcttcttttgctcctccacacttcccggtctgcatgctgggtaaccgcaccctttcatcaagacacattgacgtttgctctaagaccaaggaaattaacaacatgacagtcccatcaaagttatggggattcttctgtaactcgagtcaatttttcaatgccacctgtgatgaatactttgttcacaataacgtcacttcaatccagggcattcctggattggctagtggtataattacagagaatctttggagtaattacctacccaagggagagatcatcgaaaagccttcagccaaatcttctgatgtcttaggcagcttaaaccatgaatatgttcttgttgacatcaccacctccttcacgcttctggtgggaatcttctttccctctgttacaggtatcatggctggatcaaacagatctggagatctgaaagatgctcagaagtctattccgattggtactatccttgccatcctgaccacctcctttgtttatttaagcaatgttgtcctttttggtgcatgtattgaaggggttgttctcagagacaagttcggtgatgctgtgaaaggtaatttggtggtaggcaccttatcttggccatccccatgggtgattgttattggctccttcttttcaacatgtggggctggacttcagagcctcacaggtgcaccgaggctgctacaagctattgccaaggataacatcataccgtttctgagggtttttggccacagcaaagccaatggggaacctacctgggctttacttctaactgctgccattgcagagcttggaatactcattgcctccctggatcttgtggccccaattctttccatgttttttctcatgtgttacctctttgtaaacttggcatgtgccttgcaaacattacttcgaacacccaactggagaccccgattccgctactaccattgggccctttctttcatgggaatgagtatctgtctggctctgatgttcatttcttcctggtattatgccattgtagccatggtaatagctggtatgatctacaagtacattgaataccaaggagctgagaaagaatggggtgatggtatccgtgggctgtccctcagtgcagcccggtttgctttgcttcgattggaggaaggacctccacacactaaaaactggaggcctcagttgcttgtattactgaaactagatgaagacttacatgtcaagcatcctcgcctcctcacctttgcctcacagctcaaagcaggaaaaggtctcactattgtgggctctgtcatcgtggggaacttcctagagaactacggtgaagctttagctgctgagcagaccataaagcacctaatggaggcagagaaggtaaaaggattctgccagctggtggtggccgccaagctgagagagggcatttcccacctcatccagtcatgtggccttgggggcatgaagcacaacacggtggtgatgggctggcctaatggctggcgtcaaagcgaagatgcccgcgcttggaagacttttattggcacagttcgagtgacaactgctgcccatcttgcactgctggtggctaaaaacatctccttctttcccagcaatgtggagcaattttctgagggcaacattgatgtgtggtggattgtgcatgatggggggatgcttatgctactaccattcctactgaaacagcacaaggtgtggcgaaagtgcagcatacggatcttcacagtagcccaattagaagacaacagtatccaaatgaagaaggacctagccaccttcctatatcacttacgcattgaggcggaggtagaagtggtggagatgcatgacagtgatatatcagcatatacttacgagcgcactttgatgatggaacaaaggtcccagatgctccggcacatgcggctatccaaaacagagcgagacagagaggcacaattggtgaaagaccgaaactcaatgctacgattgaccagcattggctctgatgaggacgaagagacagaaacctatcaggagaaggtgcacatgacttggacaaaagacaagtacatggcatcccggggacaaaaagcgaagtcaatggaaggattccaggacctgcttaacatgcgtccggaccagtccaatgtgaggcggatgcatacagcagtgaaactcaacgaggttatagttaacaagtcccatgaagcaaagctggttttattgaatatgccagggccaccccgaaaccctgagggtgatgaaaactacatggagttcctagaggtgcttaccgagggactagagcgagtcctacttgtccggggtggtggcagtgaagtgatcaccatttattcataacctactctgaatgaccgtgcttgacctgttttcttaaaaggcctacgtcctccatggaagtgccagctcattactaccactcccactcaactagaagcctgtgttctgtacacatcatactgaactcttgatgagctgagcctcaagtacctgtgtaaaagagctcccatctgatctgcagtcattacagaaaaagcaaatattccctcaacatcagaacaatgctcaagtctttcaagccacgtctgagcagtcaaaggcaaattagaattaacaagctgagccaataaatgaattggtaaaagggatgctagaaattcaactgaagaaaaaaagcaagtcaagtacgtattcagcattaaagatgaatctcagaagtcatggttcaatgttgacactgtgaggataacaactagagacagcttcatcttactaaagaatttatggtcaagtatatttggacctattatcctcggcaagccaagatgcaaacattttttagctatatttctttagtatacccactgctgtaattttatattaggatactaacttgaaacatggctgcagcctctacttcttcaaaaacatccccccaaaataccagatttaaatatcc

SEQ ID NO: 28530 - DNA, 4425 bp, Homo sapiens
  source 1..4425: mol_type = unassigned DNA
agctgcgcgcgcacccgcatcagctggcgccgggatactgcacctgcgacctccttctccctcaccctgctgcccagtcaggccagcctgcgtggccgtctcctcctctactgggaccctgaggaagaacgacgagggggtgacctgcgccggggcgggggtaggggagaacgcgcctccggcaaagggggtggctcgtcctgtcacacgcaggagaaacctagcgagcggaccgtggctcagtggactagctacgacttgccacgactctgagctgcagtccgaggtgtcttgatccgctaacctcctcccagaccccgaggacctttctgctaggagaagagcgggcgcgccacccccaccgacctctcggagacaggaatccgctctgcccctgcatcctcctctgctcacccttctctcagtagtgtttgtcagacaccagtccggacctcagctctcgatctagttcccgagtaagatttagctcccgggaaagcgtgcctgaaacaagccggagtgagcctatgagtgagatgtctggggccaccacttcgctggcaactgttgcactggatccacccagtgaccggacttctcacccccaggatgtcatcgaggacctgagtcagaactccatcacaggggaacacagccaactgttagacgacggacataagaaagctcgaaatgcttatctcaataattccaattatgaagaaggagatgaatattttgataaaaatttggcactctttgaggaagaaatggacaccagaccgaaggtgtcttccctcctcaaccgcatggccaattacactaatctgactcaaggagcaaaggaacatgaagaggcagaaaacatcactgaagggaaaaagaagcccaccaagaccccccaaatgggtaccttcatgggtgtctacctcccatgtctacaaaatatttttggagtgatcctttttttacgccttacatgggtggtgggcacagctggagttcttcaggcttttgcaattgtccttatctgctgctgctgtacaatgttgactgctatctccatgagtgccattgccactaatggagtggtgccagctgggggctcatactttatgatttcccgggcactgggcccagagtttggtggggctgttggcctctgcttttatcttggtaccacatttgcagcagccatgtacatccttggtgccattgaaatctttctggtctatatcgtcccccgagctgccatctttcacagtgatgacgcactcaaggaatcagcagccatgctaaataacatgcgtgtctacggcacagctttcttggtccttatggtattagtggtatttatcggcgtacgctatgtgaacaagtttgcctcacttttcctggcctgtgtcattgtgtccatcttggccatctatgctggagccatcaagtcttcttttgctcctccacacttcccggtctgcatgctgggtaaccgcaccctttcatcaagacacattgacgtttgctctaagaccaaggaaattaacaacatgacagtcccatcaaagttatggggattcttctgtaactcgagtcaatttttcaatgccacctgtgatgaatactttgttcacaataacgtcacttcaatccagggcattcctggattggctagtggtataattacagagaatctttggagtaattacctacccaagggagagatcatcgaaaagccttcagccaaatcttctgatgtcttaggcagcttaaaccatgaatatgttcttgttgacatcaccacctccttcacgcttctggtgggaatcttctttccctctgttacaggtatcatggctggatcaaacagatctggagatctgaaagatgctcagaagtctattccgattggtactatccttgccatcctgaccacctcctttgtttatttaagcaatgttgtcctttttggtgcatgtattgaaggggttgttctcagagacaagttcggtgatgctgtgaaaggtaatttggtggtaggcaccttatcttggccatccccatgggtgattgttattggctccttcttttcaacatgtggggctggacttcagagcctcacaggtgcaccgaggctgctacaagctattgccaaggataacatcataccgtttctgagggtttttggccacagcaaagccaatggggaacctacctgggctttacttctaactgctgccattgcagagcttggaatactcattgcctccctggatcttgtggccccaattctttccatgttttttctcatgtgttacctctttgtaaacttggcatgtgccttgcaaacattacttcgaacacccaactggagaccccgattccgctactaccattgggccctttctttcatgggaatgagtatctgtctggctctgatgttcatttcttcctggtattatgccattgtagccatggtaatagctggtatgatctacaagtacattgaataccaaggagctgagaaagaatggggtgatggtatccgtgggctgtccctcagtgcagcccggtttgctttgcttcgattggaggaaggacctccacacactaaaaactggaggcctcagttgcttgtattactgaaactagatgaagacttacatgtcaagcatcctcgcctcctcacctttgcctcacagctcaaagcaggaaaaggtctcactattgtgggctctgtcatcgtggggaacttcctagagaactacggtgaagctttagctgctgagcagaccataaagcacctaatggaggcagagaaggtaaaaggattctgccagctggtggtggccgccaagctgagagagggcatttcccacctcatccagtcatgtggccttgggggcatgaagcacaacacggtggtgatgggctggcctaatggctggcgtcaaagcgaagatgcccgcgcttggaagacttttattggcacagttcgagtgacaactgctgcccatcttgcactgctggtggctaaaaacatctccttctttcccagcaatgtggagcaattttctgagggcaacattgatgtgtggtggattgtgcatgatggggggatgcttatgctactaccattcctactgaaacagcacaaggtgtggcgaaagtgcagcatacggatcttcacagtagcccaattagaagacaacagtatccaaatgaagaaggacctagccaccttcctatatcacttacgcattgaggcggaggtagaagtggtggagatgcatgacagtgatatatcagcatatacttacgagcgcactttgatgatggaacaaaggtcccagatgctccggcacatgcggctatccaaaacagagcgagacagagaggcacaattggtgaaagaccgaaactcaatgctacgattgaccagcattggctctgatgaggacgaagagacagaaacctatcaggagaaggtgcacatgacttggacaaaagacaagtacatggcatcccggggacaaaaagcgaagtcaatggaaggattccaggacctgcttaacatgcgtccggaccagtccaatgtgaggcggatgcatacagcagtgaaactcaacgaggttatagttaacaagtcccatgaagcaaagctggttttattgaatatgccagggccaccccgaaaccctgagggtgatgaaaactacatggagttcctagaggtgcttaccgagggactagagcgagtcctacttgtccggggtggtggcagtgaagtgatcaccatttattcataacctactctgaatgaccgtgcttgacctgttttcttaaaaggcctacgtcctccatggaagtgccagctcattactaccactcccactcaactagaagcctgtgttctgtacacatcatactgaactcttgatgagctgagcctcaagtacctgtgtaaaagagctcccatctgatctgcagtcattacagaaaaagcaaatattccctcaacatcagaacaatgctcaagtctttcaagccacgtctgagcagtcaaaggcaaattagaattaacaagctgagccaataaatgaattggtaaaagggatgctagaaattcaactgaagaaaaaaagcaagtcaagtacgtattcagcattaaagatgaatctcagaagtcatggttcaatgttgacactgtgaggataacaactagagacagcttcatcttactaaagaatttatggtcaagtatatttggacctattatcctcggcaagccaagatgcaaacattttttagctatatttctttagtatacccactgctgtaattttatattaggatactaacttgaaacatggctgcagcctctacttcttcaaaaacatccccccaaaataccagatttaaatatccaaa

SEQ ID NO: 28531 - DNA, 3866 bp, Homo sapiens
  source 1..3866: mol_type = unassigned DNA
tgcgcgcgcacccgcatcagctggcgccgggatactgcacctgcgacctccttctccctcaccctgctgcccagtcaggccagcctgcgtggccgtctcctcctctactgggaccctgaggaagaacgacgagggggtgacctgcgccggggcgggggtaggggagaacgcgcctccggcaaagggggtggctcgtcctgtcacacgcaggagaaacctagcgagcggaccgtggctcagtggactagctacgacttgccacgactctgagctgcagtccgaggtgtcttgatccgctaacctcctcccagaccccgaggacctttctgctaggagaagagcgggcgcgccacccccaccgacctctcggagacaggaatccgctctgcccctgcatcctcctctgctcacccttctctcagtagtaaaccaccaccaagatggcttcagttcggttcatggtgacaccgacaaagatcgatgacattccaggtttgtcagacaccagtccggacctcagctctcgatctagttcccgagtaagatttagctcccgggaaagcgtgcctgaaacaagccggagtgagcctatgagtgagatgtctggggccaccacttcgctggcaactgttgcactggatccacccagtgaccggacttctcacccccaggatgtcatcgaggacctgagtcagaactccatcacaggggaacacagccaactgttagacgacggacataagaaagctcgaaatgcttatctcaataattccaattatgaagaaggagatgaatattttgataaaaatttggcactctttgaggaagaaatggacaccagaccgaaggtgtcttccctcctcaaccgcatggccaattacactaatctgactcaaggagcaaaggaacatgaagaggcagaaaacatcactgaagggaaaaagaagcccaccaagaccccccaaatgggtaccttcatgggtgtctacctcccatgtctacaaaatatttttggagtgatcctttttttacgccttacatgggtggtgggcacagctggagttcttcaggcttttgcaattgtccttatctgctgctgctgtacaatgttgactgctatctccatgagtgccattgccactaatggagtggtgccagctgggggctcatactttatgatttcccgggcactgggcccagagtttggtggggctgttggcctctgcttttatcttggtaccacatttgcagcagccatgtacatccttggtgccattgaaatctttctggtctatatcgtcccccgagctgccatctttcacagtgatgacgcactcaaggaatcagcagccatgctaaataacatgcgtgtctacggcacagctttcttggtccttatggtattagtggtatttatcggcgtacgctatgtgaacaagtttgcctcacttttcctggcctgtgtcattgtgtccatcttggccatctatgctggagccatcaagtcttcttttgctcctccacacttcccggtctgcatgctgggtaaccgcaccctttcatcaagacacattgacgtttgctctaagaccaaggaaattaacaacatgacagtcccatcaaagttatggggattcttctgtaactcgagtcaatttttcaatgccacctgtgatgaatactttgttcacaataacgtcacttcaatccagggcattcctggattggctagtggtataattacagagaatctttggagtaattacctacccaagggagagatcatcgaaaagccttcagccaaatcttctgatgtcttaggcagcttaaaccatgaatatgttcttgttgacatcaccacctccttcacgcttctggtgggaatcttctttccctctgttacaggtatcatggctggatcaaacagatctggagatctgaaagatgctcagaagtctattccgattggtactatccttgccatcctgaccacctcctttgtttatttaagcaatgttgtcctttttggtgcatgtattgaaggggttgttctcagagacaagttcggtgatgctgtgaaaggtaatttggtggtaggcaccttatcttggccatccccatgggtgattgttattggctccttcttttcaacatgtggggctggacttcagagcctcacaggtgcaccgaggctgctacaagctattgccaaggataacatcataccgtttctgagggtttttggccacagcaaagccaatggggaacctacctgggctttacttctaactgctgccattgcagagcttggaatactcattgcctccctggatcttgtggccccaattctttccatgttttttctcatgtgttacctctttgtaaacttggcatgtgccttgcaaacattacttcgaacacccaactggagaccccgattccgctactaccattgggccctttctttcatgggaatgagtatctgtctggctctgatgttcatttcttcctggtattatgccattgtagccatggtaatagctggtatgatctacaagtacattgaataccaaggagctgagaaagaatggggtgatggtatccgtgggctgtccctcagtgcagcccggtttgctttgcttcgattggaggaaggacctccacacactaaaaactggaggcctcagttgcttgtattactgaaactagatgaagacttacatgtcaagcatcctcgcctcctcacctttgcctcacagctcaaagcaggaaaaggtctcactattgtgggctctgtcatcgtggggaacttcctagagaactacggtgaagctttagctgctgagcagaccataaagcacctaatggaggcagagaaggtaaaaggattctgccagctggtggtggccgccaagctgagagagggcatttcccacctcatccagtcatgtggccttgggggcatgaagcacaacacggtggtgatgggctggcctaatggctggcgtcaaagcgaagatgcccgcgcttggaagacttttattggcacagttcgagtgacaactgctgcccatcttgcactgctggtggctaaaaacatctccttctttcccagcaatgtggagcaattttctgagggcaacattgatgtgtggtggattgtgcatgatggggggatgcttatgctactaccattcctactgaaacagcacaaggtgtggcgaaagtgcagcatacggatcttcacagtagcccaattagaagacaacagtatccaaatgaagaaggacctagccaccttcctatatcacttacgcattgaggcggaggtagaagtggtggagatgcatgacagtgatatatcagcatatacttacgagcgcactttgatgatggaacaaaggtcccagatgctccggcacatgcggctatccaaaacagagcgagacagagaggcacaattggtgaaagaccgaaactcaatgctacgattgaccagcattggctctgatgaggacgaagagacagaaacctatcaggagaaggtgcacatgacttggacaaaagacaagtacatggcatcccggggacaaaaagcgaagtcaatggaaggattccaggacctgcttaacatgcgtccggaccagtccaatgtgaggcggatgcatacagcagtgaaactcaacgaggttatagttaacaagtcccatgaagcaaagctggttttattgaatatgccagggccaccccgaaaccctgagggtgatgaaaactacatggagttcctagaggtgcttaccgagggactagagcgagtcctacttgtccggggtggtggcagtgaagtgatcaccatttattcataa

SEQ ID NO: 28532 - DNA, 3725 bp, Homo sapiens
  source 1..3725: mol_type = unassigned DNA
actcggtcaccgcgggctgcggcggctgggcggggctttcgggcgcccgcgggacggttccgccctctcactgcacccccgggcttctcttcgcaagaacaaaatgcatcctccagaaaccaccaccaagatggcttcagttcggttcatggtgacaccgacaaagatcgatgacattccaggtttgtcagacaccagtccggacctcagctctcgatctagttcccgagtaagatttagctcccgggaaagcgtgcctgaaacaagccggagtgagcctatgagtgagatgtctggggccaccacttcgctggcaactgttgcactggatccacccagtgaccggacttctcacccccaggatgtcatcgaggacctgagtcagaactccatcacaggggaacacagccaactgttagacgacggacataagaaagctcgaaatgcttatctcaataattccaattatgaagaaggagatgaatattttgataaaaatttggcactctttgaggaagaaatggacaccagaccgaaggtgtcttccctcctcaaccgcatggccaattacactaatctgactcaaggagcaaaggaacatgaagaggcagaaaacatcactgaagggaaaaagaagcccaccaagaccccccaaatgggtaccttcatgggtgtctacctcccatgtctacaaaatatttttggagtgatcctttttttacgccttacatgggtggtgggcacagctggagttcttcaggcttttgcaattgtccttatctgctgctgctgtacaatgttgactgctatctccatgagtgccattgccactaatggagtggtgccagctgggggctcatactttatgatttcccgggcactgggcccagagtttggtggggctgttggcctctgcttttatcttggtaccacatttgcagcagccatgtacatccttggtgccattgaaatctttctggtctatatcgtcccccgagctgccatctttcacagtgatgacgcactcaaggaatcagcagccatgctaaataacatgcgtgtctacggcacagctttcttggtccttatggtattagtggtatttatcggcgtacgctatgtgaacaagtttgcctcacttttcctggcctgtgtcattgtgtccatcttggccatctatgctggagccatcaagtcttcttttgctcctccacacttcccggtctgcatgctgggtaaccgcaccctttcatcaagacacattgacgtttgctctaagaccaaggaaattaacaacatgacagtcccatcaaagttatggggattcttctgtaactcgagtcaatttttcaatgccacctgtgatgaatactttgttcacaataacgtcacttcaatccagggcattcctggattggctagtggtataattacagagaatctttggagtaattacctacccaagggagagatcatcgaaaagccttcagccaaatcttctgatgtcttaggcagcttaaaccatgaatatgttcttgttgacatcaccacctccttcacgcttctggtgggaatcttctttccctctgttacaggtatcatggctggatcaaacagatctggagatctgaaagatgctcagaagtctattccgattggtactatccttgccatcctgaccacctcctttgtttatttaagcaatgttgtcctttttggtgcatgtattgaaggggttgttctcagagacaagttcggtgatgctgtgaaaggtaatttggtggtaggcaccttatcttggccatccccatgggtgattgttattggctccttcttttcaacatgtggggctggacttcagagcctcacaggtgcaccgaggctgctacaagctattgccaaggataacatcataccgtttctgagggtttttggccacagcaaagccaatggggaacctacctgggctttacttctaactgctgccattgcagagcttggaatactcattgcctccctggatcttgtggccccaattctttccatgttttttctcatgtgttacctctttgtaaacttggcatgtgccttgcaaacattacttcgaacacccaactggagaccccgattccgctactaccattgggccctttctttcatgggaatgagtatctgtctggctctgatgttcatttcttcctggtattatgccattgtagccatggtaatagctggtatgatctacaagtacattgaataccaaggagctgagaaagaatggggtgatggtatccgtgggctgtccctcagtgcagcccggtttgctttgcttcgattggaggaaggacctccacacactaaaaactggaggcctcagttgcttgtattactgaaactagatgaagacttacatgtcaagcatcctcgcctcctcacctttgcctcacagctcaaagcaggaaaaggtctcactattgtgggctctgtcatcgtggggaacttcctagagaactacggtgaagctttagctgctgagcagaccataaagcacctaatggaggcagagaaggtaaaaggattctgccagctggtggtggccgccaagctgagagagggcatttcccacctcatccagtcatgtggccttgggggcatgaagcacaacacggtggtgatgggctggcctaatggctggcgtcaaagcgaagatgcccgcgcttggaagacttttattggcacagttcgagtgacaactgctgcccatcttgcactgctggtggctaaaaacatctccttctttcccagcaatgtggagcaattttctgagggcaacattgatgtgtggtggattgtgcatgatggggggatgcttatgctactaccattcctactgaaacagcacaaggtgtggcgaaagtgcagcatacggatcttcacagtagcccaattagaagacaacagtatccaaatgaagaaggacctagccaccttcctatatcacttacgcattgaggcggaggtagaagtggtggagatgcatgacagtgatatatcagcatatacttacgagcgcactttgatgatggaacaaaggtcccagatgctccggcacatgcggctatccaaaacagagcgagacagagaggcacaattggtgaaagaccgaaactcaatgctacgattgaccagcattggctctgatgaggacgaagagacagaaacctatcaggagaaggtgcacatgacttggacaaaagacaagtacatggcatcccggggacaaaaagcgaagtcaatggaaggattccaggacctgcttaacatgcgtccggaccagtccaatgtgaggcggatgcatacagcagtgaaactcaacgaggttatagttaacaagtcccatgaagcaaagctggttttattgaatatgccagggccaccccgaaaccctgagggtgatgaaaactacatggagttcctagaggtgcttaccgagggactagagcgagtcctacttgtccggggtggtggcagtgaagtgatcaccatttattcataacctactctgaatgaccgtgcttgacctgttttcttaaaaggcctacgtcctccatggaagtgccagctcattactaccactcccactcaactagaagcctgtgttctgtacacatcatactgaactcttgatgagctgagcctcaagtacctgtgtaaaagagctccca

SEQ ID NO: 28533 - DNA, 548 bp, Homo sapiens
  source 1..548: mol_type = unassigned DNA
atcagctggcgccgggatactgcacctgcgacctccttctccctcaccctgctgcccagtcaggccagcctgcgtggccgtctcctcctctactgggaccctgaggaagaacgacgagggggtgacctgcgccggggcgggggtaggggagaacgcgcctccggcaaagggggtggctcgtcctgtcacacgcaggagaaacctagcgagcggaccgtggctcagtggactagctacgacttgccacgactctgagctgcagtccgaggtttgtcagacaccagtccggacctcagctctcgatctagttcccgagtaagatttagctcccgggaaagcgtgcctgaaacaagccggagtgagcctatgagtgagatgtctggggccaccacttcgctggcaactgttgcactggatccacccagtgaccggacttctcacccccaggatgtcatcgaggacctgagtcagaactccatcacaggggaacacagccaactgttagacgacggacataagaaagctcgaaatgcttatctcaataattc

SEQ ID NO: 28534 - DNA, 3744 bp, Homo sapiens
  source 1..3744: mol_type = unassigned DNA
agttacctagcaaacaatcttcatgttaagactgagctcaaataccacttcttccttaatggtccctgtgatcactccaggaaatgtaatacctgagtcagaactccatcacaggggaacacagccaactgttagacgacggacataagaaagctcgaaatgcttatctcaataattccaattatgaagaaggagatgaatattttgataaaaatttggcactctttgaggaagaaatggacaccagaccgaaggtgtcttccctcctcaaccgcatggccaattacactaatctgactcaaggagcaaaggaacatgaagaggcagaaaacatcactgaagggaaaaagaagcccaccaagacaatgttgactgctatctccatgagtgccattgccactaatggagtggtgccagctgggggctcatactttatgatttcccgggcactgggcccagagtttggtggggctgttggcctctgcttttatcttggtaccacatttgcagcagccatgtacatccttggtgccattgaaatctttctggtctatatcgtcccccgagctgccatctttcacagtgatgacgcactcaaggaatcagcagccatgctaaataacatgcgtgtctacggcacagctttcttggtccttatggtattagtggtatttatcggcgtacgctatgtgaacaagtttgcctcacttttcctggcctgtgtcattgtgtccatcttggccatctatgctggagccatcaagtcttcttttgctcctccacacttcccggtctgcatgctgggtaaccgcaccctttcatcaagacacattgacgtttgctctaagaccaaggaaattaacaacatgacagtcccatcaaagttatggggattcttctgtaactcgagtcaatttttcaatgccacctgtgatgaatactttgttcacaataacgtcacttcaatccagggcattcctggattggctagtggtataattacagagaatctttggagtaattacctacccaagggagagatcatcgaaaagccttcagccaaatcttctgatgtcttaggcagcttaaaccatgaatatgttcttgttgacatcaccacctccttcacgcttctggtgggaatcttctttccctctgttacaggtatcatggctggatcaaacagatctggagatctgaaagatgctcagaagtctattccgattggtactatccttgccatcctgaccacctcctttgtttatttaagcaatgttgtcctttttggtgcatgtattgaaggggttgttctcagagacaagttcggtgatgctgtgaaaggtaatttggtggtaggcaccttatcttggccatccccatgggtgattgttattggctccttcttttcaacatgtggggctggacttcagagcctcacaggtgcaccgaggctgctacaagctattgccaaggataacatcataccgtttctgagggtttttggccacagcaaagccaatggggaacctacctgggctttacttctaactgctgccattgcagagcttggaatactcattgcctccctggatcttgtggccccaattctttccatgttttttctcatgtgttacctctttgtaaacttggcatgtgccttgcaaacattacttcgaacacccaactggagaccccgattccgctactaccattgggccctttctttcatgggaatgagtatctgtctggctctgatgttcatttcttcctggtattatgccattgtagccatggtaatagctggtatgatctacaagtacattgaataccaaggagctgagaaagaatggggtgatggtatccgtgggctgtccctcagtgcagcccggtttgctttgcttcgattggaggaaggacctccacacactaaaaactggaggcctcagttgcttgtattactgaaactagatgaagacttacatgtcaagcatcctcgcctcctcacctttgcctcacagctcaaagcaggaaaaggtctcactattgtgggctctgtcatcgtggggaacttcctagagaactacggtgaagctttagctgctgagcagaccataaagcacctaatggaggcagagaaggtaaaaggattctgccagctggtggtggccgccaagctgagagagggcatttcccacctcatccagtcatgtggccttgggggcatgaagcacaacacggtggtgatgggctggcctaatggctggcgtcaaagcgaagatgcccgcgcttggaagacttttattggcacagttcgagtgacaactgctgcccatcttgcactgctggtggctaaaaacatctccttctttcccagcaatgtggagcaattttctgagggcaacattgatgtgtggtggattgtgcatgatggggggatgcttatgctactaccattcctactgaaacagcacaaggtgtggcgaaagtgcagcatacggatcttcacagtagcccaattagaagacaacagtatccaaatgaagaaggacctagccaccttcctatatcacttacgcattgaggcggaggtagaagtggtggagatgcatgacagtgatatatcagcatatacttacgagcgcactttgatgatggaacaaaggtcccagatgctccggcacatgcggctatccaaaacagagcgagacagagaggcacaattggtgaaagaccgaaactcaatgctacgattgaccagcattggctctgatgaggacgaagagacagaaacctatcaggagaaggtgcacatgacttggacaaaagacaagtacatggcatcccggggacaaaaagcgaagtcaatggaaggattccaggacctgcttaacatgcgtccggaccagtccaatgtgaggcggatgcatacagcagtgaaactcaacgaggttatagttaacaagtcccatgaagcaaagctggttttattgaatatgccagggccaccccgaaaccctgagggtgatgaaaactacatggagttcctagaggtgcttaccgagggactagagcgagtcctacttgtccggggtggtggcagtgaagtgatcaccatttattcataacctactctgaatgaccgtgcttgacctgttttcttaaaaggcctacgtcctccatggaagtgccagctcattactaccactcccactcaactagaagcctgtgttctgtacacatcatactgaactcttgatgagctgagcctcaagtacctgtgtaaaagagctcccatctgatctgcagtcattacagaaaaagcaaatattccctcaacatcagaacaatgctcaagtctttcaagccacgtctgagcagtcaaaggcaaattagaattaacaagctgagccaataaatgaattggtaaaagggatgctagaaattcaactgaagaaaaaaagcaagtcaagtacgtattcagcattaaagatgaatctcagaagtcatggttcaatgttgacactgtgaggataacaactagagacagcttcatcttactaaagaatttatggtcaagtatatttggacctattatcctcggcaagccaagatgcaaacattttttagctatatttctttagtatacccactgctgtaattttatattaggatactaacttgaaacatggctgcagcctctacttcttcaaaaacatccccccaaaataccagatttaaatatcc

SEQ ID NO: 28535 - DNA, 4239 bp, Homo sapiens
  source 1..4239: mol_type = unassigned DNA
tgagtagaagtattcttagttggggctttttgtgtggtgtgaatcaaggttattgaaatgtgttatttttcaagttatcttttgtattgcagtcaaaagtagctagcgtaagaggaagattttgcgaggttccccccactttttttgttcttaaaaagaacaaaatgcatcctccagaaaccaccaccaagatggcttcagttcggttcatggtgacaccgacaaagatcgatgacattccaggtttgtcagacaccagtccggacctcagctctcgatctagttcccgagtaagatttagctcccgggaaagcgtgcctgaaacaagccggagtgagcctatgagtgagatgtctggggccaccacttcgctggcaactgttgcactggatccacccagtgaccggacttctcacccccaggatgtcatcgaggacctgagtcagaactccatcacaggggaacacagccaactgttagacgacggacataagaaagctcgaaatgcttatctcaataattccaattatgaagaaggagatgaatattttgataaaaatttggcactctttgaggaagaaatggacaccagaccgaaggtgtcttccctcctcaaccgcatggccaattacactaatctgactcaaggagcaaaggaacatgaagaggcagaaaacatcactgaagggaaaaagaagcccaccaagaccccccaaatgggtaccttcatgggtgtctacctcccatgtctacaaaatatttttggagtgatcctttttttacgccttacatgggtggtgggcacagctggagttcttcaggcttttgcaattgtccttatctgctgctgctgtacaatgttgactgctatctccatgagtgccattgccactaatggagtggtgccagctgggggctcatactttatgatttcccgggcactgggcccagagtttggtggggctgttggcctctgcttttatcttggtaccacatttgcagcagccatgtacatccttggtgccattgaaatctttctggtctatatcgtcccccgagctgccatctttcacagtgatgacgcactcaaggaatcagcagccatgctaaataacatgcgtgtctacggcacagctttcttggtccttatggtattagtggtatttatcggcgtacgctatgtgaacaagtttgcctcacttttcctggcctgtgtcattgtgtccatcttggccatctatgctggagccatcaagtcttcttttgctcctccacacttcccggtctgcatgctgggtaaccgcaccctttcatcaagacacattgacgtttgctctaagaccaaggaaattaacaacatgacagtcccatcaaagttatggggattcttctgtaactcgagtcaatttttcaatgccacctgtgatgaatactttgttcacaataacgtcacttcaatccagggcattcctggattggctagtggtataattacagagaatctttggagtaattacctacccaagggagagatcatcgaaaagccttcagccaaatcttctgatgtcttaggcagcttaaaccatgaatatgttcttgttgacatcaccacctccttcacgcttctggtgggaatcttctttccctctgttacaggtatcatggctggatcaaacagatctggagatctgaaagatgctcagaagtctattccgattggtactatccttgccatcctgaccacctcctttgtttatttaagcaatgttgtcctttttggtgcatgtattgaaggggttgttctcagagacaagttcggtgatgctgtgaaaggtaatttggtggtaggcaccttatcttggccatccccatgggtgattgttattggctccttcttttcaacatgtggggctggacttcagagcctcacaggtgcaccgaggctgctacaagctattgccaaggataacatcataccgtttctgagggtttttggccacagcaaagccaatggggaacctacctgggctttacttctaactgctgccattgcagagcttggaatactcattgcctccctggatcttgtggccccaattctttccatgttttttctcatgtgttacctctttgtaaacttggcatgtgccttgcaaacattacttcgaacacccaactggagaccccgattccgctactaccattgggccctttctttcatgggaatgagtatctgtctggctctgatgttcatttcttcctggtattatgccattgtagccatggtaatagctggtatgatctacaagtacattgaataccaaggagctgagaaagaatggggtgatggtatccgtgggctgtccctcagtgcagcccggtttgctttgcttcgattggaggaaggacctccacacactaaaaactggaggcctcagttgcttgtattactgaaactagatgaagacttacatgtcaagcatcctcgcctcctcacctttgcctcacagctcaaagcaggaaaaggtctcactattgtgggctctgtcatcgtggggaacttcctagagaactacggtgaagctttagctgctgagcagaccataaagcacctaatggaggcagagaaggtaaaaggattctgccagctggtggtggccgccaagctgagagagggcatttcccacctcatccagtcatgtggccttgggggcatgaagcacaacacggtggtgatgggctggcctaatggctggcgtcaaagcgaagatgcccgcgcttggaagacttttattggcacagttcgagtgacaactgctgcccatcttgcactgctggtggctaaaaacatctccttctttcccagcaatgtggagcaattttctgagggcaacattgatgtgtggtggattgtgcatgatggggggatgcttatgctactaccattcctactgaaacagcacaaggtgtggcgaaagtgcagcatacggatcttcacagtagcccaattagaagacaacagtatccaaatgaagaaggacctagccaccttcctatatcacttacgcattgaggcggaggtagaagtggtggagatgcatgacagtgatatatcagcatatacttacgagcgcactttgatgatggaacaaaggtcccagatgctccggcacatgcggctatccaaaacagagcgagacagagaggcacaattggtgaaagaccgaaactcaatgctacgattgaccagcattggctctgatgaggacgaagagacagaaacctatcaggagaaggtgcacatgacttggacaaaagacaagtacatggcatcccggggacaaaaagcgaagtcaatggaaggattccaggacctgcttaacatgcgtccggaccagtccaatgtgaggcggatgcatacagcagtgaaactcaacgaggttatagttaacaagtcccatgaagcaaagctggttttattgaatatgccagggccaccccgaaaccctgagggtgatgaaaactacatggagttcctagaggtgcttaccgagggactagagcgagtcctacttgtccggggtggtggcagtgaagtgatcaccatttattcataacctactctgaatgaccgtgcttgacctgttttcttaaaaggcctacgtcctccatggaagtgccagctcattactaccactcccactcaactagaagcctgtgttctgtacacatcatactgaactcttgatgagctgagcctcaagtacctgtgtaaaagagctcccatctgatctgcagtcattacagaaaaagcaaatattccctcaacatcagaacaatgctcaagtctttcaagccacgtctgagcagtcaaaggcaaattagaattaacaagctgagccaataaatgaattggtaaaagggatgctagaaattcaactgaagaaaaaaagcaagtcaagtacgtattcagcattaaagatgaatctcagaagtcatggttcaatgttgacactgtgaggataacaactagagacagcttcatcttactaaagaatttatggtcaagtatatttggacctattatcctcggcaagccaagatgcaaacattttttagctatatttctttagtatacccactgctgtaattttatattaggatactaacttgaaacatggctgcagcctctacttcttcaaaaacatccccccaaaataccagatttaaatatccaaa

SEQ ID NO: 28536 - DNA, 567 bp, Homo sapiens
  source 1..567: mol_type = unassigned DNA
actcggtcaccgcgggctgcggcggctgggcggggctttcgggcgcccgcgggacggttccgccctctcactgcacccccgggcttctcttcgcaagaaaccaccaccaagatggcttcagttcggttcatggtgacaccgacaaagatcgatgacattccaggtttgtcagacaccagtccggacctcagctctcgatctagttcccgagtaagatttagctcccgggaaagcgtgcctgaaacaagccggagtgagcctatgagtgagatgtctggggccaccacttcgctggcaactgttgcactggatccacccagtgaccggacttctcacccccaggatgtcatcgaggacctgagtcagaactccatcacaggggaacacagccaactgttagacgacggacataagaaagctcgaaatgcttatctcaataattccaattatgaagaaggagatgaatattttgataaaaatttggcactctttgaggaagaaatggacaccagaccgaaggtgtcttccctcctcaaccgcatggccaattacactaatctgactcaa

SEQ ID NO: 28537 - DNA, 5272 bp, Homo sapiens
  source 1..5272: mol_type = unassigned DNA
agcgcgggccgggccgggacggggactgtcggctgcaggcggccatgcccaccaacttcaccgtggtgcccgtggaggctcacgccgacggcggcggggacgagactgccgagcggacggaggctccgggcacccccgagggccccgagcccgagcgccccagcccgggagatggaaatccaagagaaaacagcccattcctcaacaatgtcgaggtggaacaagagagcttctttgaagggaagaacatggcacttttcgaggaggagatggacagtaaccccatggtgtcctcgctgctcaacaagctggccaactacaccaacctgagccagggcgtggtggagcacgaggaggacgaggagagccggcggcgggaggccaaggctccgcgcatgggcaccttcatcggcgtctacctgccgtgcctgcagaacatcctgggcgtcatcctcttcctgcgcctgacgtggatcgtgggggtggctggtgtcctggagtccttcctcatcgtggccatgtgctgcacatgtacaatgctgaccgccatttccatgagtgcgatcgctaccaacggtgtggtcccagctggcgggtcctactacatgatatcgcgctcgctgggacccgagtttggaggcgctgtcggcctctgcttctacctgggcacgacgtttgcaggggccatgtatattttggggaccatcgagatttttctgacgtacatctccccgggtgcggccatcttccaggcggaggctgcaggtggcgaggcggccgccatgctgcacaacatgcgtgtgtacggcacgtgcacgctcgtgctcatggccctggtggtcttcgtgggcgtcaagtatgtcaacaagctggcgctggtcttcctggcctgcgtcgtgctgtccatcctggccatctatgccggcgtcatcaagtctgccttcgaccccccggacatcccggtctgcctcctggggaaccgcacgctgtcacggcgcagcttcgatgcctgcgtcaaggcctacggcatccacaacaactcagccacctccgcgctctggggcctcttctgcaacggctcccagcccagcgccgcctgtgacgagtacttcatccagaacaacgtcaccgaaatccagggcatcccgggcgcggccagtggtgtcttcctggagaacctgtggagtacgtacgcgcacgcgggggcgtttgtggagaagaaaggtgtgccctcggtgcccgtggcagaggagagccgtgccagcgcactgccctacgtgctcaccgacatcgcggcctccttcaccctgctggttggcatctacttcccttccgtgaccggtatcatggcgggttcaaaccggtccggggacctcaaggatgcacagaagtccatccccacggggaccatcctggccatagtgacgacgtctttcatctatctctcctgcattgtgctgtttggggcctgcattgaaggcgtggtcttacgagataagttcggggaggccctgcaggggaacctggtcatcggcatgctggcctggccctccccctgggtcatcgtcatcggctccttcttctccacctgcggtgccggcctgcagagcctcacgggggcaccgcgcctactgcaggccattgcccgtgacggcatcgtccccttcctgcaggtgtttggccacgggaaggccaacggggagcccacgtgggcgctgctgctgacagtcctcatctgcgagactggcatcctcatcgcctctctggacagcgtggccccgatcctctccatgttcttcctcatgtgctacctgttcgtgaacctggcctgcgccgtgcagaccctgctacgtacccccaactggcgtccacgcttcaagttctaccactggaccctgtcctttctgggtatgagcctgtgcctggcgctgatgttcatctgctcctggtactacgcgctgtccgccatgctcatcgctggctgcatctacaagtacatcgagtaccgcggggccgagaaggagtggggcgatggcatccgtggcctatccctgaacgccgcccgctacgccctgctgcgcgtggagcacggtcccccccacaccaagaactggaggccccaggtgctggtgatgctgaacctggacgcggagcaggccgtgaagcacccccgcctgctgtccttcacgtcgcagctgaaggccggcaagggcctgaccatcgtgggctcggtgctggaggggacgtacctggacaagcacatggaggctcagcgggccgaggagaacatacggtccctaatgagcacagagaagaccaagggcttctgccagctggtggtctcgtccagcctgcgggatggcatgtcccacctgatccagtcggccggcctgggcggcctgaagcacaacacggtgctcatggcctggcccgcatcctggaagcaggaggacaaccccttctcctggaagaactttgtggacaccgtccgcgacaccaccgccgcgcaccaggctctgctggtggccaagaacgtcgactcgtttccgcaaaaccaggagcgcttcggcgggggccacatcgacgtgtggtggatcgtgcacgacggcggcatgctcatgctgctgcccttcctgctgcgccagcacaaggtgtggaggaagtgccggatgcgtatcttcaccgtggcccaggtggacgacaacagcatccagatgaagaaggacctgcagatgttcttgtaccacttgcgcatcagcgccgaggtggaggtggtggagatggttgaaaacgacatatctgctttcacctacgagaggacactaatgatggagcagaggtcgcagatgctgaagcagatgcagctgtccaagaacgagcaggagcgagaggcccagctgatccacgacaggaacaccgcgtcccacaccgcggcggcagccaggacccaagcgccgcctacgccagacaaggtgcagatgacctggaccagggagaagctgatcgctgagaagtacaggagcagagacaccagcctatctggtttcaaagacctcttcagcatgaagccggaccagtccaacgtcaggcggatgcacacggctgtgaagctcaatggcgtcgtcctcaacaagtcccaggatgcgcagctggtcctgctcaacatgccaggtcctcccaaaaaccggcagggagacgagaactacatggagtttcttgaagtcctgaccgaggggctgaacagagtcctcctggtcaggggtggcggccgggaggtgatcaccatctactcctaatgcccaacagcatcacggcactctgggacaggcacggaggacggcgtgggcagcctgggcctgggcttggcccagggaaacagacggcagacacacctgtcccccagtgatgccgcccaagctgcccatggggcttcctacggaagtttctaggcccgtcacctagggctctcctgttcagccttaacaggctcagcaaatcagggcgtggctggacgatttccttgcatctgagggcagacgctgctaccggagtgacctggacgtggccagatcttctcgcaggtcacaagaagccagtgagcccttgccttggtttctggaagttcttttccttggctggatttacccagtggttaggttgcatttctaccccatccagaacattcttggaagagcacccggagctgaagctgtccctgatgatgaaggtgaaacgtcagccctggccatggctccgctcagggccccggtcacctccgagtcactctgttccttgactgtctttgtgtttctgtacctcaaggcactgaagctggaggactctgtccatgcccgtgtcaccctcgtgtgggagcctctgggctcggcaggtccacatttcatgagctgaggcgtgggccagggccatctggaaagggaactcggcttttccagaacgtggtggatcatctgtcgggtgtgtggtgaacacgttcagttcatcagggcctacgctccgggaaggggcccccagctgtggctctgccatgccgggctgtgtttgcagctgtccgagtctccatccacctttagaaaaccagccacttcttttcataagcactgacagggcccagcccacagccacaggtgcgatcagtgcctcacgcaggcaaatgcactgaaacccaggggcacacgcgcgcagagtgaacagtgagttcccccgacagcccacgacagccaggactgccctccccaccccaccccaccccaggagcacggcacacagttcagcctctgagctggctcacacgtgccatccccaccccggtgctccagggaaggaggacacggacccgacgtgggaggtcctcaggcagcagtggcgcctggtgtcaggtctgtctggctgagtcccgggcgtcccctgccatggcctgtgccttgcatggaggcggcggtggcactgaagagatagctttcaagggcccaacactttgcacttcggctggctgtgagtttctgctttgtaggttgtggtcacatttgcaggctgcgggcagtggcaccgacttgggcctccctttctatgtggcatatttatttatttaaacaccccagggagttacgtggtaacaaggttgtccataaagaggttgcttctatatactagaggccccagatggccaggccttgggctacgtctggcttgcatggtctcccaagggaatcagccccatcaacaaagttcaaatcggggcagaggctgcacttgtgcccccagatgtttctgaggagccagactagggctggcattgctgtagagtgacggctgctgcccagagcgtgtcccagacatcacagcggggctcagcagttcccacagcctctgcctgccttggctaagcatgagttaagcagcaaaacgctcctccatgtctggatggggccggcaggtcctgtgtcccctgcacctggaggagagcaggctagaggcacagcggccacatggtgctggctctgaacgttggttggtggctggaaaacagccctgcttctgagggccgctcagttctgcacacgaaaccacctcctgagggctcagctctgcccccgccctgggctgcagcctctgcacgcaagcaccaggcatcctttgtgttgtcaactccgtgtaaccagtaactacagccatttacaattgactccgtttccttttgtaggtttccctgtctgtctgtgttagtagaaaaataaaatcctatgaaatctga

SEQ ID NO: 28538 - DNA, 867 bp, Homo sapiens
  source 1..867: mol_type = unassigned DNA
gtggcgtcggcgggagcggcgcagcgcgggccgggccgggacggggactgtcggctgcaggcggccatgcccaccaacttcaccgtggtgcccgtggaggctcacgccgacggcggcggggacgagactgccgagcggacggaggctccgggcacccccgagggccccgagcccgagcgccccagcccgggagatggaaatccaagagaaaacagcccattcctcaacaatgtcgaggtggaacaagagagcttctttgaagggaagaacatggcacttttcgaggaggagatggacagtaaccccatggtgtcctcgctgctcaacaagctggccaactacaccaacctgagccagggcgtggtggagcacgaggaggacgaggagagccggcggcgggaggccaaggctccgcgcatgggcaccttcatcggcgtctacctgccgtgcctgcagaacatcctgggcgtcatcctcttcctgcgcctgacgtggatcgtgggggtggctggtgtcctggagtccttcctcatcgtggccatgtgctgcacatgtacaatgctgaccgccatttccatgagtgcgatcgctaccaacggtgtggtcccagctggcgggtcctactacatgatatcgcgctcgctgggacccgagtttggaggcgctgtcggcctctgcttctacctgggcacgacgtttgcaggggccatgtatattttggggaccatcgagatttttctgacaggcacggaggacggcgtgggcagcctgggcctgggcttggcccagggaaacagacggcagacacacctgtcccccagtgatgccgcccaagctgcccatggggcttcctacggaagtttctag

SEQ ID NO: 28539 - DNA, 4208 bp, Homo sapiens
  source 1..4208: mol_type = unassigned DNA
cccctccctggacacccaggcgacaatggcagaactgcccacaacagagacgcctggggacgccactttgtgcagcgggcgcttcaccatcagcacactgctgagcagtgatgagccctctccaccagctgcctatgacagcagccaccccagccacctgacccacagcagcaccttctgcatgcgcacctttggctacaacacgatcgatgtggtgcccacatatgagcactatgccaacagcacccagcctggtgagccccggaaggtccggcccacactggctgacctgcactccttcctcaagcaggaaggcagacacctgcatgccctggcctttgacagccggcccagccacgagatgactgatgggctggtggagggcgaggcaggcaccagcagcgagaagaaccccgaggagccagtgcgcttcggctgggtcaagggggtgatgattcgttgcatgctcaacatttggggcgtgatcctctacctgcggctgccctggattacggcccaggcaggcatcgtcctgacctggatcatcatcctgctgtcggtcacggtgacctccatcacaggcctctccatctcagccatctccaccaatggcaaggtcaagtcaggtggcacctacttcctcatctcccggagtctgggcccagagcttgggggctccatcggcctcattttcgctttcgccaatgccgtgggtgtggccatgcacacggtgggctttgcagagaccgtgcgggacctgctccaggagtatggggcacccatcgtggaccccattaacgacatccgcatcattgccgtggtctcggtcactgtgctgctggccatctccctggctggcatggagtgggagtccaaggcccaggtgctgttcttccttgtcatcatggtctcctttgccaactatttagtggggacgctgatccccccatctgaggacaaggcctccaaaggcttcttcagctaccgggcggacatttttgtccagaacttggtgcctgactggcggggtccagatggcaccttcttcggaatgttctccatcttcttcccctcggccacaggcatcctggcaggggccaacatatctggtgacctcaaggaccctgctatagccatccccaaggggaccctcatggccattttctggacgaccatttcctacctggccatctcagccaccattggctcctgcgtggtgcgtgatgcctctggggtcctgaatgacacagtgacccctggctggggtgcctgcgaggggctggcctgcagctatggctggaacttcaccgagtgcacccagcagcacagctgccactacggcctcatcaactattaccagaccatgagcatggtgtcaggcttcgcgcccctgatcacggctggcatcttcggggccaccctctcctctgccctggcctgccttgtctctgctgccaaagtcttccagtgcctttgcgaggaccagctgtacccactgatcggcttcttcggcaaaggctatggcaagaacaaggagcccgtgcgtggctacctgctggcctacgccatcgctgtggccttcatcatcatcgctgagctcaacaccatagcccccatcatttccaacttcttcctctgctcctatgccctcatcaacttcagctgcttccacgcctccatcaccaactcgcctgggtggagaccttcattccaatactacaacaagtgggcggcgctgtttggggctatcatctccgtggtcatcatgttcctcctcacctggtgggcggccctcatcgccattggcgtggtgctcttcctcctgctctatgtcatctacaagaagccagaggtaaattggggctcctcggtacaggctggctcctacaacctggccctcagctactcggtgggcctcaatgaggtggaagaccacatcaagaactaccgcccccagtgcctggtgctcacggggccccccaacttccgcccggccctggtggactttgtgggcaccttcacccggaacctcagcctgatgatctgtggccacgtgctcatcggaccccacaagcagaggatgcctgagctccagctcatcgccaacgggcacaccaagtggctgaacaagaggaagatcaaggccttctactcggatgtcattgccgaggacctccgcagaggcgtccagatcctcatgcaggccgcaggtctcgggagaatgaagcccaacattctggtggttgggttcaagaagaactggcagtcggctcacccggccacagtggaagactacattggcatcctccatgatgcctttgatttcaactatggcgtgtgtgtcatgaggatgcgggagggactcaacgtgtccaagatgatgcaggcgcacattaaccccgtgtttgacccagcggaggacgggaaggaagccagcgccagagtggaccccaaggccctggtgaaggaggagcaggccaccaccatcttccagtcggagcagggcaagaagaccatagacatctactggctctttgacgatggaggcctcaccctcctcattccctatctccttggccgcaagaggaggtggagcaaatgcaagatccgtgtgttcgtaggcggccagattaacaggatggaccaggagagaaaggcgatcatttctctgctgagcaagttccgactgggattccatgaagtccacatcctccctgacatcaaccagaaccctcgggctgagcacaccaagaggtttgaggacatgattgcacccttccgtctgaatgatggcttcaaggatgaggccactgtcaacgagatgcggcgggactgcccctggaagatctcagatgaggagattacgaagaacagagtcaagtcccttcggcaggtgaggctgaatgagattgtgctggattactcccgagacgctgctctcatcgtcatcactttgcccatagggaggaaggggaagtgccccagctcgctgtacatggcctggctggagaccctgtcccaggacctcagacctccagtcatcctgatccgaggaaaccaggaaaacgtgctcaccttttactgccagtaactccaggctttgacatccctgtccacagctctgagtgtgtgggataagttggaacttgattgcctctagtccacagggatgagactcatgttctgttgcactttaagtggcagcatctgatgatctcaccgaaaaagatggtagatttccaaatctggctggactccacttccatgggacacattccctgggtcttgtgtttataggctagagaaatagcagatggagctgcaaggaaaactctctaaagcatcctattccttttaaaggatttcttttgattttgatgaccattaattaagagttcagtctttgatttgtatgcaaattggagtcccaatgctgggcgtgaatcttgacagtttctacagaccttcctgggtgaaagttcctaaatcatgccctgcttcctccaataggagaatgggagcctcacctgtaggacctacaggctctctaaggaatgcaggtctctctctgagcctccacagccaggcaaatacatatatatatattttttttttagatgaagttttttctcttgttgcccaggctagggtgtaatggcatgatctcaggtcactgcaacctcctcccgggttcaagcatttcttctgtctcagcctcccgaatagctgggattacaggcacctgccatcacacgagctaatttttgtatttttagtagagatggggtttcaccatgttgaccaggctggtgttgagctcctgacctcaggtgatccacccacctcggtctcccaaagtgctggggttacaggcctgagccactgcgcccggcccaggcaaatttcttgaaccacttctcactcccgtcactttcaataaggggtctttgatgtcttcactggttctttggacgagggacttttcgaacttttttggttgcaacacacagtaagaaatatacttcacactgagacttgcagcgcacacacacggaaacgaccaaaacaaaaatgtcacaaaacaatacttacccttccctgggggacgtcctccagtatgttctgttctgtttatttttcactgttggttgcaatccaataaaatgactttgggatccactcatgggtggggacccacacatttgaaa

SEQ ID NO: 28540 - DNA, 3119 bp, Homo sapiens
  source 1..3119: mol_type = unassigned DNA
ctggcccctccctggacacccaggcgacaatggcagaactgcccacaacagagacgcctggggacgccactttgtgcagcgggcgcttcaccatcagcacactgctgagcagtgatgagccctctccaccagctgcctatgacagcagccaccccagccacctgacccacagcagcaccttctgcatgcgcacctttggctacaacacgatcgatgtggtgcccacatatgagcactatgccaacagcacccagcctggtgagccccggaaggtccggcccacactggctgacctgcactccttcctcaaggaaggcagacacctgcatgccctggcctttgacagccggcccagccacgagatgactgatgggctggtggagggcgaggcaggcaccagcagcgagaagaaccccgaggagccagtgcgcttcggctgggtcaagggggtgatgattcgttgcatgctcaacatttggggcgtgatcctctacctgcggctgccctggattacggcccaggcaggcatcgtcctgacctggatcatcatcctgctgtcggtcacggtgacctccatcacaggcctctccatctcagccatctccaccaatggcaaggtcaagtcaggtggcacctacttcctcatctcccggagtctgggcccagagcttgggggctccatcggcctcattttcgctttcgccaatgccgtgggtgtggccatgcacacggtgggctttgcagagaccgtgcgggacctgctccaggagtatggggcacccatcgtggaccccattaacgacatccgcatcattgccgtggtctcggtcactgtgctgctggccatctccctggctggcatggagtgggagtccaaggcccaggtgctgttcttccttgtcatcatggtctcctttgccaactatttagtggggacgctgatccccccatctgaggacaaggcctccaaaggcttcttcagctaccgggcggacatttttgtccagaacttggtgcctgactggcggggtccagatggcaccttcttcggaatgttctccatcttcttcccctcggccacaggcatcctggcaggggccaacatatctggtgacctcaaggaccctgctatagccatccccaaggggaccctcatggccattttctggacgaccatttcctacctggccatctcagccaccattggctcctgcgtggtgcgtgatgcctctggggtcctgaatgacacagtgacccctggctggggtgcctgcgaggggctggcctgcagctatggctggaacttcaccgagtgcacccagcagcacagctgccactacggcctcatcaactattaccagaccatgagcatggtgtcaggcttcgcgcccctgatcacggctggcatcttcggggccaccctctcctctgccctggcctgccttgtctctgctgccaaagtcttccagtgcctttgcgaggaccagctgtacccactgatcggcttcttcggcaaaggctatggcaagaacaaggagcccgtgcgtggctacctgctggcctacgccatcgctgtggccttcatcatcatcgctgagctcaacaccatagcccccatcatttccaacttcttcctctgctcctatgccctcatcaacttcagctgcttccacgcctccatcaccaactcgcctgggtggagaccttcattccaatactacaacaagtgggcggcgctgtttggggctatcatctccgtggtcatcatgttcctcctcacctggtgggcggccctcatcgccattggcgtggtgctcttcctcctgctctatgtcatctacaagaagccagaggtaaattggggctcctcggtacaggctggctcctacaacctggccctcagctactcggtgggcctcaatgaggtggaagaccacatcaagaactaccgcccccagtgcctggtgctcacggggccccccaacttccgcccggccctggtggactttgtgggcaccttcacccggaacctcagcctgatgatctgtggccacgtgctcatcggaccccacaagcagaggatgcctgagctccagctcatcgccaacgggcacaccaagtggctgaacaagaggaagatcaaggccttctactcggatgtcattgccgaggacctccgcagaggcgtccagatcctcatgcaggccgcaggtctcgggagaatgaagcccaacattctggtggttgggttcaagaagaactggcagtcggctcacccggccacagtggaagactacattggcatcctccatgatgcctttgatttcaactatggcgtgtgtgtcatgaggatgcgggagggactcaacgtgtccaagatgatgcaggcgcacattaaccccgtgtttgacccagcggaggacgggaaggaagccagcgccagaggtgccaggccatcagtctctggcgctttggaccccaaggccctggtgaaggaggagcaggccaccaccatcttccagtcggagcagggcaagaagaccatagacatctactggctctttgacgatggaggcctcaccctcctcattccctatctccttggccgcaagaggaggtggagcaaatgcaagatccgtgtgttcgtaggcggccagattaacaggatggaccaggagagaaaggcgatcatttctctgctgagcaagttccgactgggattccatgaagtccacatcctccctgacatcaaccagaaccctcgggctgagcacaccaagaggtttgaggacatgattgcacccttccgtctgaatgatggcttcaaggatgaggccactgtcaacgagatgcggcgggactgcccctggaagatctcagatgaggagattacgaagaacagagtcaagtcccttcggcaggtgaggctgaatgagattgtgctggattactcccgagacgctgctctcatcgtcatcactttgcccatagggaggaaggggaagtgccccagctcgctgtacatggcctggctggagaccctgtcccaggacctcagacctccagtcatcctgatccgaggaaaccaggaaaacgtgctcaccttttactgccagtaa

SEQ ID NO: 28541 - DNA, 4235 bp, Homo sapiens
  source 1..4235: mol_type = unassigned DNA
tccctggacacccaggcgacaatggcagaactgcccacaacagagacgcctggggacgccactttgtgcagcgggcgcttcaccatcagcacactgctgagcagtgatgagccctctccaccagctgcctatgacagcagccaccccagccacctgacccacagcagcaccttctgcatgcgcacctttggctacaacacgatcgatgtggtgcccacatatgagcactatgccaacagcacccagcctggtgagccccggaaggtccggcccacactggctgacctgcactccttcctcaagcaggaaggcagacacctgcatgccctggcctttgacagccggcccagccacgagatgactgatgggctggtggagggcgaggcaggcaccagcagcgagaagaaccccgaggagccagtgcgcttcggctgggtcaagggggtgatgattcgttgcatgctcaacatttggggcgtgatcctctacctgcggctgccctggattacggcccaggcaggcatcgtcctgacctggatcatcatcctgctgtcggtcacggtgacctccatcacaggcctctccatctcagccatctccaccaatggcaaggtcaagtcaggtggcacctacttcctcatctcccggagtctgggcccagagcttgggggctccatcggcctcattttcgctttcgccaatgccgtgggtgtggccatgcacacggtgggctttgcagagaccgtgcgggacctgctccaggagtatggggcacccatcgtggaccccattaacgacatccgcatcattgccgtggtctcggtcactgtgctgctggccatctccctggctggcatggagtgggagtccaaggcccaggtgctgttcttccttgtcatcatggtctcctttgccaactatttagtggggacgctgatccccccatctgaggacaaggcctccaaaggcttcttcagctaccgggcggacatttttgtccagaacttggtgcctgactggcggggtccagatggcaccttcttcggaatgttctccatcttcttcccctcggccacaggcatcctggcaggggccaacatatctggtgacctcaaggaccctgctatagccatccccaaggggaccctcatggccattttctggacgaccatttcctacctggccatctcagccaccattggctcctgcgtggtgcgtgatgcctctggggtcctgaatgacacagtgacccctggctggggtgcctgcgaggggctggcctgcagctatggctggaacttcaccgagtgcacccagcagcacagctgccactacggcctcatcaactattaccagaccatgagcatggtgtcaggcttcgcgcccctgatcacggctggcatcttcggggccaccctctcctctgccctggcctgccttgtctctgctgccaaagtcttccagtgcctttgcgaggaccagctgtacccactgatcggcttcttcggcaaaggctatggcaagaacaaggagcccgtgcgtggctacctgctggcctacgccatcgctgtggccttcatcatcatcgctgagctcaacaccatagcccccatcatttccaacttcttcctctgctcctatgccctcatcaacttcagctgcttccacgcctccatcaccaactcgcctgggtggagaccttcattccaatactacaacaagtgggcggcgctgtttggggctatcatctccgtggtcatcatgttcctcctcacctggtgggcggccctcatcgccattggcgtggtgctcttcctcctgctctatgtcatctacaagaagccagaggtaaattggggctcctcggtacaggctggctcctacaacctggccctcagctactcggtgggcctcaatgaggtggaagaccacatcaagaactaccgcccccagtgcctggtgctcacggggccccccaacttccgcccggccctggtggactttgtgggcaccttcacccggaacctcagcctgatgatctgtggccacgtgctcatcggaccccacaagcagaggatgcctgagctccagctcatcgccaacgggcacaccaagtggctgaacaagaggaagatcaaggccttctactcggatgtcattgccgaggacctccgcagaggcgtccagatcctcatgcaggccgcaggtctcgggagaatgaagcccaacattctggtggttgggttcaagaagaactggcagtcggctcacccggccacagtggaagactacattggcatcctccatgatgcctttgatttcaactatggcgtgtgtgtcatgaggatgcgggagggactcaacgtgtccaagatgatgcaggcgcacattaaccccgtgtttgacccagcggaggacgggaaggaagccagcgccagaggtgccaggccatcagtctctggcgctttggaccccaaggccctggtgaaggaggagcaggccaccaccatcttccagtcggagcagggcaagaagaccatagacatctactggctctttgacgatggaggcctcaccctcctcattccctatctccttggccgcaagaggaggtggagcaaatgcaagatccgtgtgttcgtaggcggccagattaacaggatggaccaggagagaaaggcgatcatttctctgctgagcaagttccgactgggattccatgaagtccacatcctccctgacatcaaccagaaccctcgggctgagcacaccaagaggtttgaggacatgattgcacccttccgtctgaatgatggcttcaaggatgaggccactgtcaacgagatgcggcgggactgcccctggaagatctcagatgaggagattacgaagaacagagtcaagtcccttcggcaggtgaggctgaatgagattgtgctggattactcccgagacgctgctctcatcgtcatcactttgcccatagggaggaaggggaagtgccccagctcgctgtacatggcctggctggagaccctgtcccaggacctcagacctccagtcatcctgatccgaggaaaccaggaaaacgtgctcaccttttactgccagtaactccaggctttgacatccctgtccacagctctgagtgtgtgggataagttggaacttgattgcctctagtccacagggatgagactcatgttctgttgcactttaagtggcagcatctgatgatctcaccgaaaaagatggtagatttccaaatctggctggactccacttccatgggacacattccctgggtcttgtgtttataggctagagaaatagcagatggagctgcaaggaaaactctctaaagcatcctattccttttaaaggatttcttttgattttgatgaccattaattaagagttcagtctttgatttgtatgcaaattggagtcccaatgctgggcgtgaatcttgacagtttctacagaccttcctgggtgaaagttcctaaatcatgccctgcttcctccaataggagaatgggagcctcacctgtaggacctacaggctctctaaggaatgcaggtctctctctgagcctccacagccaggcaaatacatatatatatattttttttttagatgaagttttttctcttgttgcccaggctagggtgtaatggcatgatctcaggtcactgcaacctcctcccgggttcaagcatttcttctgtctcagcctcccgaatagctgggattacaggcacctgccatcacacgagctaatttttgtatttttagtagagatggggtttcaccatgttgaccaggctggtgttgagctcctgacctcaggtgatccacccacctcggtctcccaaagtgctggggttacaggcctgagccactgcgcccggcccaggcaaatttcttgaaccacttctcactcccgtcactttcaataaggggtctttgatgtcttcactggttctttggacgagggacttttcgaacttttttggttgcaacacacagtaagaaatatacttcacactgagacttgcagcgcacacacacggaaacgaccaaaacaaaaatgtcacaaaacaatacttacccttccctgggggacgtcctccagtatgttctgttctgtttatttttcactgttggttgcaatccaataaaatgactttgggatccactcatgggtggggacccacacatttgaaaggca

SEQ ID NO: 28542 - DNA, 5562 bp, Homo sapiens
  source 1..5562: mol_type = unassigned DNA
ctggcccctccctggacacccaggcgacaatggcagaactgcccacaacagagacgcctggggacgccactttgtgcagcgggcgcttcaccatcagcacactgctgagcagtgatgagccctctccaccagctgcctatgacagcagccaccccagccacctgacccacagcagcaccttctgcatgcgcacctttggctacaacacgatcgatgtggtgcccacatatgagcactatgccaacagcacccagcctggtgagccccggaaggtccggcccacactggctgacctgcactccttcctcaaggaaggcagacacctgcatgccctggcctttgacagccggcccagccacgagatgactgatgggctggtggagggcgaggcaggcaccagcagcgagaagaaccccgaggagccagtgcgcttcggctgggtcaagggggtgatgattcgttgcatgctcaacatttggggcgtgatcctctacctgcggctgccctggattacggcccaggcaggcatcgtcctgacctggatcatcatcctgctgtcggtcacggtgacctccatcacaggcctctccatctcagccatctccaccaatggcaaggtcaagtcaggtggcacctacttcctcatctcccggagtctgggcccagagcttgggggctccatcggcctcattttcgctttcgccaatgccgtgggtgtggccatgcacacggtgggctttgcagagaccgtgcgggacctgctccaggagtatggggcacccatcgtggaccccattaacgacatccgcatcattgccgtggtctcggtcactgtgctgctggccatctccctggctggcatggagtgggagtccaaggcccaggtgctgttcttccttgtcatcatggtctcctttgccaactatttagtggggacgctgatccccccatctgaggacaaggcctccaaaggcttcttcagctaccgggcggacatttttgtccagaacttggtgcctgactggcggggtccagatggcaccttcttcggaatgttctccatcttcttcccctcggccacaggcatcctggcaggggccaacatatctggtgacctcaaggaccctgctatagccatccccaaggggaccctcatggccattttctggacgaccatttcctacctggccatctcagccaccattggctcctgcgtggtgcgtgatgcctctggggtcctgaatgacacagtgacccctggctggggtgcctgcgaggggctggcctgcagctatggctggaacttcaccgagtgcacccagcagcacagctgccactacggcctcatcaactattaccagaccatgagcatggtgtcaggcttcgcgcccctgatcacggctggcatcttcggggccaccctctcctctgccctggcctgccttgtctctgctgccaaagtcttccagtgcctttgcgaggaccagctgtacccactgatcggcttcttcggcaaaggctatggcaagaacaaggagcccgtgcgtggctacctgctggcctacgccatcgctgtggccttcatcatcatcgctgagctcaacaccatagcccccatcatttccaacttcttcctctgctcctatgccctcatcaacttcagctgcttccacgcctccatcaccaactcgcctgggtggagaccttcattccaatactacaacaagtgggcggcgctgtttggggctatcatctccgtggtcatcatgttcctcctcacctggtgggcggccctcatcgccattggcgtggtgctcttcctcctgctctatgtcatctacaagaagccagaggtaaattggggctcctcggtacaggctggctcctacaacctggccctcagctactcggtgggcctcaatgaggtggaagaccacatcaagaactaccgcccccagtgcctggtgctcacggggccccccaacttccgcccggccctggtggactttgtgggcaccttcacccggaacctcagcctgatgatctgtggccacgtgctcatcggaccccacaagcagaggatgcctgagctccagctcatcgccaacgggcacaccaagtggctgaacaagaggaagatcaaggccttctactcggatgtcattgccgaggacctccgcagaggcgtccagatcctcatgcaggccgcaggtctcgggagaatgaagcccaacattctggtggttgggttcaagaagaactggcagtcggctcacccggccacagtggaagactacattggcatcctccatgatgcctttgatttcaactatggcgtgtgtgtcatgaggatgcgggagggactcaacgtgtccaagatgatgcaggcgcacattaaccccgtgtttgacccagcggaggacgggaaggaagccagcgccagaggtgccaggccatcagtctctggcgctttggaccccaaggccctggtgaaggaggagcaggccaccaccatcttccagtcggagcagggcaagaagaccatagacatctactggctctttgacgatggaggcctcaccctcctcattccctatctccttggccgcaagaggaggtggagcaaatgcaagatccgtgtgttcgtaggcggccagattaacaggatggaccaggagagaaaggcgatcatttctctgctgagcaagttccgactgggattccatgaagtccacatcctccctgacatcaaccagaaccctcgggctgagcacaccaagaggtttgaggacatgattgcacccttccgtctgaatgatggcttcaaggatgaggccactgtcaacgagatgcggcgggactgcccctggaagatctcagatgaggagattacgaagaacagagtcaagtcccttcggcaggtgaggctgaatgagattgtgctggattactcccgagacgctgctctcatcgtcatcactttgcccatagggaggaaggggaagtgccccagctcgctgtacatggcctggctggagaccctgtcccaggacctcagacctccagtcatcctgatccgaggaaaccaggaaaacgtgctcaccttttactgccagtaactccaggctttgacatccctgtccacagctctgagtgtgtgggataagttggaacttgattgcctctagtccacagggatgagactcatgttctgttgcactttaagtggcagcatctgatgatctcaccgaaaaagatggtagatttccaaatctggctggactccacttccatgggacacattccctgggtcttgtgtttataggctagagaaatagcagatggagctgcaaggaaaactctctaaagcatcctattccttttaaaggatttcttttgattttgatgaccattaattaagagttcagtctttgatttgtatgcaaattggagtcccaatgctgggcgtgaatcttgacagtttctacagaccttcctgggtgaaagttcctaaatcatgccctgcttcctccaataggagaatgggagcctcacctgtaggacctacaggctctctaaggaatgcaggtctctctctgagcctccacagccaggcaaatacatatatatatattttttttttagatgaagttttttctcttgttgcccaggctagggtgtaatggcatgatctcaggtcactgcaacctcctcccgggttcaagcatttcttctgtctcagcctcccgaatagctgggattacaggcacctgccatcacacgagctaatttttgtatttttagtagagatggggtttcaccatgttgaccaggctggtgttgagctcctgacctcaggtgatccacccacctcggtctcccaaagtgctggggttacaggcctgagccactgcgcccggcccaggcaaatttcttgaaccacttctcactcccgtcactttcaataaggggtctttgatgtcttcactggttctttggacgagggacttttcgaacttttttggttgcaacacacagtaagaaatatacttcacactgagacttgcagcgcacacacacggaaacgaccaaaacaaaaatgtcacaaaacaatacttacccttccctgggggacgtcctccagtatgttctgttctgtttatttttcactgttggttgcaatccaataaaatgactttgggatccactcatgggtggggacccacacatttgaaaggcatggccacctttctgttgtgccttgcatttgtccacacacagggagtctggctgagctggggaaaggccacggctgggtgtcattgccattttcccagctcatctcaccgggaagaaaagcagattgacagaacacgtgaggaggggtattgatggcaggagagtcaaaaaagagttttaaagaaggggcaaggttgaaggagtctagtggcaagggtaagatttcaggcatggttaagaacagacgacaaggatgtcaggaatgaagatgtggagaggggtgtagagatggcaaggttggcaaggaacagataggcaggagcaggtccaagccaagcctagcccaagaccaggtgaaaggagaggggaggaggagccacctgcaagagatggaaagagcaggcggcagagggggctggcagggaggggctgttaagagtggggttggaggtgggagagaagctaggacaagggagatggagaaaggacctatacctggctcacggaaggccttcaggtcactacacgttgaacatccccagtgtttgagcccccaaagctagggtgcaagagcactgccatcgaatgccagtgggtgaggccaagtgagggtatttgcagctctagacataaccaagaagcgtaaaggtgagttgtttggtggtacgactgcctgtgccttcttccgatggcactggggtggctgaaggaacagacatctttgggtttcatcagcctcctccaagactgctgcagtgcctacactttagacttcagaaggagactaaagacttctagaatttagaaggagatctgaagtctcctttctggagttacaacccaaaggatgttagcatttctcaggtcatcccactgcaaagcccagaaggcttggggctcccaggctgctctgaagccccactgtctgaccgcctcagggcttgctacgagggactggggcacggccaagctgactaggaacagctctcgtgctcctgagggacctggaggatgggcctgcctcccagccattgagctggattctgggataattcttaactcgaaataaggggaagcatccatcagggaatgctggcctttctagagccacgtagaaaacaattttctggttcttcaaacctcaaagagtccttggtccaaaaaacagaatgttttggcttcgggtgtcaaaaaaaaaattttcacgatgtcagaaatagtatgtttttaacaatagtaatagctttgtaaaaaaataaaaagctttaacagcgaggccataaacaatgaaatgaataaaaacggtggtcattcagtcaacgg

SEQ ID NO: 28543 - DNA, 1764 bp, Homo sapiens
  source 1..1764: mol_type = unassigned DNA
ctttgaagaacatcctgaagattatatcggagacaatatatcaagaatctatttattgaatcatctagaacaaaagccaggagctccctaatggaagcacattagtgtttattttgatgaagaaatatatagattttttaaaacaaccacaaagtagatagctcagtaaaaaatcaattttggaagatgtcactgaacaactcttccaatgtatttctggattcagtgcccagtaataccaatcgctttcaagttagtgtcataaatgagaaccatgagagcagtgcagctgcagatgacaatactgacccaccacattatgaagaaacctcttttggggatgaagctcagaaaagactcagaatcagctttaggcctgggaatcaggagtgctatgacaatttcctccaaagtggagaaactgctaaaacagatgccagttttcacgcttatgattctcacacaaacacatactatctacaaacttttggccacaacaccatggatgccgttcccaagatagagtactatcgtaacaccggcagcatcagtgggcccaaggtcaaccgacccagcctgcttgagattcacgagcaactcgcaaagaatgtggcagtcaccccaagttcagctgacagagttgctaacggtgatgggatacctggagatgaacaagctgaaaataaggaagatgatcaagctggtgttgtgaagtttggatgggtgaaaggtgtgctggtaagatgcatgctgaacatctggggagtcatgctcttcattcgcctctcctggattgttggagaagctggaattggtcttggagttctcataattcttctttccaccatggtaacttctattactgggttgtcaacttctgcgatagcaactaacgggtttgttcgtggaggtggggcctactatcttatttccagaagtttagggcccgagttcggtgggtcaataggcctgatctttgcttttgctaatgcagtggctgttgctatgtatgtggtgggatttgctgagactgtagtagatcttcttaaggagagtgattcgatgatggtggatccaaccaatgacatccggattataggctccatcacagtggtgattcttctaggaatttcagtagctggaatggaatgggaggcaaaggcccaagtcattcttctggtcattcttctaattgctattgcaaacttcttcattggaactgtcattccatccaacaatgagaaaaagtccagaggtttctttaattaccaagcatcaatatttgcagaaaactttgggccacgcttcacaaagggtgaaggcttcttctctgtctttgccatttttttcccagcagctactgggattcttgctggtgccaatatctcaggagatttggaggcactgaggaaacaaggagcttcacctctccctcaaggagctcagagtcgaaggaggagacagacttcccttatatgaattagaacaagcaagagtagaatcaagtgcaaaggaaagaggaagcagaaattgcctgtcccctcaaaaagtaaaggaagactttcagaagaggggacactcaatccaggttttgagggatgaacaggagtttgccgacaggacaaagaagagacggacatttgaaacagaaggaatgggatgtaagaaggcaccaagaaagatgctgctaatgagaattattttaagtgcagagtagtgtatgtaatccttcattaatatattaataaacatatttataaataa

SEQ ID NO: 28544 - DNA, 4707 bp, Homo sapiens
  source 1..4707: mol_type = unassigned DNA
tacatttcctcagaagaaggctccttggtgctttgaagaacatcctgaagattatatcggagacaatatatcaagaatctatttattgaatcatctagaacaaaagccaggagctccctaatggaagcacattagtgtttattttgatgaagaaatatatagattttttaaaacaaccacaaagtagatagctcagtaaaaaatcaattttggaagatgtcactgaacaactcttccaatgtatttctggattcagtgcccagtaataccaatcgctttcaagttagtgtcataaatgagaaccatgagagcagtgcagctgcagatgacaatactgacccaccacattatgaagaaacctcttttggggatgaagctcagaaaagactcagaatcagctttaggcctgggaatcaggagtgctatgacaatttcctccaaagtggagaaactgctaaaacagatgccagttttcacgcttatgattctcacacaaacacatactatctacaaacttttggccacaacaccatggatgccgttcccaagatagagtactatcgtaacaccggcagcatcagtgggcccaaggtcaaccgacccagcctgcttgagattcacgagcaactcgcaaagaatgtggcagtcaccccaagttcagctgacagagttgctaacggtgatgggatacctggagatgaacaagctgaaaataaggaagatgatcaagctggtgttgtgaagtttggatgggtgaaaggtgtgctggtaagatgcatgctgaacatctggggagtcatgctcttcattcgcctctcctggattgttggagaagctggaattggtcttggagttctcataattcttctttccaccatggtaacttctattactgggttgtcaacttctgcgatagcaactaacgggtttgttcgtggaggtggggcctactatcttatttccagaagtttagggcccgagttcggtgggtcaataggcctgatctttgcttttgctaatgcagtggctgttgctatgtatgtggtgggatttgctgagactgtagtagatcttcttaaggagagtgattcgatgatggtggatccaaccaatgacatccggattataggctccatcacagtggtgattcttctaggaatttcagtagctggaatggaatgggaggcaaaggcccaagtcattcttctggtcattcttctaattgctattgcaaacttcttcattggaactgtcattccatccaacaatgagaaaaagtccagaggtttctttaattaccaagcatcaatatttgcagaaaactttgggccacgcttcacaaagggtgaaggcttcttctctgtctttgccatttttttcccagcagctactgggattcttgctggtgccaatatctcaggagatttggaggatccccaagatgccatccccagaggaaccatgctggccattttcatcaccactgttgcctacttaggggttgcaatttgtgtaggggcctgtgtggtccgagatgccaccgggaacatgaatgacaccatcatttctgggatgaactgcaatggttcagcagcatgtgggttgggctatgacttctcaagatgtcgacatgaaccatgtcagtacgggctgatgaacaatttccaggtcatgagcatggtatcagggttcggccccctcatcactgcgggaatcttttctgcaacactctcctccgccctggcctcccttgtcagcgcacccaaagtgttccaggctctgtgcaaggacaacatctacaaagccctgcagttttttgcaaagggatatgggaaaaacaatgaacccctgagaggatatattctcacttttcttatagccatggcatttattcttattgcggaactgaacaccattgctcccatcatctccaactttttcctggcctcatatgcacttattaatttctcctgcttccatgcctcttatgccaaatctccaggatggagacctgcgtatggaatttacaacatgtgggtatctctttttggagctgttttgtgctgtgcagtcatgtttgtcatcaactggtgggcagctgtcatcacctatgtcattgaattcttcctttacgtctatgtgacttgtaagaagccagatgtgaactggggctcctccacacaggctctttcctacgtgagtgctttagacaatgctctggaattaaccacagtggaagaccacgtaaaaaacttcaggccccagtgcattgtcttaacagggggacccatgacaagacctgctctcctggacataactcacgcctttaccaagaacagtggcctttgcatctgctgtgaagtctttgtgggaccgcgcaaactgtgtgttaaggagatgaacagtggcatggcgaaaaaacaggcctggcttataaagaacaaaatcaaggctttttatgctgcagtggcggcagactgtttcagggatggtgtccgaagtcttcttcaggcctcaggcttaggaagaatgaaaccaaacactctggtgattggatataagaaaaactggaggaaagctcccttgacagagattgagaactacgtgggaatcatacatgatgcatttgattttgagattggcgtggttatagtcagaatcagccaaggatttgacatctctcaggttcttcaggtgcaagaggaattagagagattagaacaggagagactagcattggaagcgactatcaaagataatgagtgtgaagaggaaagtggaggcatccgaggcttgtttaaaaaagctggcaagttgaacattactaagacaacgcctaaaaaagatggcagcattaacacaagccagtcgatgcatgtgggagagttcaaccagaaactggtggaagccagcactcaatttaaaaagaaacaagaaaaaggcacaattgatgtttggtggttgtttgatgatggagggttaacacttcttatcccctatatcttaactctcagaaaaaaatggaaagactgtaaattaagaatctatgtgggagggaagatcaaccgcattgaagaagaaaaaattgtaatggcttcccttctgagcaaatttaggataaaatttgcagacatccatatcatcggtgacatcaacattaggccaaacaaagagagctggaaagtctttgaagagatgattgaaccatatcgtctccatgaaagctgcaaagatttaacaactgctgagaaattaaaaagagaaactccgtggaaaattacagatgcagaactggaagcagtcaaggaaaagagttaccgccaagttcgactgaatgaactcttacaggagcactccagagctgctaatctcattgtcctgagccttcccgtggcaagaaagggatccatatcggatttgttgtatatggcttggttggaaatcctcacaaagaacctcccacctgtcttactagttagaggaaatcacaaaaatgtcttgacattttactcttaaaacatgaaagattggaatacattttaacttaatgtaatgcataattaagaaacatgttccagtactttatgttgtaaatctgatctatggatatgcaaacctctggagaggatcctaccagattctacatacattgcataatttttatcagttaatgcgagcttttttttctcttctcagcttaaggggttgtcaaagccaatgttatccctagaaaaacatttttgtcactgctgttgataaacaagaaaatcaaggaaactcatgttggcttatgctcatgaaaaccaccaatgtgattgtaaacttctccagacaaacttaaccttttgtttcttaattttttgttttgagtgtttgcttctcagccctggtataggtctcagccccacagcaggatctcaataaatgcttattgacaggctggcatagtaaccacaggtggttatcaaaggaaaagaccaataggctggggaacataattatgcttggccccctcagaggcttatacctccaaagcagatttaaaaatcagtaactcaaaactttaagaagtagttgagtctacaaaatattcaaagcagttacctaaataaggttatttaatgtaacagattatatacttaaagtgatctgagcaatcattgataacatatggcttaaatttgctgctgcctgaaaagtatattaactagattagaagacaccatatactccaataaaatgaaatatattctattctcaatatataaactttaattgtactccctatcaaatattttgaaatttccatcacggcattactttgcatatttttttctaattaaatggttagtacagatgaaatctttatagatgactacttgaaaactaagtgctacaaattttcaaaccattattaagaaatatatcctgaatcatatatttagttactttctatagtgattgtatggatttaaaagaataattaaaatgtgaagttgaaaaacttgtaaaatttggaatatacagatactgatttttttcatttttgttagtatacctataatacataatcacattgacaaaccaatgaaaatattgattttctgatgaatggcttgatttttctccttgacatgttttgactgttcattctaactgaaaacatatatgggaaaatatgaacctgaaataaaagcactcaaattc

SEQ ID NO: 28545 - DNA, 4708 bp, Homo sapiens
  source 1..4708: mol_type = unassigned DNA
acatttcctcagaagaaggctccttggtgctttgaagaacatcctgaagattatatcggagacaatatatcaagaatctatttattgaatcatctagaacaaaagccaggagctccctaatggaagcacattagtgtttattttgatgaagaaatatatagattttttaaaacaaccacaaagtagatagctcagtaaaaaatcaattttggaagatgtcactgaacaactcttccaatgtatttctggattcagtgcccagtaataccaatcgctttcaagttagtgtcataaatgagaaccatgagagcagtgcagctgcagatgacaatactgacccaccacattatgaagaaacctcttttggggatgaagctcagaaaagactcagaatcagctttaggcctgggaatcaggagtgctatgacaatttcctccaaagtggagaaactgctaaaacagatgccagttttcacgcttatgattctcacacaaacacatactatctacaaacttttggccacaacaccatggatgccgttcccaagatagagtactatcgtaacaccggcagcatcagtgggcccaaggtcaaccgacccagcctgcttgagattcacgagcaactcgcaaagaatgtggcagtcaccccaagttcagctgacagagttgctaacggtgatgggatacctggagatgaacaagctgaaaataaggaagatgatcaagctggtgttgtgaagtttggatgggtgaaaggtgtgctggtaagatgcatgctgaacatctggggagtcatgctcttcattcgcctctcctggattgttggagaagctggaattggtcttggagtcatcatcattggcctaagtgtggtagtaacgacactcacaggtatttctatgtctgctatttgcacgaatggagtagtaagaggaggtggggcctactatcttatttccagaagtttagggcccgagttcggtgggtcaataggcctgatctttgcttttgctaatgcagtggctgttgctatgtatgtggtgggatttgctgagactgtagtagatcttcttaaggagagtgattcgatgatggtggatccaaccaatgacatccggattataggctccatcacagtggtgattcttctaggaatttcagtagctggaatggaatgggaggcaaaggcccaagtcattcttctggtcattcttctaattgctattgcaaacttcttcattggaactgtcattccatccaacaatgagaaaaagtccagaggtttctttaattaccaagcatcaatatttgcagaaaactttgggccacgcttcacaaagggtgaaggcttcttctctgtctttgccatttttttcccagcagctactgggattcttgctggtgccaatatctcaggagatttggaggatccccaagatgccatccccagaggaaccatgctggccattttcatcaccactgttgcctacttaggggttgcaatttgtgtaggggcctgtgtggtccgagatgccaccgggaacatgaatgacaccatcatttctgggatgaactgcaatggttcagcagcatgtgggttgggctatgacttctcaagatgtcgacatgaaccatgtcagtacgggctgatgaacaatttccaggtcatgagcatggtatcagggttcggccccctcatcactgcgggaatcttttctgcaacactctcctccgccctggcctcccttgtcagcgcacccaaagtgttccaggctctgtgcaaggacaacatctacaaagccctgcagttttttgcaaagggatatgggaaaaacaatgaacccctgagaggatatattctcacttttcttatagccatggcatttattcttattgcggaactgaacaccattgctcccatcatctccaactttttcctggcctcatatgcacttattaatttctcctgcttccatgcctcttatgccaaatctccaggatggagacctgcgtatggaatttacaacatgtgggtatctctttttggagctgttttgtgctgtgcagtcatgtttgtcatcaactggtgggcagctgtcatcacctatgtcattgaattcttcctttacgtctatgtgacttgtaagaagccagatgtgaactggggctcctccacacaggctctttcctacgtgagtgctttagacaatgctctggaattaaccacagtggaagaccacgtaaaaaacttcaggccccagtgcattgtcttaacagggggacccatgacaagacctgctctcctggacataactcacgcctttaccaagaacagtggcctttgcatctgctgtgaagtctttgtgggaccgcgcaaactgtgtgttaaggagatgaacagtggcatggcgaaaaaacaggcctggcttataaagaacaaaatcaaggctttttatgctgcagtggcggcagactgtttcagggatggtgtccgaagtcttcttcaggcctcaggcttaggaagaatgaaaccaaacactctggtgattggatataagaaaaactggaggaaagctcccttgacagagattgagaactacgtgggaatcatacatgatgcatttgattttgagattggcgtggttatagtcagaatcagccaaggatttgacatctctcaggttcttcaggtgcaagaggaattagagagattagaacaggagagactagcattggaagcgactatcaaagataatgagtgtgaagaggaaagtggaggcatccgaggcttgtttaaaaaagctggcaagttgaacattactaagacaacgcctaaaaaagatggcagcattaacacaagccagtcgatgcatgtgggagagttcaaccagaaactggtggaagccagcactcaatttaaaaagaaacaagaaaaaggcacaattgatgtttggtggttgtttgatgatggagggttaacacttcttatcccctatatcttaactctcagaaaaaaatggaaagactgtaaattaagaatctatgtgggagggaagatcaaccgcattgaagaagaaaaaattgtaatggcttcccttctgagcaaatttaggataaaatttgcagacatccatatcatcggtgacatcaacattaggccaaacaaagagagctggaaagtctttgaagagatgattgaaccatatcgtctccatgaaagctgcaaagatttaacaactgctgagaaattaaaaagagaaactccgtggaaaattacagatgcagaactggaagcagtcaaggaaaagagttaccgccaagttcgactgaatgaactcttacaggagcactccagagctgctaatctcattgtcctgagccttcccgtggcaagaaagggatccatatcggatttgttgtatatggcttggttggaaatcctcacaaagaacctcccacctgtcttactagttagaggaaatcacaaaaatgtcttgacattttactcttaaaacatgaaagattggaatacattttaacttaatgtaatgcataattaagaaacatgttccagtactttatgttgtaaatctgatctatggatatgcaaacctctggagaggatcctaccagattctacatacattgcataatttttatcagttaatgcgagcttttttttctcttctcagcttaaggggttgtcaaagccaatgttatccctagaaaaacatttttgtcactgctgttgataaacaagaaaatcaaggaaactcatgttggcttatgctcatgaaaaccaccaatgtgattgtaaacttctccagacaaacttaaccttttgtttcttaattttttgttttgagtgtttgcttctcagccctggtataggtctcagccccacagcaggatctcaataaatgcttattgacaggctggcatagtaaccacaggtggttatcaaaggaaaagaccaataggctggggaacataattatgcttggccccctcagaggcttatacctccaaagcagatttaaaaatcagtaactcaaaactttaagaagtagttgagtctacaaaatattcaaagcagttacctaaataaggttatttaatgtaacagattatatacttaaagtgatctgagcaatcattgataacatatggcttaaatttgctgctgcctgaaaagtatattaactagattagaagacaccatatactccaataaaatgaaatatattctattctcaatatataaactttaattgtactccctatcaaatattttgaaatttccatcacggcattactttgcatatttttttctaattaaatggttagtacagatgaaatctttatagatgactacttgaaaactaagtgctacaaattttcaaaccattattaagaaatatatcctgaatcatatatttagttactttctatagtgattgtatggatttaaaagaataattaaaatgtgaagttgaaaaacttgtaaaatttggaatatacagatactgatttttttcatttttgttagtatacctataatacataatcacattgacaaaccaatgaaaatattgattttctgatgaatggcttgatttttctccttgacatgttttgactgttcattctaactgaaaacatatatgggaaaatatgaacctgaaataaaagcactcaaattcaa

SEQ ID NO: 28546 - DNA, 2174 bp, Homo sapiens
  source 1..2174: mol_type = unassigned DNA
gttactgaaccgatcagcgaacacagacaaacgtgccaacacttaagtctactggctggacttcatctccatggcaacaagcatggaagaatgtggcagtcaccccaagttcagctgacagagttgctaacggtgatgggatacctggagatgaacaagctgaaaataaggaagatgatcaagctggtgttgtgaagtttggatgggtgaaaggtgtgctggtaagatgcatgctgaacatctggggagtcatgctcttcattcgcctctcctggattgttggagaagctggaattggtcttggagttctcataattcttctttccaccatggtaacttctattactgggttgtcaacttctgcgatagcaactaacgggtttgttcgtggaggtggggcctactatcttatttccagaagtttagggcccgagttcggtgggtcaataggcctgatctttgcttttgctaatgcagtggctgttgctatgtatgtggtgggatttgctgagactgtagtagatcttcttaaggagagtgattcgatgatggtggatccaaccaatgacatccggattataggctccatcacagtggtgattcttctaggaatttcagtagctggaatggaatgggaggcaaaggcccaagtcattcttctggtcattcttctaattgctattgcaaacttcttcattggaactgtcattccatccaacaatgagaaaaagtccagaggtttctttaattaccaagcatcaatatttgcagaaaactttgggccacgcttcacaaagggtgaaggcttcttctctgtctttgccatttttttcccagcagctactgggattcttgctggtgccaatatctcaggagatttggaggatccccaagatgccatccccagaggaaccatgctggccattttcatcaccactgttgcctacttaggggttgcaatttgtgtaggggcctgtgtggtccgagatgccaccgggaacatgaatgacaccatcatttctgggatgaactgcaatggttcagcagcatgtgggttgggctatgacttctcaagatgtcgacatgaaccatgtcagtacgggctgatgaacaatttccaggtcatgagcatggtatcagggttcggccccctcatcactgcgggaatcttttctgcaacactctcctccgccctggcctcccttgtcagcgcacccaaagtgttccaggctctgtgcaaggacaacatctacaaagccctgcagttttttgcaaagggatatgggaaaaacaatgaacccctgagaggatatattctcacttttcttatagccatggcatttattcttattgcggaactgaacaccattgctcccatcatctccaactttttcctggcctcatatgcacttattaatttctcctgcttccatgcctcttatgccaaatctccaggatggagacctgcgtatggaatttacaacatgtgggtatctctttttggagctgttttgtgctgtgcagtcatgtttgtcatcaactggtgggcagctgtcatcacctatgtcattgaattcttcctttacgtctatgtgacttgtaagaagccagatgtgaactggggctcctccacacaggctctttcctacgtgagtgctttagacaatgctctggaattaaccacagtggaagaccacgtaaaaaacttcaggccccagtgcattgtcttaacagggggacccatgacaagacctgctctcctggacataactcacgcctttaccaagaacagtggcctttgcatctgctgtgaagtctttgtgggaccgcgcaaactgtgtgttaaggagatgaacagtggcatggcgaaaacaggcctggcttataaagaacaaaatcaaggctttttatgctgcagtggcggcagactgtttcagggatggtgtccgaagtcttcttcaggcctcaggcttaggaagaatgaaaccaaacactctggtgattggatataagaaaaactggaggaaagctcccttgacagagattgagaactacgtgggaatcatacatgatgcatttgattttgagattggcgtggttatagtcagaatcagccaaggatttgacatctctcaggttcttcaggtgcaagaggaattagagagattagaaca

SEQ ID NO: 28547 - DNA, 2673 bp, Homo sapiens
  source 1..2673: mol_type = unassigned DNA
atgagaaccatgagagcagtgcagctgcagatgacaatactgacccaccacattatgaagaaacctcttttggggatgaagctcagaaaagactcagaatcagctttaggcctgggaatcaggagtgctatgacaatttcctccaaacaagctctttcctacgtgagtgctttagacaatgctctggaattaaccacagtggaagaccacgtaaaaaacttcaggccccagtgcattgtcttaacagggggacccatgacaagacctgctctcctggacataactcacgcctttaccaagaacagtggcctttgcatctgctgtgaagtctttgtgggaccgcgcaaactgtgtgttaaggagatgaacagtggcatggcgaaaaaacaggcctggcttataaagaacaaaatcaaggctttttatgctgcagtggcggcagactgtttcagggatggtgtccgaagtcttcttcaggcctcaggcttaggaagaatgaaaccaaacactctggtgattggatataagaaaaactggaggaaagctcccttgacagagattgagaactacgtgggaatcatacatgatgcatttgattttgagattggcgtggttatagtcagaatcagccaaggatttgacatctctcaggttcttcaggtgcaagaggaattagagagattagaacaggagagactagcattggaagcgactatcaaagataatgagtgtgaagaggaaagtggaggcatccgaggcttgtttaaaaaagctggcaagttgaacattactaagacaacgcctaaaaaagatggcagcattaacacaagccagtcgatgcatgtgggagagttcaaccagaaactggtggaagccagcactcaatttaaaaagaaacaagaaaaaggcacaattgatgtttggtggttgtttgatgatggagggttaacacttcttatcccctatatcttaactctcagaaaaaaatggaaagactgtaaattaagaatctatgtgggagggaagatcaaccgcattgaagaagaaaaaattgtaatggcttcccttctgagcaaatttaggataaaatttgcagacatccatatcatcggtgacatcaacattaggccaaacaaagagagctggaaagtctttgaagagatgattgaaccatatcgtctccatgaaagctgcaaagatttaacaactgctgagaaattaaaaagagaaactccgtggaaaattacagatgcagaactggaagcagtcaaggaaaagagttaccgccaagttcgactgaatgaactcttacaggagcactccagagctgctaatctcattgtcctgagccttcccgtggcaagaaagggatccatatcggatttgttgtatatggcttggttggaaatcctcacaaagaacctcccacctgtcttactagttagaggaaatcacaaaaatgtcttgacattttactcttaaaacatgaaagattggaatacattttaacttaatgtaatgcataattaagaaacatgttccagtactttatgttgtaaatctgatctatggatatgcaaacctctggagaggatcctaccagattctacatacattgcataatttttatcagttaatgcgagcttttttttctcttctcagcttaaggggttgtcaaagccaatgttatccctagaaaaacatttttgtcactgctgttgataaacaagaaaatcaaggaaactcatgttggcttatgctcatgaaaaccaccaatgtgattgtaaacttctccagacaaacttaaccttttgtttcttaattttttgttttgagtgtttgcttctcagccctggtataggtctcagccccacagcaggatctcaataaatgcttattgacaggctggcatagtaaccacaggtggttatcaaaggaaaagaccaataggctggggaacataattatgcttggccccctcagaggcttatacctccaaagcagatttaaaaatcagtaactcaaaactttaagaagtagttgagtctacaaaatattcaaagcagttacctaaataaggttatttaatgtaacagattatatacttaaagtgatctgagcaatcattgataacatatggcttaaatttgctgctgcctgaaaagtatattaactagattagaagacaccatatactccaataaaatgaaatatattctattctcaatatataaactttaattgtactccctatcaaatattttgaaatttccatcacggcattactttgcatatttttttctaattaaatggttagtacagatgaaatctttatagatgactacttgaaaactaagtgctacaaattttcaaaccattattaagaaatatatcctgaatcatatatttagttactttctatagtgattgtatggatttaaaagaataattaaaatgtgaagttgaaaaacttgtaaaatttggaatatacagatactgatttttttcatttttgttagtatacctataatacataatcacattgacaaaccaatgaaaatattgattttctgatgaatggcttgatttttctccttgacatgttttgactgttcattctaactgaaaacatatatgggaaaatatgaacctgaaataaaagcactcaaattc

SEQ ID NO: 28548 - DNA, 3426 bp, Homo sapiens
  source 1..3426: mol_type = unassigned DNA
atcaattttggaagatgtcactgaacaactcttccaatgtatttctggattcagtgcccagtaataccaatcgctttcaagttagtgtcataaatgagaaccatgagagcagtgcagctgcagatgacaatactgacccaccacattatgaagaaacctcttttggggatgaagctcagaaaagactcagaatcagctttaggcctgggaatcaggagtgctatgacaatttcctccaaagtggagaaactgctaaaacagatgccagttttcacgcttatgattctcacacaaacacatactatctacaaacttttggccacaacaccatggatgccgttcccaagatagagtactatcgtaacaccggcagcatcagtgggcccaaggtcaaccgacccagcctgcttgagattcacgagcaactcgcaaagaatgtggcagtcaccccaagttcagctgacagagttgctaacggtgatgggatacctggagatgaacaagctgaaaataaggaagatgatcaagctggtgttgtgaagtttggatgggtgaaaggtgtgctggtaagatgcatgctgaacatctggggagtcatgctcttcattcgcctctcctggattgttggagaagctggaattggtcttggagttctcataattcttctttccaccatggtaacttctattactgggttgtcaacttctgcgatagcaactaacgggtttgttcgtggaggtggggcctactatcttatttccagaagtttagggcccgagttcggtgggtcaataggcctgatctttgcttttgctaatgcagtggctgttgctatgtatgtggtgggatttgctgagactgtagtagatcttcttaaggagagtgattcgatgatggtggatccaaccaatgacatccggattataggctccatcacagtggtgattcttctaggaatttcagtagctggaatggaatgggaggcaaaggcccaagtcattcttctggtcattcttctaattgctattgcaaacttcttcattggaactgtcattccatccaacaatgagaaaaagtccagaggtttctttaattaccaagcatcaatatttgcagaaaactttgggccacgcttcacaaagggtgaaggcttcttctctgtctttgccatttttttcccagcagctactgggattcttgctggtgccaatatctcaggagatttggaggatccccaagatgccatccccagaggaaccatgctggccattttcatcaccactgttgcctacttaggggttgcaatttgtgtaggggcctgtgtggtccgagatgccaccgggaacatgaatgacaccatcatttctgggatgaactgcaatggttcagcagcatgtgggttgggctatgacttctcaagatgtcgacatgaaccatgtcagtacgggctgatgaacaatttccaggtcatgagcatggtatcagggttcggccccctcatcactgcgggaatcttttctgcaacactctcctccgccctggcctcccttgtcagcgcacccaaagtgttccaggctctgtgcaaggacaacatctacaaagccctgcagttttttgcaaagggatatgggaaaaacaatgaacccctgagaggatatattctcacttttcttatagccatggcatttattcttattgcggaactgaacaccattgctcccatcatctccaactttttcctggcctcatatgcacttattaatttctcctgcttccatgcctcttatgccaaatctccaggatggagacctgcgtatggaatttacaacatgtgggtatctctttttggagctgttttgtgctgtgcagtcatgtttgtcatcaactggtgggcagctgtcatcacctatgtcattgaattcttcctttacgtctatgtgacttgtaagaagccagatgtgaactggggctcctccacacaggctctttcctacgtgagtgctttagacaatgctctggaattaaccacagtggaagaccacgtaaaaaacttcaggccccagtgcattgtcttaacagggggacccatgacaagacctgctctcctggacataactcacgcctttaccaagaacagtggcctttgcatctgctgtgaagtctttgtgggaccgcgcaaactgtgtgttaaggagatgaacagtggcatggcgaaaaaacaggcctggcttataaagaacaaaatcaaggctttttatgctgcagtggcggcagactgtttcagggatggtgtccgaagtcttcttcaggcctcaggcttaggaagaatgaaaccaaacactctggtgattggatataagaaaaactggaggaaagctcccttgacagagattgagaactacgtgggaatcatacatgatgcatttgattttgagattggcgtggttatagtcagaatcagccaaggatttgacatctctcaggttcttcaggtgcaagaggaattagagagattagaacaggagagactagcattggaagcgactatcaaagataatgagtgtgaagaggaaagtggaggcatccgaggcttgtttaaaaaagctggcaagttgaacattactaagacaacgcctaaaaaagatggcagcattaacacaagccagtcgatgcatgtgggagagttcaaccagaaactggtggaagccagcactcaatttaaaaagaaacaagaaaaaggcacaattgatgtttggtggttgtttgatgatggagggttaacacttcttatcccctatatcttaactctcagaaaaaaatggaaagactgtaaattaagaatctatgtgggagggaagatcaaccgcattgaagaagaaaaaattgtaatggcttcccttctgagcaaatttaggataaaatttgcagacatccatatcatcggtgacatcaacattaggccaaacaaagagagctggaaagtctttgaagagatgattgaaccatatcgtctccatgaaagctgcaaagatttaacaactgctgagaaattaaaaagagaaactccgtggaaaattacagatgcagaactggaagcagtcaaggaaaagagttaccgccaagttcgactgaatgaactcttacaggagcactccagagctgctaatctcattgtcctgagccttcccgtggcaagaaagggatccatatcggatttgttgtatatggcttggttggaaatcctcacaaagaacctcccacctgtcttactagttagaggaaatcacaaaaatgtcttgacattttactcttaaaacatgaaagattggaatacattttaacttaatgtaatgcataattaagaaacatgttccagtactttatgttgtaaatctgatctatggatatgcaaacctctggagagga

SEQ ID NO: 28549 - DNA, 2176 bp, Homo sapiens
  source 1..2176: mol_type = unassigned DNA
gttactgaaccgatcagcgaacacagacaaacgtgccaacacttaagtctactggctggacttcatctccatggcaacaagcatggaagaatgtggcagtcaccccaagttcagctgacagagttgctaacggtgatgggatacctggagatgaacaagctgaaaataaggaagatgatcaagctggtgttgtgaagtttggatgggtgaaaggtgtgctggtaagatgcatgctgaacatctggggagtcatgctcttcattcgcctctcctggattgttggagaagctggaattggtcttggagttctcataattcttctttccaccatggtaacttctattactgggttgtcaacttctgcgatagcaactaacgggtttgttcgtggaggtggggcctactatcttatttccagaagtttagggcccgagttcggtgggtcaataggcctgatctttgcttttgctaatgcagtggctgttgctatgtatgtggtgggatttgctgagactgtagtagatcttcttaaggagagtgattcgatgatggtggatccaaccaatgacatccggattataggctccatcacagtggtgattcttctaggaatttcagtagctggaatggaatgggaggcaaaggcccaagtcattcttctggtcattcttctaattgctattgcaaacttcttcattggaactgtcattccatccaacaatgagaaaaagtccagaggtttctttaattaccaagcatcaatatttgcagaaaactttgggccacgcttcacaaagggtgaaggcttcttctctgtctttgccatttttttcccagcagctactgggattcttgctggtgccaatatctcaggagatttggaggatccccaagatgccatccccagaggaaccatgctggccattttcatcaccactgttgcctacttaggggttgcaatttgtgtaggggcctgtgtggtccgagatgccaccgggaacatgaatgacaccatcatttctgggatgaactgcaatggttcagcagcatgtgggttgggctatgacttctcaagatgtcgacatgaaccatgtcagtacgggctgatgaacaatttccaggtcatgagcatggtatcagggttcggccccctcatcactgcgggaatcttttctgcaacactctcctccgccctggcctcccttgtcagcgcacccaaagtgttccaggctctgtgcaaggacaacatctacaaagccctgcagttttttgcaaagggatatgggaaaaacaatgaacccctgagaggatatattctcacttttcttatagccatggcatttattcttattgcggaactgaacaccattgctcccatcatctccaactttttcctggcctcatatgcacttattaatttctcctgcttccatgcctcttatgccaaatctccaggatggagacctgcgtatggaatttacaacatgtgggtatctctttttggagctgttttgtgctgtgcagtcatgtttgtcatcaactggtgggcagctgtcatcacctatgtcattgaattcttcctttacgtctatgtgacttgtaagaagccagatgtgaactggggctcctccacacaggctctttcctacgtgagtgctttagacaatgctctggaattaaccacagtggaagaccacgtaaaaaacttcaggccccagtgcattgtcttaacagggggacccatgacaagacctgctctcctggacataactcacgcctttaccaagaacagtggcctttgcatctgctgtgaagtctttgtgggaccgcgcaaactgtgtgttaaggagatgaacagtggcatggcgaaaaaacaggcctggcttataaagaacaaaatcaaggctttttatgctgcagtggcggcagactgtttcagggatggtgtccgaagtcttcttcaggcctcaggcttaggaagaatgaaaccaaacactctggtgattggatataagaaaaactggaggaaagctcccttgacagagattgagaactacgtgggaatcatacatgatgcatttgattttgagattggcgtggttatagtcagaatcagccaaggatttgacatctctcaggttcttcaggtgcaagaggaattagagagattagaaca

SEQ ID NO: 28550 - DNA, 6885 bp, Homo sapiens
  source 1..6885: mol_type = unassigned DNA
acactcgcgcgctcgctcggctgccggtggcctctgtggccgtccaggctagcggcggcccgcaggcggcggggagaaagactctctcacctggtcttgcggctgtggccaccgccggccaggggtgtggagggcgtgctgccggagacgtccgccgggctctgcagttccgccgggggtcgggcagctatggagccgcggcccacggcgccctcctccggcgccccgggactggccggggtcggggagacgccgtcagccgctgcgctggccgcagccagggtggaactgcccggcacggctgtgccctcggtgccggaggatgctgcgcccgcgagccgggacggcggcggggtccgcgatgagggccccgcggcggccggggacgggctgggcagacccttggggcccaccccgagccagagccgtttccaggtggacctggtttccgagaacgccgggcgggccgctgctgcggcggcggcggcggcggcggcagcggcggcggctggtgctggggcgggggccaagcagacccccgcggacggggaagccagcggcgagagcgagccggctaaaggcagcgaggaagccaagggccgcttccgcgtgaacttcgtggacccagctgcctcctcgtcggctgaagacagcctgtcagatgctgccggggtcggagtcgacgggcccaacgtgagcttccagaacggcggggacacggtgctgagcgagggcagcagcctgcactccggcggcggcggcggcagtgggcaccaccagcactactattatgatacccacaccaacacctactacctgcgcaccttcggccacaacaccatggacgctgtgcccaggatcgatcactaccggcacacagccgcgcagctgggcgagaagctgctccggcctagcctggcggagctccacgacgagctggaaaaggaaccttttgaggatggctttgcaaatggggaagaaagtactccaaccagagatgctgtggtcacgtatactgcagaaagtaaaggagtcgtgaagtttggctggatcaagggtgtattagtacgttgtatgttaaacatttggggtgtgatgcttttcattagattgtcatggattgtgggtcaagctggaataggtctatcagtccttgtaataatgatggccactgttgtgacaactatcacaggattgtctacttcagcaatagcaactaatggatttgtaagaggaggaggagcatattatttaatatctagaagtctagggccagaatttggtggtgcaattggtctaatcttcgcctttgccaacgctgttgcagttgctatgtatgtggttggatttgcagaaaccgtggtggagttgcttaaggaacattccatacttatgatagatgaaatcaatgatatccgaattattggagccattacagtcgtgattcttttaggtatctcagtagctggaatggagtgggaagcaaaagctcagattgttcttttggtgatcctacttcttgctattggtgatttcgtcataggaacatttatcccactggagagcaagaagccaaaagggttttttggttataaatctgaaatatttaatgagaactttgggcccgattttcgagaggaagagactttcttttctgtatttgccatcttttttcctgctgcaactggtattctggctggagcaaatatctcaggtgatcttgcagatcctcagtcagccatacccaaaggaacactcctagccattttaattactacattggtttacgtaggaattgcagtatctgtaggttcttgtgttgttcgagatgccactggaaacgttaatgacactatcgtaacagagctaacaaactgtacttctgcagcctgcaaattaaactttgatttttcatcttgtgaaagcagtccttgttcctatggcctaatgaacaacttccaggtaatgagtatggtgtcaggatttacaccactaatttctgcaggtatattttcagccactctttcttcagcattagcatccctagtgagtgctcccaaaatatttcaggctctatgtaaggacaacatctacccagctttccagatgtttgctaaaggttatgggaaaaataatgaacctcttcgtggctacatcttaacattcttaattgcacttggattcatcttaattgctgaactgaatgttattgcaccaattatctcaaacttcttccttgcatcatatgcattgatcaatttttcagtattccatgcatcacttgcaaaatctccaggatggcgtcctgcattcaaatactacaacatgtggatatcacttcttggagcaattctttgttgcatagtaatgttcgtcattaactggtgggctgcattgctaacatatgtgatagtccttgggctgtatatttatgttacctacaaaaaaccagatgtgaattggggatcctctacacaagccctgacttacctgaatgcactgcagcattcaattcgtctttctggagtggaagaccacgtgaaaaactttaggccacagtgtcttgttatgacaggtgctccaaactcacgtccagctttacttcatcttgttcatgatttcacaaaaaatgttggtttgatgatctgtggccatgtacatatgggtcctcgaagacaagccatgaaagagatgtccatcgatcaagccaaatatcagcgatggcttattaagaacaaaatgaaggcattttatgctccagtacatgcagatgacttgagagaaggtgcacagtatttgatgcaggctgctggtcttggtcgtatgaagccaaacacacttgtccttggatttaagaaagattggttgcaagcagatatgagggatgtggatatgtatataaacttatttcatgatgcttttgacatacaatatggagtagtggttattcgcctaaaagaaggtctggatatatctcatcttcaaggacaagaagaattattgtcatcacaagagaaatctcctggcaccaaggatgtggtagtaagtgtggaatatagtaaaaagtccgatttagatacttccaaaccactcagtgaaaaaccaattacacacaaagttgaggaagaggatggcaagactgcaactcaaccactgttgaaaaaagaatccaaaggccctattgtgcctttaaatgtagctgaccaaaagcttcttgaagctagtacacagtttcagaaaaaacaaggaaagaatactattgatgtctggtggctttttgatgatggaggtttgaccttattgataccttaccttctgacgaccaagaaaaaatggaaagactgtaagatcagagtattcattggtggaaagataaacagaatagaccatgaccggagagcgatggctactttgcttagcaagttccggatagacttttctgatatcatggttctaggagatatcaataccaaaccaaagaaagaaaatattatagcttttgaggaaatcattgagccatacagacttcatgaagatgataaagagcaagatattgcagataaaatgaaagaagatgaaccatggcgaataacagataatgagcttgaactttataagaccaagacataccggcagatcaggttaaatgagttattaaaggaacattcaagcacagctaatattattgtcatgagtctcccagttgcacgaaaaggtgctgtgtctagtgctctctacatggcatggttagaagctctatctaaggacctaccaccaatcctcctagttcgtgggaatcatcagagtgtccttaccttctattcataaatgttctatacagtggacagccctccagaatggtacttcagtgcctagtgtagtaactgaaatcttcaatgacacattaacatcacaatggcgaatggtgacttttctttcacgatttcattaatttgaaagcacacaggaaagttgctccattgataacgtgtatggagacttcggttttagtcaattccatatctcaatcttaatggtgattcttctctgttgaactgaagtttgtgagagtagttttcctttgctacttgaatagcaataaaagcgtgttaactttttgattgatgaaagaagtacaaaaagcctttagccttgaggtgccttctgaaattaaccaaatttcatccatatatcctcttttataaacttatagaatgtcaaactttgccttcaactgtttttatttctagtctcttccactttaaaacaaaatgaacactgcttgtcttcttccattgaccatttagtgttgagtactgtatgtgttttgttaattctataaaggtatctgttagatattaaaggtgagaattagggcaggttaatcaaaaatggggaaggggaaatggtaaccaaaaagtaaccccatggtaaggtttatatgagtatatgtgaatatagagctaggaaaaaaagcccccccaaatacctttttaacccctctgattggctattattactatatttattattatttattgaaaccttagggaagattgaagattcatcccatacttctatataccatgcttaaaaatcacgtcattctttaaacaaaaatactcaagatcatttatatttatttggagagaaaactgtcctaatttagaatttccctcaaatctgagggacttttaagaaatgctaacagatttttctggaggaaatttagacaaaacaatgtcatttagtagaatatttcagtatttaagtggaatttcagtatactgtactatcctttataagtcattaaaataatgtttcatcaaatggttaaatggaccactggtttcttagagaaatgtttttaggcttaattcattcaattgtcaagtacacttagtcttaatacactcaggtttgaacagattattctgaatattaaaatttaatccattcttaatattttaaaacttttgttaagaaaaactgccagtttgtgcttttgaaatgtctgttttgacatcatagtctagtaaaattttgacagtgcatatgtactgttactaaaagctttatatgaaattattaatgtgaagtttttcatttataattcaaggaaggatttcctgaaaacatttcaagggatttatgtctacatatttgtgtgtgtgtgtgtatatatatgtaatatgcatacacagatgcatatgtgtatatataatgaaatttatgttgctggtattttgcattttaaagtgatcaagattcattaggcaaactttggtttaagtaaacatatgttcaaaatcagattaacagatacaggtttcatagagaacaaaggtgatcatttgaagggcatgctgtaatttcacacaattttccagttcaaaaatggagaatacttcgcctaaaatactgttaagtgggttaattgatacaagtttctgtggtggaaaatttatgcaggttttcacgaatccttttttttttttttttttttttttgagacggagtcttgctctgttgccacgctggaatgcagtaacgtgatcttggctcactgcgacctccacctccccagttcaagcgattctcctgcctcagcctccctagtagctgggactacgggtgcacgccaccatgcccagctaatttttgtattttgagtagagacagggtttcaccgtgttggctaggatggtgtctatctcttgaccttgtgatccacccgcctcagcctcccagagtgctgggattacaggtgcgagccactgcgcctggctggttttcatgaatcttgatagacatctataacgttattattttcagtggtgtgcagcatttttgcttcatgagtatgacctaggtatagagatctgataacttgaattcagaatattaagaaaatgaagtaactgattttctaaaaaaaaaaaaaaaaaaaatttctacattataactcacagcattgttccattgcaggttttgcaatgtttgggggtaaagacagtagaaatattattcagtaaacaataatgtgtgaacttttaagatggataatagggcatggactgagtgctgctatcttgaaatgtgcacaggtacacttaccttttttttttttttttttaagtttttcccattcaggaaaacaacattgtgatctgtactacaggaaccaaatgtcatgcgtcatacatgtgggtataaagtacataaaatatatctaactattcataatgtggggtgggtaatactgtctgtgaaataatgtaagaagcttttcacttaaaaaaaatgcattactttcacttaacactagacaccaggtcgaaaattttcaaggttatagtacttatttcaacaattcttagagatgctagctagtgttgaagctaaaaatagctttatttatgctgaattgtgatttttttatgccaaattttttttagttctaatcattgatgatagcttggaaataaataattatgccatggcatttgacagttcattattcctataagaattaaattgagtttagagagaatggtggtgttgagctgattattaacagttactgaaatcaaatatttatttgttacattattccatttgtattttaggtttccttttacattctttttatatgcattctgacattacatattttttaagactatggaaataatttaaagatttaagctctggtggatgattatctgctaagtaagtctgaaaatgtaatattttgataatactgtaatatacctgtcacacaaatgcttttctaatgttttaaccttgagtattgcagttgctgctttgtacagaggttactgcaataaaggaagtggattcattaaacctatttaatgtcca

SEQ ID NO: 28551 - DNA, 5509 bp, Homo sapiens
  source 1..5509: mol_type = unassigned DNA
tctctcacctggtcttgcggctgtggccaccgccggccaggggtgtggagggcgtgctgccggagacgtccgccgggctctgcagttccgccgggggtcgggcagctatggagccgcggcccacggcgccctcctccggcgccccgggactggccggggtcggggagacgccgtcagccgctgcgctggccgcagccagggtggaactgcccggcacggctgtgccctcggtgccggaggatgctgcgcccgcgagccgggacggcggcggggtccgcgatgagggccccgcggcggccggggacgggctgggcagacccttggggcccaccccgagccagagccgtttccaggtggacctggtttccgagaacgccgggcgggccgctgctgcggcggcggcggcggcggcggcagcggcggcggctggtgctggggcgggggccaagcagacccccgcggacggggaagccagcggcgagagcgagccggctaaaggcagcgaggaagccaagggccgcttccgcgtgaacttcgtggacccagctgcctcctcgtcggctgaagacagcctgtcagatgctgccggggtcggagtcgacgggcccaacgtgagcttccagaacggcggggacacggtgctgagcgagggcagcagcctgcactccggcggcggcggcggcagtgggcaccaccagcactactattatgatacccacaccaacacctactacctgcgcaccttcggccacaacaccatggacgctgtgcccaggatcgatcactaccggcacacagccgcgcagctgggcgagaagctgctccggcctagcctggcggagctccacgacgagctggaaaaggaaccttttgaggatggctttgcaaatggggaagaaagtactccaaccagagatgctgtggtcacgtatactgcagaaagtaaaggagtcgtgaagtttggctggatcaagggtgtattagtacgttgtatgttaaacatttggggtgtgatgcttttcattagattgtcatggattgtgggtcaagctggaataggtctatcagtccttgtaataatgatggccactgttgtgacaactatcacaggattgtctacttcagcaatagcaactaatggatttgtaagaggaggaggagcatattatttaatatctagaagtctagggccagaatttggtggtgcaattggtctaatcttcgcctttgccaacgctgttgcagttgctatgtatgtggttggatttgcagaaaccgtggtggagttgcttaaggaacattccatacttatgatagatgaaatcaatgatatccgaattattggagccattacagtcgtgattcttttaggtatctcagtagctggaatggagtgggaagcaaaagctcagattgttcttttggtgatcctacttcttgctattggtgatttcgtcataggaacatttatcccactggagagcaagaagccaaaagggttttttggttataaatctgaaatatttaatgagaactttgggcccgattttcgagaggaagagactttcttttctgtatttgccatcttttttcctgctgcaactggtattctggctggagcaaatatctcaggtgatcttgcagatcctcagtcagccatacccaaaggaacactcctagccattttaattactacattggtttacgtaggaattgcagtatctgtaggttcttgtgttgttcgagatgccactggaaacgttaatgacactatcgtaacagagctaacaaactgtacttctgcagcctgcaaattaaactttgatttttcatcttgtgaaagcagtccttgttcctatggcctaatgaacaacttccaggtaatgagtatggtgtcaggatttacaccactaatttctgcaggtatattttcagccactctttcttcagcattagcatccctagtgagtgctcccaaaatatttcaggctctatgtaaggacaacatctacccagctttccagatgtttgctaaaggttatgggaaaaataatgaacctcttcgtggctacatcttaacattcttaattgcacttggattcatcttaattgctgaactgaatgttattgcaccaattatctcaaacttcttccttgcatcatatgcattgatcaatttttcagtattccatgcatcacttgcaaaatctccaggatggcgtcctgcattcaaatactacaacatgtggatatcacttcttggagcaattctttgttgcatagtaatgttcgtcattaactggtgggctgcattgctaacatatgtgatagtccttgggctgtatatttatgttacctacaaaaaaccagatgtgaattggggatcctctacacaagccctgacttacctgaatgcactgcagcattcaattcgtctttctggagtggaagaccacgtgaaaaactttaggccacagtgtcttgttatgacaggtgctccaaactcacgtccagctttacttcatcttgttcatgatttcacaaaaaatgttggtttgatgatctgtggccatgtacatatgggtcctcgaagacaagccatgaaagagatgtccatcgatcaagccaaatatcagcgatggcttattaagaacaaaatgaaggcattttatgctccagtacatgcagatgacttgagagaaggtgcacagtatttgatgcaggctgctggtcttggtcgtatgaagccaaacacacttgtccttggatttaagaaagattggttgcaagcagatatgagggatgtggatatgtatataaacttatttcatgatgcttttgacatacaatatggagtagtggttattcgcctaaaagaaggtctggatatatctcatcttcaaggacaagaagaattattgtcatcacaagagaaatctcctggcaccaaggatgtggtagtaagtgtggaatatagtaaaaagtccgatttagatacttccaaaccactcagtgaaaaaccaattacacacaaagaatccaaaggccctattgtgcctttaaatgtagctgaccaaaagcttcttgaagctagtacacagtttcagaaaaaacaaggaaagaatactattgatgtctggtggctttttgatgatggaggtttgaccttattgataccttaccttctgacgaccaagaaaaaatggaaagactgtaagatcagagtattcattggtggaaagataaacagaatagaccatgaccggagagcgatggctactttgcttagcaagttccggatagacttttctgatatcatggttctaggagatatcaataccaaaccaaagaaagaaaatattatagcttttgaggaaatcattgagccatacagacttcatgaagatgataaagagcaagatattgcagataaaatgaaagaagatgaaccatggcgaataacagataatgagcttgaactttataagaccaagacataccggcagatcaggttaaatgagttattaaaggaacattcaagcacagctaatattattgtcatgagtctcccagttgcacgaaaaggtgctgtgtctagtgctctctacatggcatggttagaagctctatctaaggacctaccaccaatcctcctagttcgtgggaatcatcagagtgtccttaccttctattcataaatgttctatacagtggacagccctccagaatggtacttcagtgcctagtgtagtaactgaaatcttcaatgacacattaacatcacaatggcgaatggtgacttttctttcacgatttcattaatttgaaagcacacaggaaagttgctccattgataacgtgtatggagacttcggttttagtcaattccatatctcaatcttaatggtgattcttctctgttgaactgaagtttgtgagagtagttttcctttgctacttgaatagcaataaaagcgtgttaactttttgattgatgaaagaagtacaaaaagcctttagccttgaggtgccttctgaaattaaccaaatttcatccatatatcctcttttataaacttatagaatgtcaaactttgccttcaactgtttttatttctagtctcttccactttaaaacaaaatgaacactgcttgtcttcttccattgaccatttagtgttgagtactgtatgtgttttgttaattctataaaggtatctgttagatattaaaggtgagaattagggcaggttaatcaaaaatggggaaggggaaatggtaaccaaaaagtaaccccatggtaaggtttatatgagtatatgtgaatatagagctaggaaaaaaagcccccccaaatacctttttaacccctctgattggctattattactatatttattattatttattgaaaccttagggaagattgaagattcatcccatacttctatataccatgcttaaaaatcacgtcattctttaaacaaaaatactcaagatcatttatatttatttggagagaaaactgtcctaatttagaatttccctcaaatctgagggacttttaagaaatgctaacagatttttctggaggaaatttagacaaaacaatgtcatttagtagaatatttcagtatttaagtggaatttcagtatactgtactatcctttataagtcattaaaataatgtttcatcaaatggttaaatggaccactggtttcttagagaaatgtttttaggcttaattcattcaattgtcaagtacacttagtcttaatacactcaggtttgaacagattattctgaatattaaaatttaatccattcttaatattttaaaacttttgttaagaaaaactgccagtttgtgcttttgaaatgtctgttttgacatcatagtctagtaaaattttgacagtgcatatgtactgttactaaaagctttatatgaaattattaatgtgaagtttttcatttataattcaaggaaggatttcctgaaaacatttcaagggatttatgtctacatatttgtgtgtgtgtgtgtatatatatgtaatatgcatacacagatgcatatgtgtatatataatgaaatttatgttgctggtattttgcattttaaagtgatcaagattcattaggcaaactttggtttaagtaaacatatgttcaaaatcagattaacagatacaggtttcatagagaacaaaggtgatcatttgaagggcatgctgtaatttcacacaattttccagttcaaaaatggagaatacttcgcctaaaatactgttaagtgggttaattgatacaagtttctgtggtggaaaatttatgcaggttttcacgaatccttttttttttttttttttttttttgagacggagtcttgctctgttgccacgctggaatgcagtaacgtgatcttggctcactgcgacctccacctccccagttcaagcgattctcctgcctcagcctccctagtagctgggactacgggtgca

SEQ ID NO: 28552 - DNA, 3815 bp, Homo sapiens
  source 1..3815: mol_type = unassigned DNA
tttatttggaggacactattgaagccacctgctcaggacaatgaaattcttcagttacattctggtttatcgccgatttctcttcgtggttttcactgtgttggttttactacctctgcccatcgtcctccacaccaaggaagcagaatgtgcctacacactctttgtggtcgccacattttggctcacagaagcattgcctctgtcggtaacagctttgctacctagtttaatgttacccatgtttgggatcatgccttctaagaaggtggcatctgcttatttcaaggattttcacttactgctaattggagttatctgtttagcaacatccatagaaaaatggaatttgcacaagagaattgctctgaaaatggtgatgatggttggtgtaaatcctgcatggctgacgctggggttcatgagcagcactgcctttttgtctatgtggctcagcaacacctcgacggctgccatggtgatgcccattgcggaggctgtagtgcagcagatcatcaatgcagaagcagaggtcgaggccactcagatgacttacttcaacggatcaaccaaccacggactagaaattgatgaaagtgttaatggacatgaaataaatgagaggaaagagaaaacaaaaccagttccaggatacaataatgatacagggaaaatttcaagcaaggtggagttggaaaagaactcaggcatgagaaccaaatatcgaacaaagaagggccacgtgacacgtaaacttacgtgtttgtgcattgcctactcttctaccattggtggactgacaacaatcactggtacctccaccaacttgatctttgcagagtatttcaatacacgctatcctgactgtcgttgcctcaactttggatcatggtttacgttttccttcccagctgcccttatcattctactcttatcctggatctggcttcagtggcttttcctaggattcaattttaaggagatgttcaaatgtggcaaaaccaaaacagtccaacaaaaagcttgtgctgaggtgattaagcaagaataccaaaagcttgggccaataaggtatcaagaaattgtgaccttggtcctcttcattataatggctctgctatggtttagtcgagaccccggatttgttcctggttggtctgcacttttttcagagtaccctggttttgctacagattcaactgttgctttacttatagggctgctattctttcttatcccagctaagacactgactaaaactacacctacaggagaaattgttgcttttgattactctccactgattacttggaaagaattccagtcattcatgccctgggatatagccattcttgttggtggagggtttgccctggcagatggttgtgaggagtctggattatctaagtggataggaaataaattatctcctctgggttcattaccagcatggctaataattctgatatcttctttgatggtgacatctttaactgaggtagccagcaatccagctaccattacactctttctcccaatattatctccattggccgaagccattcatgtgaaccctctttatattctgataccttctactctgtgtacttcatttgcattcctcctaccagtagcaaatccacccaatgctattgtcttttcatatggtcatctgaaagtcattgacatggttaaagctggacttggtgtcaacattgttggtgttgctgtggttatgcttggcatatgtacttggattgtacccatgtttgacctctacacttacccttcgtgggctcctgctatgagtaatgagaccatgccataataagcacaaaatttctgactatcttgcggtaatttctggaagacattaatgattgactgtaaaatgtggctctaaataactaatgacacacatttaaatcagttatggtgtagctgctgcaattcctgtgaatacccgaaacctgctgttataactcagagtccatatttgttattgcagtgcaactaaagagcatctatgtgccttcatcaagaagcccatgttttgagattttgctcatgaaccatctgcaacttgcttcatcataagaataatttataacttgaccttcaaagagattagagcatttgtttcatcttacagttggagttcaatgtaacattttaaatgcaatttattatttcagaaatttcccatgaaactaaaaatagaaaataagatatacaagttaattcggtacttggataaatcatttctgcattgttgttccagagaatttgctgagaaatcaaagccatggtcatctggtgatgaagagaaaagtttaatctaaatgatatgtgcatttcctcatttaaaaaatccaattggattattcttaatatatacatgtaatatgaaaattgagattgaagcactaattccaaaattatggctgaatatactaaataacagaaaagttacagataagaatttatttctactgaactctatagttagtgtaatataattcatatttttatgatattggcacactgagaaattcattttgtagagctatggataaggcttgctatgatttgcactattagtacagtatagttagaaaggaaagctgaacactataaaactattaacatattttcgtatatgagtaacaactttgcttaagtgtttatcttagttcagaaatacataatgtcatatgttaaaaataaagagatgtagaaatctaaatgaattatcactgtgtatacagacagaaaaatcacataactctggtgtgttaacattgcaatgaaaaaatgaaaaaaagaaggaaaaaagaataagaatgaaaactgctgacgtattacaaaacagaaaaataaatgatttaaaatcaaatcaaaaagaaaaaactaaacatttaaacaaaaatgggataagaatagtcttctagaagtgaggatgcgaaaaagaatgagtttccaattaccctgatgtgacaattacacattgtagacaggtagcaaaatatcacatacacccccaaaatatgtacaaatattatatatcaataaataaatttttaaagagtaagtgctattggcattccaaaattcagctaaaggaaaaatgatcaaaaacaaagtaaggtgcacagttagcaaaagatgcagatgttatatcacagcaattctcatgctaaaaatacaacaaaagacaaagcaaaaaataaacctttgcttttttttttttttttttttttttgagacggagtctcgctctgtcgcccaggctggagtgcagtggcgggatctcggctcactgcaagctccgcctcccaggttcacgccattctcctgcctcagccaaacctttgctatttttaatcttcgttggcactttccagctgttactgaccttgtcattttttattcaaataagattatttacaaacttattcttgaaactaaatatagtaaagagggtttttaaaataatatttaacatacgaattattaattggccatgttcattatttatctatgtttattaatgggccaatgcaaaaaatcattttttcaaagaaaaatttgtccatgtaaagcttaaattataatattgctgctttgtataactcttctatgtttattctattcatttgttcctttccctaccatattttacacatgtatttataatctgtagtatttattacatttctgcttttttctagtcattcaatttatcactgctgaattgcatcagatcatggatgcatttttattatgaaaaaataaaatgacttttcaaattataa

SEQ ID NO: 28553 - DNA, 2222 bp, Homo sapiens
  source 1..2222: mol_type = unassigned DNA
ccagcctcataatatcaccttttgctttgcatttgttcttaccaggaagcagaatgtgcctacacactctttgtggtcgccacattttggctcacagaagcattgcctctgtcggtaacagctttgctacctagtttaatgttacccatgtttgggatcatgccttctaagaaggtggcatctgcttatttcaaggattttcacttactgctaattggagttatctgtttagcaacatccatagaaaaatggaatttgcacaagagaattgctctgaaaatggtgatgatggttggtgtaaatcctgcatggctgacgctggggttcatgagcagcactgcctttttgtctatgtggctcagcaacacctcgacggctgccatggtgatgcccattgcggaggctgtagtgcagcagatcatcaatgcagaagcagaggtcgaggccactcagatgacttacttcaacggatcaaccaaccacggactagaaattgatgaaagtgttaatggacatgaaataaatgagaggaaagagaaaacaaaaccagttccaggatacaataatgatacagggaaaatttcaagcaaggtggagttggaaaagtacttgcaagtgaggtgaccaaaaaacagctttagactcttaaacttagtgtttaaaatgagaaggctgagagacagtctgcttatggagaaagttggagtatttccccagtgccccaaccccctgccacttgtaccatcacagtcgaaagaagggaagagtctcctacttaacaaggaagaggaagaatcaaaccaacaaagggtgtttacagggtcatgggtgagaaaaagaatgaagttgcttttggcttacaccctagaaagtcatctcttaaataaaacacttacatttggactagtgattccccaagtgaaaccatttcaggatgtgccattgtccaagaactcaggcatgagaaccaaatatcgaacaaagaagggccacgtgacacgtaaacttacgtgtttgtgcattgcctactcttctaccattggtggactgacaacaatcactggtacctccaccaacttgatctttgcagagtatttcaatacacgctatcctgactgtcgttgcctcaactttggatcatggtttacgttttccttcccagctgcccttatcattctactcttatcctggatctggcttcagtggcttttcctaggattcaattttaaggagatgttcaaatgtggcaaaaccaaaacagtccaacaaaaagcttgtgctgaggtgattaagcaagaataccaaaagcttgggccaataaggtatcaagaaattgtgaccttggtcctcttcattataatggctctgctatggtttagtcgagaccccggatttgttcctggttggtctgcacttttttcagagtaccctggttttgctacagattcaactgttgctttacttatagggctgctattctttcttatcccagctaagacactgactaaaactacacctacaggagaaattgttgcttttgattactctccactgattacttggaaagaattccagtcattcatgccctgggatatagccattcttgttggtggagggtttgccctggcagatggttgtgaggagtctggattatctaagtggataggaaataaattatctcctctgggttcattaccagcatggctaataattctgatatcttctttgatggtgacatctttaactgaggtagccagcaatccagctaccattacactctttctcccaatattatctccattggccgaagccattcatgtgaaccctctttatattctgataccttctactctgtgtacttcatttgcattcctcctaccagtagcaaatccacccaatgctattgtcttttcatatggtcatctgaaagtcattgacatggttaaagctggacttggtgtcaacattgttggtgttgctgtggttatgcttggcatatgtacttggattgtacccatgtttgacctctacacttacccttcgtgggctcctgctatgagtaatgagaccatgccataataagcacaaaatttctgactatcttgcggtaatttctggaagacattaatgattgactgtaaaatgtggctctaaataactaatgacacacatttaaatcagttatggtgtagctgctgcaattcctgtgaatacccgaaacc

SEQ ID NO: 28554 - DNA, 2897 bp, Homo sapiens
  source 1..2897: mol_type = unassigned DNA
ctgctttgcaggcccaggctcaaggcaaattataagtagggaaccaatttgagggaaagacatgtgaacagagttaaggtaccacgtcctgggagcgaccagcagccccacctgaagtccgcatgcaactctgacaagctcaggtgcttgttttaaggaaaggggctactagagtcttaccaacagcgagcccaggtgggagatgaaacaggtactccccaaaataggtcatccgagggaggaaaactgatggagagcacaatgtgctctgagcgtttttaatgtttttaagcttttaaatgatttcttcaaggccgagcagcagcagcaaaggtgtggcttaaaggattaagggggtttctgctgacacctagaatgaagttactctattactaatcaagccgagaggaggcccactatgcccccgtttatcatcctttcccagttcctttttgctggtcacaaaacgatgctcatcaatcccacctaaagcaggaggccaggagcccagcctcttgtagaaacagcgagggtataactgccctcccgttctgcccccaagacgaaggaggactctcggaagccaagaaaggtttaagaagtctttctggatagagagcagtgcccaggcaggaagcctttcgccggcagagcggggtccaaggacgagctggagaggacagaggcgcgatgggcctgctgcagggcctgctccgagtccggaagctgctgctggtcgtctgcgtcccgctcctgctgctgcctctgcccgtcctccaccccagcagcgaggcctcgtgtgcttacgtgctgatcgtgactgctgtgtactgggtgtcggaggcagtgcctctgggagctgcagccctggtgccggccttcctttacccgttcttcggagtcctccggtccaatgaggtggcggcggagtacttcaagaacaccacgctgctgctggtgggggtcatctgcgtggcggctgccgtggagaagtggaacctgcataagcgcattgctctgcgcatggtcttgatggccggagccaagccgggcatgctgctgctctgcttcatgtgctgtaccacgttgctgtccatgtggctgtccaacacctccaccaccgccatggtgatgcccatcgtggaggccgtgctgcaggagctggtcagtgctgaggacgagcagctcgtggcgggcaactccaacaccgaagaggccgaacccatcagtctggatgtaaagaacagccaaccttctctggaactcatctttgtcaatgaagagtccaacgcagacctcaccactctgatgcacaacgagaacctgaatggtgtgccctcgatcaccaaccccatcaaaactgcaaaccaacaccagggcaagaagcaacacccatcccaggaaaagccacaagtcctgacccccagccccaggaagcagaagctgaacagaaagtacaggtcccaccatgaccagatgatctgcaagtgcctctccctgagcatatcctactccgctaccattggcggcctgaccaccatcatcggcacctccaccagcctcatcttcctggaacacttcaacaaccagtatccagccgcagaggtggtgaactttggcacctggttcctcttcagcttccccatatccctcatcatgctggtggtcagctggttctggatgcactggctgttcctgggctgcaattttaaagagacctgctctctgagcaagaagaagaagaccaaaagggaacagttgtcagagaagaggatccaagaagaatatgaaaaactgggagacattagctacccagaaatggtgactggatttttcttcatcctgatgaccgtactgtggtttacccgggagcctggctttgtccctggctgggattctttctttgaaaagaaaggctaccgtactgatgccacagtctctgtcttccttggcttcctcctcttcctcattccagcgaagaagccctgctttgggaaaaagaatgatggagagaaccaggagcactcactggggaccgagcccatcatcacgtggaaggacttccagaagaccatgccctgggagattgtcattctggttgggggaggctatgctctggcttctggtagcaagagctctggcctctctacatggattgggaaccagatgttgtccctgagcagcctcccaccgtgggctgtcaccctgctggcatgcatcctcgtgtccattgtcactgagtttgtgagcaacccagcaaccatcaccatcttcctgcccatcctgtgcagcctgtctgaaacgctgcacattaaccccctctacaccctgatcccagtcaccatgtgcatctcctttgcagtgatgctgcctgtgggcaatccccctaatgccatcgtcttcagctatgggcactgccagatcaaagatatggtgaaagctggcctgggagtcaacgttattggactggtgatagtaatggtggccatcaacacctggggagttagcctcttccacctggacacttacccagcatgggcgagggtcagcaacatcactgatcaagcctaacgccaagtgtacaaactggcccaaccacaggagctgccagtatccagcagtatctggaccacaggcaaagaaaaccactaggaccaccaggagcacacaaccccagacccacgccggagggcatccctccaccagaagattccgccacctcaagtgaactgcaggaatcctccaacaaccacaaacacatgcttcgctgttagtgtcttcttcctgccctcagcaccacagctcaagaaaacctaaagtttcaatacaagccataggctcacagaaaaagaaaaagaaaataaaaattaaattaaaaaaaaagaagacaaagaaaa

SEQ ID NO: 28555 - DNA, 1723 bp, Homo sapiens
  source 1..1723: mol_type = unassigned DNA
agctgcccctcactcgtctcgcccgccagtctccctcccgcgcgatggcctcggcgctgagctatgtctccaagttcaagtccttcgtgatcttgttcgtcaccccgctcctgctgctgccactcgtcattctgatgcccgccaagtttgtcaggtgtgcctacgtcatcatcctcatggccatttactggtgcacagaagtcatccctctggctgtcacctctctcatgcctgtcttgcttttcccactcttccagattctggactccaggcaggtgtgtgtccagtacatgaaggacaccaacatgctgttcctgggcggcctcatcgtggccgtggctgtggagcgctggaacctgcacaagaggatcgccctgcgcacgctcctctgggtgggggccaagcctgcacggctgatgctgggcttcatgggcgtcacagccctcctgtccatgtggatcagtaacacggcaaccacggccatgatggtgcccatcgtggaggccatattgcagcagatggaagccacaagcgcagccaccgaggccggcctggagctggtggacaagggcaaggccaaggagctgccagggagtcaagtgatttttgaaggccccactctggggcagcaggaagaccaagagcggaagaggttgtgtaaggccatgaccctgtgcatctgctacgcggccagcatcgggggcaccgccaccctgaccgggacgggacccaacgtggtgctcctgggccagatgaacgagttgtttcctgacagcaaggacctcgtgaactttgcttcctggtttgcatttgcctttcccaacatgctggtgatgctgctgttcgcctggctgtggctccagtttgtttacatgagattcaattttaaaaagtcctggggctgcgggctagagagcaagaaaaacgagaaggctgccctcaaggtgctgcaggaggagtaccggaagctggggcccttgtccttcgcggagatcaacgtgctgatctgcttcttcctgctggtcatcctgtggttctcccgagaccccggcttcatgcccggctggctgactgttgcctgggtggagggtgagacaaagtatgtctccgatgccactgtggccatctttgtggccaccctgctattcattgtgccttcacagaagcccaagtttaacttccgcagccagactgaggaagaaaggaaaactccattttatccccctcccctgctggattggaaggtaacccaggagaaagtgccctggggcatcgtgctgctactagggggcggatttgctctggctaaaggatccgaggcctcggggctgtccgtgtggatggggaagcagatggagcccttgcacgcagtgcccccggcagccatcaccttgatcttgtccttgctcgttgccgtgttcactgagtgcacaagcaacgtggccaccaccaccttgttcctgcccatctttgcctccatggtgaaaacaggagtcataatgaacataattggagtcttctgtgtgtttttggctgtcaacacctggggacgggccatatttgacttggatcatttccctgactgggctaatgtgacacatattgagacttaggaagagccacaagaccacacacacagcccttaccctcctcaggactaccgaaccttctggcacaccttgtacagagttttggggttcacaccccaaaatgacccaacgat

SEQ ID NO: 28556 - DNA, 3236 bp, Homo sapiens
  source 1..3236: mol_type = unassigned DNA
tcactcgtctcgcccgccagtctccctcccgcgcgatggcctcggcgctgagctatgtctccaagttcaagtccttcgtgatcttgttcgtcaccccgctcctgctgctgccactcgtcattctgatgcccgccaagtttgtcaggtgtgcctacgtcatcatcctcatggccatttactggtgcacagaagtcatccctctggctgtcacctctctcatgcctgtcttgcttttcccactcttccagattctggactccaggcaggtgtgtgtccagtacatgaaggacaccaacatgctgttcctgggcggcctcatcgtggccgtggctgtggagcgctggaacctgcacaagaggatcgccctgcgcacgctcctctgggtgggggccaagcctgcacggctgatgctgggcttcatgggcgtcacagccctcctgtccatgtggatcagtaacacggcaaccacggccatgatggtgcccatcgtggaggccatattgcagcagatggaagccacaagcgcagccaccgaggccggcctggagctggtggacaagggcaaggccaaggagctgccagggagtcaagtgatttttgaaggccccactctggggcagcaggaagaccaagagcggaagaggttgtgtaaggccatgaccctgtgcatctgctacgcggccagcatcgggggcaccgccaccctgaccgggacgggacccaacgtggtgctcctgggccagatgaacgagttgtttcctgacagcaaggacctcgtgaactttgcttcctggtttgcatttgcctttcccaacatgctggtgatgctgctgttcgcctggctgtggctccagtttgtttacatgagattcaattttaaaaagtcctggggctgcgggctagagagcaagaaaaacgagaaggctgccctcaaggtgctgcaggaggagtaccggaagctggggcccttgtccttcgcggagatcaacgtgctgatctgcttcttcctgctggtcatcctgtggttctcccgagaccccggcttcatgcccggctggctgactgttgcctgggtggagggtgagacaaagtatgtctccgatgccactgtggccatctttgtggccaccctgctattcattgtgccttcacagaagcccaagtttaacttccgcagccagactgaggaagaaaggaaaactccattttatccccctcccctgctggattggaaggtaacccaggagaaagtgccctggggcatcgtgctgctactagggggcggatttgctctggctaaaggatccgaggcctcggggctgtccgtgtggatggggaagcagatggagcccttgcacgcagtgcccccggcagccatcaccttgatcttgtccttgctcgttgccgtgttcactgagtgcacaagcaacgtggccaccaccaccttgttcctgcccatctttgcctccatgtctcgctccatcggcctcaatccgctgtacatcatgctgccctgtaccctgagtgcctcctttgccttcatgttgcctgtggccacccctccaaatgccatcgtgttcacctatgggcacctcaaggttgctgacatggtgaaaacaggagtcataatgaacataattggagtcttctgtgtgtttttggctgtcaacacctggggacgggccatatttgacttggatcatttccctgactgggctaatgtgacacatattgagacttaggaagagccacaagaccacacacacagcccttaccctcctcaggactaccgaaccttctggcacaccttgtacagagttttggggttcacaccccaaaatgacccaacgatgtccacacaccaccaaaacccagccaatgggccacctcttcctccaagcccagatgcagagatggtcatgggcagctggagggtaggctcagaaatgaagggaacccctcagtgggctgctggacccatctttcccaagccttgccattatctctgtgagggaggccaggtagccgagggatcaggatgcaggctgctgtacccgctctgcctcaagcatcccccacacagggctctggttttcactcgcttcgtcctagatagtttaaatgggaatcggatcccctggttgagagctaagacaaccacctaccagtgcccatgtcccttccagctcaccttgagcagcctcagatcatctctgtcactctggaagggacaccccagccagggacggaatgcctggtcttgagcaacctcccactgctggagtgcgagtgggaatcagagcctcctgaagcctctgggaactcctcctgtggccaccaccaaaggatgaggaatctgagttgccaacttcaggacgacacctggcttgccacccacagtgcaccacaggccaacctacgcccttcatcacttggttctgttttaatcgactggccccctgtcccacctctccagtgagcctccttcaactccttggtcccctgttgtctgggtcaacatttgccgagacgccttggctggcaccctctggggtcccccttttctcccaggcaggtcatcttttctgggagatgcttcccctgccatccccaaatagctaggatcacactccaagtatgggcagtgatggcgctctgggggccacagtgggctatctaggccctccctcacctgaggcccagagtggacacagctgttaatttccactggctatgccacttcagagtctttcatgccagcgtttgagctcctctgggtaaaatcttccctttgttgactggccttcacagccatggctggtgacaacagaggatcgttgagattgagcagcgcttggtgatctctcagcaaacaacccctgcccgtgggccaatctacttgaagttactcggacaaagaccccaaagtggggcaacaactccagagaggctgtgggaatcttcagaacccccctgtaagagacagacatgagagacaagcatcttctttcccccgcaagtccattttatttccttcttgtgctgctctggaagagaggcagtagcaaagagatgagctcctggatggcattttccagggcaggagaaagtatgagagcctcaggaaaccccatcaaggaccgagtatgtgtctggttccttgggtgggacgattcctgaccacactgtccagctcttgctctcattaaatgctctgtctcccgcggaaagctcca

SEQ ID NO: 28557 - DNA, 1738 bp, Homo sapiens
  source 1..1738: mol_type = unassigned DNA
actcgtctcgcccgccagtctccctcccgcgcgatggcctcggcgctgagctatgtctccaagttcaagtccttcgtgatcttgttcgtcaccccgctcctgctgctgccactcgtcattctgatgcccgccaaggtgtgtgtccagtacatgaaggacaccaacatgctgttcctgggcggcctcatcgtggccgtggctgtggagcgctggaacctgcacaagaggatcgccctgcgcacgctcctctgggtgggggccaagcctgcacggctgatgctgggcttcatgggcgtcacagccctcctgtccatgtggatcagtaacacggcaaccacggccatgatggtgcccatcgtggaggccatattgcagcagatggaagccacaagcgcagccaccgaggccggcctggagctggtggacaagggcaaggccaaggagctgccagggagtcaagtgatttttgaaggccccactctggggcagcaggaagaccaagagcggaagaggttgtgtaaggccatgaccctgtgcatctgctacgcggccagcatcgggggcaccgccaccctgaccgggacgggacccaacgtggtgctcctgggccagatgaacgagttgtttcctgacagcaaggacctcgtgaactttgcttcctggtttgcatttgcctttcccaacatgctggtgatgctgctgttcgcctggctgtggctccagtttgtttacatgagattcaattttaaaaagtcctggggctgcgggctagagagcaagaaaaacgagaaggctgccctcaaggtgctgcaggaggagtaccggaagctggggcccttgtccttcgcggagatcaacgtgctgatctgcttcttcctgctggtcatcctgtggttctcccgagaccccggcttcatgcccggctggctgactgttgcctgggtggagggtgagacaaagtatgtctccgatgccactgtggccatctttgtggccaccctgctattcattgtgccttcacagaagcccaagtttaacttccgcagccagactgaggaagaaaggaaaactccattttatccccctcccctgctggattggaaggtaacccaggagaaagtgccctggggcatcgtgctgctactagggggcggatttgctctggctaaaggatccgaggcctcggggctgtccgtgtggatggggaagcagatggagcccttgcacgcagtgcccccggcagccatcaccttgatcttgtccttgctcgttgccgtgttcactgagtgcacaagcaacgtggccaccaccaccttgttcctgcccatctttgcctccatgtctcgctccatcggcctcaatccgctgtacatcatgctgccctgtaccctgagtgcctcctttgccttcatgttgcctgtggccacccctccaaatgccatcgtgttcacctatgggcacctcaaggttgctgacatggtgaaaacaggagtcataatgaacataattggagtcttctgtgtgtttttggctgtcaacacctggggacgggccatatttgacttggatcatttccctgactgggctaatgtgacacatattgagacttaggaagagccacaagaccacacacacagcccttaccctcctcaggactaccgaaccttctggcacaccttgtacagagttttggggttcacaccccaaaatgacccaacgatgtccacacaccaccaaa

SEQ ID NO: 28558 - DNA, 3145 bp, Homo sapiens
  source 1..3145: mol_type = unassigned DNA
aatccccggggactgtggccccttcttaagcccgcggcgcctctagctgcccctcactcgtctcgcccgccagtctccctcccgcgcgatggcctcggcgctgagctatgtctccaagttcaagtccttcgtgatcttgttcgtcaccccgctcctgctgctgccactcgtcattctgatgcccgccaagtttgtcaggtgtgcctacgtcatcatcctcatggccatttactggtgcacagaagtcatccctctggctgtcacctctctcatgcctgtcttgcttttcccactcttccagattctggactccaggcaggtgtgtgtccagtacatgaaggacaccaacatgctgttcctgggcggcctcatcgtggccgtggctgtggagcgctggaacctgcacaagaggatcgccctgcgcacgctcctctgggtgggggccaagcctgcacggctgatgctgggcttcatgggcgtcacagccctcctgtccatgtggatcagtaacacggcaaccacggccatgatggtgcccatcgtggaggccatattgcagcagatggaagccacaagcgcagccaccgaggccggcctggagctggtggacaagggcaaggccaaggagctgccagggagtcaagtgatttttgaaggccccactctggggcagcaggaagaccaagagcggaagaggttgtgtaaggccatgaccctgtgcatctgctacgcggccagcatcgggggcaccgccaccctgaccgggacgggacccaacgtggtgctcctgggccagatgaacgagttgtttcctgacagcaaggacctcgtgaactttgcttcctggtttgcatttgcctttcccaacatgctggtgatgctgctgttcgcctggctgtggctccagtttgtttacatgagattcaattttaaaaagtcctggggctgcgggctagagagcaagaaaaacgagaaggctgccctcaaggtgctgcaggaggagtaccggaagctggggcccttgtccttcgcggagatcaacgtgctgatctgcttcttcctgctggtcatcctgtggttctcccgagaccccggcttcatgcccggctggctgactgttgcctgggtggagggtgagacaaagtatgtctccgatgccactgtggccatctttgtggccaccctgctattcattgtgccttcacagaagcccaagtttaacttccgcagccagactgaggaagaaaggaaaactccattttatccccctcccctgctggattggaaggtaacccaggagaaagtgccctggggcatcgtgctgctactagggggcggatttgctctggctaaaggatccgaggcctcggggctgtccgtgtggatggggaagcagatggagcccttgcacgcagtgcccccggcagccatcaccttgatcttgtccttgctcgttgccgtgttcactgagtgcacaagcaacgtggccaccaccaccttgttcctgcccatctttgcctccatggtgaaaacaggagtcataatgaacataattggagtcttctgtgtgtttttggctgtcaacacctggggacgggccatatttgacttggatcatttccctgactgggctaatgtgacacatattgagacttaggaagagccacaagaccacacacacagcccttaccctcctcaggactaccgaaccttctggcacaccttgtacagagttttggggttcacaccccaaaatgacccaacgatgtccacacaccaccaaaacccagccaatgggccacctcttcctccaagcccagatgcagagatggtcatgggcagctggagggtaggctcagaaatgaagggaacccctcagtgggctgctggacccatctttcccaagccttgccattatctctgtgagggaggccaggtagccgagggatcaggatgcaggctgctgtacccgctctgcctcaagcatcccccacacagggctctggttttcactcgcttcgtcctagatagtttaaatgggaatcggatcccctggttgagagctaagacaaccacctaccagtgcccatgtcccttccagctcaccttgagcagcctcagatcatctctgtcactctggaagggacaccccagccagggacggaatgcctggtcttgagcaacctcccactgctggagtgcgagtgggaatcagagcctcctgaagcctctgggaactcctcctgtggccaccaccaaaggatgaggaatctgagttgccaacttcaggacgacacctggcttgccacccacagtgcaccacaggccaacctacgcccttcatcacttggttctgttttaatcgactggccccctgtcccacctctccagtgagcctccttcaactccttggtcccctgttgtctgggtcaacatttgccgagacgccttggctggcaccctctggggtcccccttttctcccaggcaggtcatcttttctgggagatgcttcccctgccatccccaaatagctaggatcacactccaagtatgggcagtgatggcgctctgggggccacagtgggctatctaggccctccctcacctgaggcccagagtggacacagctgttaatttccactggctatgccacttcagagtctttcatgccagcgtttgagctcctctgggtaaaatcttccctttgttgactggccttcacagccatggctggtgacaacagaggatcgttgagattgagcagcgcttggtgatctctcagcaaacaacccctgcccgtgggccaatctacttgaagttactcggacaaagaccccaaagtggggcaacaactccagagaggctgtgggaatcttcagaacccccctgtaagagacagacatgagagacaagcatcttctttcccccgcaagtccattttatttccttcttgtgctgctctggaagagaggcagtagcaaagagatgagctcctggatggcattttccagggcaggagaaagtatgagagcctcaggaaaccccatcaaggaccgagtatgtgtctggttccttgggtgggacgattcctgaccacactgtccagctcttgctctcattaaatgctctgtctcccgcggaaa

SEQ ID NO: 28559 - DNA, 2711 bp, Homo sapiens
  source 1..2711: mol_type = unassigned DNA
ggagaacagcagaaaggaaaggccgggccagcggaggtggcttgggggctgcctgtggagggtggctgggggactctccttccttctccagctcctccagcaccaccctcagcagcctccaagaacagaaggagttaacgctgggattaacttcttgaaggaacctgaagttttttaatccttgttctttcctccttccttctccctctcccttcctgatctttactccgcctgtgggtccctcctccttactctcacctccccaactccaaaaacactctgattgccagactgggtcaatggttaacactcaactggctttatataagcctgccacctgcctgcttggctgcatctttggtccttctgttacccagctcctggaggcagtggctgtagcagcccttgctgctccacaccatggccacctgctggcaggccctgtgggcctatcgctcctacctgatcgtgttcttcgtgcccattctcctgctgcctctgcccatcctcgtccccagtaaggaggcctactgcgcgtatgccatcatcctcatggcgctcttctggtgcactgaggccctgcccctggccgtcactgccctcttccccttaatcctgttccctatgatgggcatcgtggatgcctctgaggttgccgtcgagtatcttaaggactccaacctcctgttcttcggggggctgctggtggccatcgcggtggaacactggaacctgcataaacgcatcgccctccgtgtcctcctcatcgttggggtgcggcctgccccgctaatcctgggcttcatgctggtcacggccttcctgtccatgtggatcagcaacacggccacctcagccatgatggtgcccatcgcacatgccgtcctggaccagctgcacagctcgcaagccagcagcaacgtcgaggagggcagcaacaaccccaccttcgagctccaggaaccaagtccccagaaggaggtgaccaagcttgataatgggcaggccctccctgtcacgtctgcctcttcggaggggagggcacatctcagccagaagcatctccacctcacccagtgcatgagcctgtgcgtgtgctactccgccagcatcgggggcatcgccacgctgactggcaccgcacccaacctggtgctgcaaggccagatcaactcgctcttcccccaaaacggcaacgtggtgaacttcgcctcctggttcagcttcgccttccccaccatggtcatcttgctgctgctggcctggttgtggctgcagatcctcttcctgggcttcaacttccggaagaactttggcattggggaaaagatgcaggagcaacagcaggcagcctactgcgtcatccagaccgagcacaggctgctgggccccatgacctttgcagaaaaggccatcagcatcctattcgtcatcctggtgctgctctggttcacccgggagccgggcttttttcttggctggggcaatttggcttttcccaatgccaagggggagagcatggtgtccgatgggacagtggccatcttcatcggcataattatgttcatcataccctccaagttcccagggctgacccaggacccagaaaacccagggaagctgaaggcccctcttggcctcctcgactggaagacggtgaaccagaagatgccgtggaatatcgtgttattgctgggtggtggctatgccctggccaagggcagtgagcgatcgggcctgtcagagtggctgggaaacaagctgaccccactgcagagtgtgccagctccagccattgccatcatcctctccctcctggtggccaccttcaccgagtgcactagcaacgtggccaccactacgatcttcctgcccatcctagcctccatggcccaggccatctgcctccaccctctctacgtcatgctcccctgcactctggccacctccctggccttcatgttgcctgtggccaccccgcccaatgccatcgtcttctctttcggggacctcaaagtgttggatatggcccgggcaggattcctcctcaacatcattggagtcctgatcatcgcactggccatcaacagctggggcatccccctcttcagcctgcactctttcccctcctgggcacagtccaacaccacagcccagtgcctgccaagcctggccaacaccaccacaccaagcccctaggctggggcacagcctggccatgcccaggaagacccaccccattcccactcctctgagcccggaggggacaccccaagctccaagctccaagctccaggccaaaggctgaaaggcacgtgtgtacataatctcttgcgtgtctgtaaggaaggggtgtatgctcagtttcctatgtgctggaataaaaggtgtgtgcatgtgtgtgtgcgcatatgtgtgcgcctgcatggatgtgaggggtgtgtgacgtgaggctatctgaggggggctgtgtgcatgcacatgatcctaggtatgtatgttggacagtgcacacgtgtgtgttcacagacaatacaacatgccctctctggtgccccaggtcttggtatccccagcttagtgaccagacttacttgcactgtatttattgaaattcaggcttggagtggcctgggaggagggcctgccagcagctgccacgggaacagcctctgggctgttaaagtcacattaaagtctttttcagtaaa

SEQ ID NO: 28560 - DNA, 2502 bp, Homo sapiens
  source 1..2502: mol_type = unassigned DNA
atctttggtccttctgttacccagctcctggaggcagtggctgtagcagcccttgctgctccacaccatggccacctgctggcaggccctgtgggcctatcgctcctacctgatcgtgttcttcgtgcccattctcctgctgcctctgcccatcctcgtccccagtaaggaggcctactgcgcgtatgccatcatcctcatggcgctcttctggtgcactgaggccctgcccctggccgtcactgccctcttccccttaatcctgttccctatgatgggcatcgtggatgcctctgagatcattcagagaccatttccatccagtttcgagagcccaggggaatgccagtctgtgggaatgtcagtgactgcatcccataacctcgggggcaccgtgggagactccagggtcttcccgccgctcagccatgtctccacctgccaggttgccgtcgagtatcttaaggactccaacctcctgttcttcggggggctgctggtggccatcgcggtggaacactggaacctgcataaacgcatcgccctccgtgtcctcctcatcgttggggtgcggcctgccccgctaatcctgggcttcatgctggtcacggccttcctgtccatgtggatcagcaacacggccacctcagccatgatggtgcccatcgcacatgccgtcctggaccagctgcacagctcgcaagccagcagcaacgtcgaggagggcagcaacaaccccaccttcgagctccaggaaccaagtccccagaaggaggtgaccaagcttgataatgggcaggccctccctgtcacgtctgcctcttcggaggggagggcacatctcagccagaagcatctccacctcacccagtgcatgagcctgtgcgtgtgctactccgccagcatcgggggcatcgccacgctgactggcaccgcacccaacctggtgctgcaaggccagatcaactcgctcttcccccaaaacggcaacgtggtgaacttcgcctcctggttcagcttcgccttccccaccatggtcatcttgctgctgctggcctggttgtggctgcagatcctcttcctgggcttcaacttccggaagaactttggcattggggaaaagatgcaggagcaacagcaggcagcctactgcgtcatccagaccgagcacaggctgctgggccccatgacctttgcagaaaaggccatcagcatcctattcgtcatcctggtgctgctctggttcacccgggagccgggcttttttcttggctggggcaatttggcttttcccaatgccaagggggagagcatggtgtccgatgggacagtggccatcttcatcggcataattatgttcatcataccctccaagttcccagggctgacccaggacccagaaaacccagggaagctgaaggcccctcttggcctcctcgactggaagacggtgaaccagaagatgccgtggaatatcgtgttattgctgggtggtggctatgccctggccaagggcagtgagcgatcgggcctgtcagagtggctgggaaacaagctgaccccactgcagagtgtgccagctccagccattgccatcatcctctccctcctggtggccaccttcaccgagtgcactagcaacgtggccaccactacgatcttcctgcccatcctagcctccatggcccaggccatctgcctccaccctctctacgtcatgctcccctgcactctggccacctccctggccttcatgttgcctgtggccaccccgcccaatgccatcgtcttctctttcggggacctcaaagtgttggatatggcccgggcaggattcctcctcaacatcattggagtcctgatcatcgcactggccatcaacagctggggcatccccctcttcagcctgcactctttcccctcctgggcacagtccaacaccacagcccagtgcctgccaagcctggccaacaccaccacaccaagcccctaggctggggcacagcctggccatgcccaggaagacccaccccattcccactcctctgagcccggaggggacaccccaagctccaagctccaagctccaggccaaaggctgaaaggcacgtgtgtacataatctcttgcgtgtctgtaaggaaggggtgtatgctcagtttcctatgtgctggaataaaaggtgtgtgcatgtgtgtgtgcgcatatgtgtgcgcctgcatggatgtgaggggtgtgtgacgtgaggctatctgaggggggctgtgtgcatgcacatgatcctaggtatgtatgttggacagtgcacacgtgtgtgttcacagacaatacaacatgccctctctggtgccccaggtcttggtatccccagcttagtgaccagacttacttgcactgtatttattgaaattcaggcttggagtggcctgggaggagggcctgccagcagctgccacgggaacagcctctgggctgttaaagtcacattaaagtctttttcagt

SEQ ID NO: 28561 - DNA, 2466 bp, Homo sapiens
  source 1..2466: mol_type = unassigned DNA
gggcctatcgctcctacctgatcgtgttcttcgtgcccattctcctgctgcctctgcccatcctcgtccccagtaagctgtgaaatgtgaacaatagttattacctctgagagcaaataaatgcaacttgtaaaagcatttgaagcacatagaatatgacgcctggcacaaagtcatcctccaatacttatacagaaacttcttcctgaatcagcagagaggcctactgcgcgtatgccatcatcctcatggcgctcttctggtgcactgaggccctgcccctggccgtcactgccctcttccccttaatcctgttccctatgatgggcatcgtggatgcctctgagatcattcagagaccatttccatccagtttcgagagcccaggggaatgccagtctgtgggaatgttgccgtcgagtatcttaaggactccaacctcctgttcttcggggggctgctggtggccatcgcggtggaacactggaacctgcataaacgcatcgccctccgtgtcctcctcatcgttggggtgcggcctgccccgctaatcctgggcttcatgctggtcacggccttcctgtccatgtggatcagcaacacggccacctcagccatgatggtgcccatcgcacatgccgtcctggaccagctgcacagctcgcaagccagcagcaacgtcgaggagggcagcaacaaccccaccttcgagctccaggaaccaagtccccagaaggaggtgaccaagcttgataatgggcaggccctccctgtcacgtctgcctcttcggaggggagggcacatctcagccagaagcatctccacctcacccagtgcatgagcctgtgcgtgtgctactccgccagcatcgggggcatcgccacgctgactggcaccgcacccaacctggtgctgcaaggccagatcaactcgctcttcccccaaaacggcaacgtggtgaacttcgcctcctggttcagcttcgccttccccaccatggtcatcttgctgctgctggcctggttgtggctgcagatcctcttcctgggcttcaacttccggaagaactttggcattggggaaaagatgcaggagcaacagcaggcagcctactgcgtcatccagaccgagcacaggctgctgggccccatgacctttgcagaaaaggccatcagcatcctattcgtcatcctggtgctgctctggttcacccgggagccgggcttttttcttggctggggcaatttggcttttcccaatgccaagggggagagcatggtgtccgatgggacagtggccatcttcatcggcataattatgttcatcataccctccaagttcccagggctgacccaggacccagaaaacccagggaagctgaaggcccctcttggcctcctcgactggaagacggtgaaccagaagatgccgtggaatatcgtgttattgctgggtggtggctatgccctggccaagggcagtgagcgatcgggcctgtcagagtggctgggaaacaagctgaccccactgcagagtgtgccagctccagccattgccatcatcctctccctcctggtggccaccttcaccgagtgcactagcaacgtggccaccactacgatcttcctgcccatcctagcctccatggcccaggccatctgcctccaccctctctacgtcatgctcccctgcactctggccacctccctggccttcatgttgcctgtggccaccccgcccaatgccatcgtcttctctttcggggacctcaaagtgttggatatggcccgggcaggattcctcctcaacatcattggagtcctgatcatcgcactggccatcaacagctggggcatccccctcttcagcctgcactctttcccctcctgggcacagtccaacaccacagcccagtgcctgccaagcctggccaacaccaccacaccaagcccctaggctggggcacagcctggccatgcccaggaagacccaccccattcccactcctctgagcccggaggggacaccccaagctccaagctccaagctccaggccaaaggctgaaaggcacgtgtgtacataatctcttgcgtgtctgtaaggaaggggtgtatgctcagtttcctatgtgctggaataaaaggtgtgtgcatgtgtgtgtgcgcatatgtgtgcgcctgcatggatgtgaggggtgtgtgacgtgaggctatctgaggggggctgtgtgcatgcacatgatcctaggtatgtatgttggacagtgcacacgtgtgtgttcacagacaatacaacatgccctctctggtgccccaggtcttggtatccccagcttagtgaccagacttacttgcactgtatttattgaaattcaggcttggagtggcctgggaggagggcctgccagcagctgccacgggaacagcctctgggctgttaaagtcacattaaagtctttttcagt

SEQ ID NO: 28562 - DNA, 1276 bp, Homo sapiens
  source 1..1276: mol_type = unassigned DNA
atctttggtccttctgttacccagctcctggaggcagtggctgtagcagcccttgctgctccacaccatggccacctgctggcaggccctgtgggcctatcgctcctacctgatcgtgttcttcgtgcccattctcctgctgcctctgcccatcctcgtccccagtaaggaggcctactgcgcgtatgccatcatcctcatggcgctcttctggtgcactgaggccctgcccctggccgtcactgccctcttccccttaatcctgttccctatgatgggcatcgtggatgcctctgaggttgccgtcgagtatcttaaggactccaacctcctgttcttcggggggctgctggtggccatcgcggtggaacactggaacctgcataaacgcatcgccctccgtgtcctcctcatcgttggggtgcggcctgccccgctaatcctgggcttcatgctggtcacggccttcctgtccatgtggatcagcaacacggccacctcagccatgatggtgcccatcgcacatgccgtcctggaccagctgcacagctcgcaagccagcagcaacgtcgaggagggcagcaacaaccccaccttcgagctccaggaaccaagtccccagaaggaggtgaccaagcttgataatgggcaggccctccctgtcacgtctgcctcttcggaggggagggcacatctcagccagaagcatctccacctcacccagtgcatgagcctgtgcgtgtgctactccgccagcatcgggggcatcgccacgctgactggcaccgcacccaacctggtgctgcaaggccagatcaactcgctcttcccccaaaacggcaacgtggtgaacttcgcctcctggttcagcttcgccttccccaccatggtcatcttgctgctgctggcctggttgtggctgcagatcctcttcctgggcttcaacttccggaagaactttggcattggggaaaagatgcaggagcaacagcaggcagcctactgcgtcatccagaccgagcacaggctgctgggccccatgacctttgcagaaaaggccatcagcatcctattcgtcatcctggtgctgctctggttcacccgggagccgggctttttttggctggggcaatttggcttttcccaatgccaagggggagaggtgagagttgcaggggttgggaggaggacacatctggggctcacatgctcgggaaggagggaagggtatagggcccccattgcagaacaggaggtaacacttggtgggggatga

SEQ ID NO: 28563 - DNA, 2226 bp, Homo sapiens
  source 1..2226: mol_type = unassigned DNA
atctttggtccttctgttacccagctcctggaggcagtggctgtagcagcccttgctgctccacaccatggccacctgctggcaggccctgtgggcctatcgctcctacctgatcgtgttcttcgtgcccattctcctgctgcctctgcccatcctcgtccccagtaaggttgccgtcgagtatcttaaggactccaacctcctgttcttcggggggctgctggtggccatcgcggtggaacactggaacctgcataaacgcatcgccctccgtgtcctcctcatcgttggggtgcggcctgccccgctaatcctgggcttcatgctggtcacggccttcctgtccatgtggatcagcaacacggccacctcagccatgatggtgcccatcgcacatgccgtcctggaccagctgcacagctcgcaagccagcagcaacgtcgaggagggcagcaacaaccccaccttcgagctccaggaaccaagtccccagaaggaggtgaccaagcttgataatgggcaggccctccctgtcacgtctgcctcttcggaggggagggcacatctcagccagaagcatctccacctcacccagtgcatgagcctgtgcgtgtgctactccgccagcatcgggggcatcgccacgctgactggcaccgcacccaacctggtgctgcaaggccagatcaactcgctcttcccccaaaacggcaacgtggtgaacttcgcctcctggttcagcttcgccttccccaccatggtcatcttgctgctgctggcctggttgtggctgcagatcctcttcctgggcttcaacttccggaagaactttggcattggggaaaagatgcaggagcaacagcaggcagcctactgcgtcatccagaccgagcacaggctgctgggccccatgacctttgcagaaaaggccatcagcatcctattcgtcatcctggtgctgctctggttcacccgggagccgggcttttttcttggctggggcaatttggcttttcccaatgccaagggggagagcatggtgtccgatgggacagtggccatcttcatcggcataattatgttcatcataccctccaagttcccagggctgacccaggacccagaaaacccagggaagctgaaggcccctcttggcctcctcgactggaagacggtgaaccagaagatgccgtggaatatcgtgttattgctgggtggtggctatgccctggccaagggcagtgagcgatcgggcctgtcagagtggctgggaaacaagctgaccccactgcagagtgtgccagctccagccattgccatcatcctctccctcctggtggccaccttcaccgagtgcactagcaacgtggccaccactacgatcttcctgcccatcctagcctccatggcccaggccatctgcctccaccctctctacgtcatgctcccctgcactctggccacctccctggccttcatgttgcctgtggccaccccgcccaatgccatcgtcttctctttcggggacctcaaagtgttggatatggcccgggcaggattcctcctcaacatcattggagtcctgatcatcgcactggccatcaacagctggggcatccccctcttcagcctgcactctttcccctcctgggcacagtccaacaccacagcccagtgcctgccaagcctggccaacaccaccacaccaagcccctaggctggggcacagcctggccatgcccaggaagacccaccccattcccactcctctgagcccggaggggacaccccaagctccaagctccaagctccaggccaaaggctgaaaggcacgtgtgtacataatctcttgcgtgtctgtaaggaaggggtgtatgctcagtttcctatgtgctggaataaaaggtgtgtgcatgtgtgtgtgcgcatatgtgtgcgcctgcatggatgtgaggggtgtgtgacgtgaggctatctgaggggggctgtgtgcatgcacatgatcctaggtatgtatgttggacagtgcacacgtgtgtgttcacagacaatacaacatgccctctctggtgccccaggtcttggtatccccagcttagtgaccagacttacttgcactgtatttattgaaattcaggcttggagtggcctgggaggagggcctgccagcagctgccacgggaacagcctctgggctgttaaagtcacattaaagtctttttcagt

SEQ ID NO: 28564 - DNA, 4017 bp, Homo sapiens
  source 1..4017: mol_type = unassigned DNA
ccgccaggcgatcgcgctgatggcggcgctggcagcagcggccaagaaggtgtggagcgcgcggcggctgctggtgctgctgttcacgccgctcgcgctgctgccggtggtcttcgccctcccgcccaaggaaggccgctgcttgtttgtcatcctgctcatggcggtgtactggtgcacggaggccctgccgctctcagtgacggcgctgctgcccatcgtcctcttccccttcatgggcatcttgccctccaacaaggtctgcccccagtacttcctcgacaccaacttcctcttcctcagtgggctgatcatggccagcgccattgaggagtggaacctgcaccggcgaatcgccctcaagatcctgatgcttgttggagtccagccggccaggctcatcctggggatgatggtgaccacctcgttcttgtccatgtggctgagcaacaccgcctccactgccatgatgcttcccattgccaatgccatcctgaaaagtctctttggccagaaggaggttcgaaaggaccccagccaggagagtgaagagaacacagctgctgtgcggagaaacggcctacacactgtgcccacggagatgcagtttctcgccagcacagaagccaaagaccaccctggggagacagaggttccactggatctgccggctgactccaggaaggaggatgaatatcgtcggaacatctggaagggcttcctcatctccatcccctactcagccagtattgggggcacagccacactcacgggcacagcccctaacctcatcctgcttggccagctcaagagtttctttccgcagtgtgacgtggtgaatttcggctcctggttcattttcgccttccctcttatgctgttgttcctgttggcaggctggctctggatctccttcctgtacgggggactgagcttcaggggctggaggaagaataaatctgagataagaaccaatgcagaagatagggctcgagctgtaattcgggaagaataccagaacctggggcccatcaagtttgccgaacaggctgttttcatccttttctgcatgtttgccatcctcctcttcacccgggacccgaagttcatccctggctgggccagcctcttcaatcctgggtttctttctgatgctgtcaccggcgtggctattgtcaccatcttgttcttcttcccgtcccaaaggccctctctcaagtggtggtttgacttcaaagctcccaacacagagacagagcccttgctgacctggaagaaggcccaggagacagtgccctggaacatcatccttctcctgggagggggcttcgccatggccaaaggctgtgaggaatcggggctgtctgtatggattggtgggcagctgcaccccctggagaatgtgccccccgccctggctgtgctgctcatcactgtggtcatcgccttcttcactgagtttgccagcaacacggcgaccatcatcatcttcctgccggtcctggcagagctggccatccgcctgagagtgcaccccctgtatctgatgattccgggcacagtcggctgctcctttgccttcatgctcccggtctcaacgccccccaactccatcgccttcgcctctggacacttgctggtcaaagacatggtgcggacaggcctcctgatgaacctgatgggtgtcctgctgctcagtttggctatgaatacctgggcacagaccatcttccagctgggcaccttcccggactgggctgatatgtactcggtcaatgtcacagcattgccacccaccttggccaatgacacatttcggaccctctgagtccccctggaggactcccttgaggctgaaccctctcaaagggctgtcaccatcacctgctgctaggacactacaaaacaatcaaataattcttttctgtaatccaatatgcagcaagcaagggtgacctccagtggcccactcaagtccatgagccattatctaggatactttctctctctttcatgcagttcaaagcccaggtatctctcagatctgctgcctgagaaataagctcctttatcagttagctgttttatcattaggatacaagacagcccagtgtcatcaacagtgagcaaatctggcatggtgtttgtctcgtacagttgggataggaggccattcattcccatgggcacagctaacattatcccccagtgattactttcgattacactgaagagaccaccttgtctttaaagatcactttcctgggctgcaatgttccaacccagttgttccagctgttcacaaccagtgtgtgattttgcttagttggtgcccattctgcaccagttgttttacccctgccgataaccagcagtcagagattcttttttaatccttggagacagggaaagggacagatagctttccaaggacatgagactgtgcaaagcctctttgctgtttctctgggctcctgagcataccaggggaagttctagaaaccgcagctgacatctcgacccaagagatttaggattctcctgtttcatctgggtcagtttggccataattctggggtcaggccaggcctgggtcctgccctcccatggggtgactcatgacccctccagccaggactctcctacatgtggcccccataggcctctgtggctgcaaggcggtcagttgctgcttgtcccagcaggtggccttgatctctccatgccccaccttaagtggtaagcatgtttaattatcaaaggccccatttgtcaggggtgagagaaaagtcaaaagataaattggggccttgtaaaaggccagggtaaaatgtctcaggcaagcaaaagattgtccccttctgcatatgggtaaaactgagacgtccccgtgagcccgaggctggaagtggtgtctgccttcaagggttaatccctctttgttccaagcagaagcattctggcatcccagtgaagagctcaggccctcaggaagtgtctgctgaatggaatggcccagcattagcccagtattggaaaagacaccagcccaggggccctgactcgtcacacttccctttcctaagcctctgagggtggagattcccctaggagcgcttggccagctgggaaggcagcgcccagctgcacttgttgttgatacagcataagtgaatcatgggcatttccctgagagcagtgggagaggccctctgagttggaagttgagctccacctcctttccaagtgagcactcagtgttgaatcacagttacaacccactggggctggtgggagatgcgttgtatgggactggaagcaagaggttcattcaaagagaaactcatgggatttgtaaccagatgaatcatgatttctaagacttctgatcaaaaatactgtgaaataaagaatgttaatcaactttggacctggagatgatttgcctttctgaacataagagagcttcaaagccccaaattcctgggctggggattccacagagttgacctctctgattttctactgctcttccctcccctctccagctacatactctgcctcagggccttcgcatgtgctgttccctctgcctagaacactctctcccaagtatatgtctggttccccgactcactttattcaagtccctgctcaggtgtcaccttccctgagaggcttccctgacctcctgtctaaaatgtcaccctcattactctccacccccttactctgctataatttctccttaataggacactgtataacttattttcttattatcttcttctccctctagaatataaatttatgaaaatacaaatgttattttttttactgctgtaactccagttcctagaacaatttccagcacatagcaagtgttcagtaaatatttgctgcttgaatctgctccagaattaacaagaaagccatctcttcctctgatctggggtctgttttgttcattactttgttcactccttcttccatttattcattcaataaacatttatt

SEQ ID NO: 28565 - DNA, 3993 bp, Homo sapiens
  source 1..3993: mol_type = unassigned DNA
ggaagtggcactaaggtccaaaggaagctacatatgggtggtccctgctacaccagcctcccaagcctcccagtgcaccttctaggagacaagcaaggaaggccgctgcttgtttgtcatcctgctcatggcggtgtactggtgcacggaggccctgccgctctcagtgacggcgctgctgcccatcgtcctcttccccttcatgggcatcttgccctccaacaaggtctgcccccagtacttcctcgacaccaacttcctcttcctcagtgggctgatcatggccagcgccattgaggagtggaacctgcaccggcgaatcgccctcaagatcctgatgcttgttggagtccagccggccaggctcatcctggggatgatggtgaccacctcgttcttgtccatgtggctgagcaacaccgcctccactgccatgatgcttcccattgccaatgccatcctgaaaagtctctttggccagaaggaggttcgaaaggaccccagccaggagagtgaagagaacacagctgctgtgcggagaaacggcctacacactgtgcccacggagatgcagtttctcgccagcacagaagccaaagaccaccctggggagacagaggttccactggatctgccggctgactccaggaaggaggatgaatatcgtcggaacatctggaagggcttcctcatctccatcccctactcagccagtattgggggcacagccacactcacgggcacagcccctaacctcatcctgcttggccagctcaagagtttctttccgcagtgtgacgtggtgaatttcggctcctggttcattttcgccttccctcttatgctgttgttcctgttggcaggctggctctggatctccttcctgtacgggggactgagcttcaggggctggaggaagaataaatctgagataagaaccaatgcagaagatagggctcgagctgtaattcgggaagaataccagaacctggggcccatcaagtttgccgaacaggctgttttcatccttttctgcatgtttgccatcctcctcttcacccgggacccgaagttcatccctggctgggccagcctcttcaatcctgggtttctttctgatgctgtcaccggcgtggctattgtcaccatcttgttcttcttcccgtcccaaaggccctctctcaagtggtggtttgacttcaaagctcccaacacagagacagagcccttgctgacctggaagaaggcccaggagacagtgccctggaacatcatccttctcctgggagggggcttcgccatggccaaaggctgtgaggaatcggggctgtctgtatggattggtgggcagctgcaccccctggagaatgtgccccccgccctggctgtgctgctcatcactgtggtcatcgccttcttcactgagtttgccagcaacacggcgaccatcatcatcttcctgccggtcctggcagagctggccatccgcctgagagtgcaccccctgtatctgatgattccgggcacagtcggctgctcctttgccttcatgctcccggtctcaacgccccccaactccatcgccttcgcctctggacacttgctggtcaaagacatggtgcggacaggcctcctgatgaacctgatgggtgtcctgctgctcagtttggctatgaatacctgggcacagaccatcttccagctgggcaccttcccggactgggctgatatgtactcggtcaatgtcacagcattgccacccaccttggccaatgacacatttcggaccctctgagtccccctggaggactcccttgaggctgaaccctctcaaagggctgtcaccatcacctgctgctaggacactacaaaacaatcaaataattcttttctgtaatccaatatgcagcaagcaagggtgacctccagtggcccactcaagtccatgagccattatctaggatactttctctctctttcatgcagttcaaagcccaggtatctctcagatctgctgcctgagaaataagctcctttatcagttagctgttttatcattaggatacaagacagcccagtgtcatcaacagtgagcaaatctggcatggtgtttgtctcgtacagttgggataggaggccattcattcccatgggcacagctaacattatcccccagtgattactttcgattacactgaagagaccaccttgtctttaaagatcactttcctgggctgcaatgttccaacccagttgttccagctgttcacaaccagtgtgtgattttgcttagttggtgcccattctgcaccagttgttttacccctgccgataaccagcagtcagagattcttttttaatccttggagacagggaaagggacagatagctttccaaggacatgagactgtgcaaagcctctttgctgtttctctgggctcctgagcataccaggggaagttctagaaaccgcagctgacatctcgacccaagagatttaggattctcctgtttcatctgggtcagtttggccataattctggggtcaggccaggcctgggtcctgccctcccatggggtgactcatgacccctccagccaggactctcctacatgtggcccccataggcctctgtggctgcaaggcggtcagttgctgcttgtcccagcaggtggccttgatctctccatgccccaccttaagtggtaagcatgtttaattatcaaaggccccatttgtcaggggtgagagaaaagtcaaaagataaattggggccttgtaaaaggccagggtaaaatgtctcaggcaagcaaaagattgtccccttctgcatatgggtaaaactgagacgtccccgtgagcccgaggctggaagtggtgtctgccttcaagggttaatccctctttgttccaagcagaagcattctggcatcccagtgaagagctcaggccctcaggaagtgtctgctgaatggaatggcccagcattagcccagtattggaaaagacaccagcccaggggccctgactcgtcacacttccctttcctaagcctctgagggtggagattcccctaggagcgcttggccagctgggaaggcagcgcccagctgcacttgttgttgatacagcataagtgaatcatgggcatttccctgagagcagtgggagaggccctctgagttggaagttgagctccacctcctttccaagtgagcactcagtgttgaatcacagttacaacccactggggctggtgggagatgcgttgtatgggactggaagcaagaggttcattcaaagagaaactcatgggatttgtaaccagatgaatcatgatttctaagacttctgatcaaaaatactgtgaaataaagaatgttaatcaactttggacctggagatgatttgcctttctgaacataagagagcttcaaagccccaaattcctgggctggggattccacagagttgacctctctgattttctactgctcttccctcccctctccagctacatactctgcctcagggccttcgcatgtgctgttccctctgcctagaacactctctcccaagtatatgtctggttccccgactcactttattcaagtccctgctcaggtgtcaccttccctgagaggcttccctgacctcctgtctaaaatgtcaccctcattactctccacccccttactctgctataatttctccttaataggacactgtataacttattttcttattatcttcttctccctctagaatataaatttatgaaaatacaaatgttattttttttactgctgtaactccagttcctagaacaatttccagcacatagcaagtgttcagtaaatatttgctgcttgaatctgctccagaattaacaagaaagccatctcttcctctgatctggggtctgttttgttcattactttgttcactccttcttccatttattcattcaataaacatttattgggaacctg

SEQ ID NO: 28566 - DNA, 737 bp, Homo sapiens
  source 1..737: mol_type = unassigned DNA
agtcccgggccggcccgtaccgccaggcgatcgcgctgatggcggcgctggcagcagcggccaagaaggtgtggagcgcgcggcggctgctggtgctgctgttcacgccgctcgcgctgctgccggtggtcttcgccctcccgcccaaggaaggccgctgcttgtttgtcatcctgctcatggcggtgtactggtgcacggaggccctgccgctctcagtgacggcgctgctgcccatcgtcctcttccccttcatgggcatcttgccctccaacaaggtctgcccccagtacttcctcgacaccaacttcctcttcctcagtgggctgatcatggccagcgccattgaggagtggaacctgcaccggcgaatcgccctcaagatcctgatgcttgttggagtccagccggccaggctcatcctggggatgatggtgaccacctcgttcttgtccatgtggctgagcaacaccgcctccactgccatgatgcttcccattgccaatgccatcctgaaaagtctctttggccagaaggaggttcgaaaggaccccagccaggagagtgaagagaacacaggaatagaacccaatactttcctctctgaggaaaggctgaaacttcaagctccccttgtgataagacttggtcagataactgagtctggtcaatggaatatgagtggaaatgatgtgtgcaacttccgggttctgtccttcctgccgggtggaatgtga

SEQ ID NO: 28567 - DNA, 1055 bp, Homo sapiens
  source 1..1055: mol_type = unassigned DNA
agtcccgggccggcccgtaccgccaggcgatcgcgctgatggcggcgctggcagcagcggccaagaaggtgtggagcgcgcggcggctgctggtgctgctgttcacgccgctcgcgctgctgccggtggtcttcgccctcccgcccaaggaaggccgctgcttgtttgtcatcctgctcatggcggtgtactggtgcacggaggccctgccgctctcagtgacggcgctgctgcccatcgtcctcttccccttcatgggcatcttgccctccaacaaggtctgcccccagtacttcctcgacaccaacttcctcttcctcagtgggctgatcatggccagcgccattgaggagtggaacctgcaccggcgaatcgccctcaagatcctgatgcttgttggagtccagccggccaggctcatcctggggatgatggtgaccacctcgttcttgtccatgtggctgagcaacaccgcctccactgccatgatgcttcccattgccaatgccatcctgaaaagtctctttggccagaaggaggttcgaaaggaccccagccaggagagtgaagagaacacagcaaagaccaccctggggagacagaggttccactggatctgccggctgactccaggaaggaggatgaatatcgtcggaacatctggaagggcttcctcatctccatcccctactcagccagtattgggggcacagccacactcacgggcacagcccctaacctcatcctgcttggccagctcaagaggctggctctggatctccttcctgtacgggggactgagcttcaggggctggaggaagaataaatctgagataagaaccaatgcagaagatagggctcgagctgtaattcgggaagaataccagaacctggggcccatcaagtttgccgaacaggctgttttcatccttttctgcatgtttgccatcctcctcttcacccgggacccgaagttcatccctggctgggccagcctcttcaatcctggatgcaaaatgggcattataagcatttcaacaatacagaaaatgtga

SEQ ID NO: 28568 - DNA, 3940 bp, Homo sapiens
  source 1..3940: mol_type = unassigned DNA
agtcccgggccggcccgtaccgccaggcgatcgcgctgatggcggcgctggcagcagcggccaagaaggtgtggagcgcgcggcggctgctggtgctgctgttcacgccgctcgcgctgctgccggtggtcttcgccctcccgcccaaggaaggccgctgcttgtttgtcatcctgctcatggcggtgtactggtgcacggaggccctgccgctctcagtgacggcgctgctgcccatcgtcctcttccccttcatgggcatcttgccctccaacaaggtctgcccccagtacttcctcgacaccaacttcctcttcctcagtgggctgatcatggccagcgccattgaggagtggaacctgcaccggcgaatcgccctcaagatcctgatgcttgttggagtccagccggccaggctcatcctggggatgatggtgaccacctcgttcttgtccatgtggctgagcaacaccgcctccactgccatgatgcttcccattgccaatgccatcctgaaaagtctctttggccagaaggaggttcgaaaggaccccagccaggagagtgaagagaacacagctgctgtgcggagaaacggcctacacactgtgcccacggagatgcagtttctcgccagcacagaagccaaagaccaccctggggagacagaggttccactggatctgccggctgactccaggaaggaggatgaatatcgtcggaacatctggaagggcttcctcatctccatcccctactcagccagtattgggggcacagccacactcacgggcacagcccctaacctcatcctgcttggccagctcaagagtttctttccgcagtgtgacgtggtgaatttcggctcctggttcattttcgccttccctcttatgctgttgttcctgttggcaggctggctctggatctccttcctgtacgggggactgagcttcaggggctggaggaagaataaatctgagataagaaccaatgcagaagatagggctcgagctgtaattcgggaagaataccagaacctggggcccatcaagtttctttctgatgctgtcaccggcgtggctattgtcaccatcttgttcttcttcccgtcccaaaggccctctctcaagtggtggtttgacttcaaagctcccaacacagagacagagcccttgctgacctggaagaaggcccaggagacagtgccctggaacatcatccttctcctgggagggggcttcgccatggccaaaggctgtgaggaatcggggctgtctgtatggattggtgggcagctgcaccccctggagaatgtgccccccgccctggctgtgctgctcatcactgtggtcatcgccttcttcactgagtttgccagcaacacggcgaccatcatcatcttcctgccggtcctggcagagctggccatccgcctgagagtgcaccccctgtatctgatgattccgggcacagtcggctgctcctttgccttcatgctcccggtctcaacgccccccaactccatcgccttcgcctctggacacttgctggtcaaagacatggtgcggacaggcctcctgatgaacctgatgggtgtcctgctgctcagtttggctatgaatacctgggcacagaccatcttccagctgggcaccttcccggactgggctgatatgtactcggtcaatgtcacagcattgccacccaccttggccaatgacacatttcggaccctctgagtccccctggaggactcccttgaggctgaaccctctcaaagggctgtcaccatcacctgctgctaggacactacaaaacaatcaaataattcttttctgtaatccaatatgcagcaagcaagggtgacctccagtggcccactcaagtccatgagccattatctaggatactttctctctctttcatgcagttcaaagcccaggtatctctcagatctgctgcctgagaaataagctcctttatcagttagctgttttatcattaggatacaagacagcccagtgtcatcaacagtgagcaaatctggcatggtgtttgtctcgtacagttgggataggaggccattcattcccatgggcacagctaacattatcccccagtgattactttcgattacactgaagagaccaccttgtctttaaagatcactttcctgggctgcaatgttccaacccagttgttccagctgttcacaaccagtgtgtgattttgcttagttggtgcccattctgcaccagttgttttacccctgccgataaccagcagtcagagattcttttttaatccttggagacagggaaagggacagatagctttccaaggacatgagactgtgcaaagcctctttgctgtttctctgggctcctgagcataccaggggaagttctagaaaccgcagctgacatctcgacccaagagatttaggattctcctgtttcatctgggtcagtttggccataattctggggtcaggccaggcctgggtcctgccctcccatggggtgactcatgacccctccagccaggactctcctacatgtggcccccataggcctctgtggctgcaaggcggtcagttgctgcttgtcccagcaggtggccttgatctctccatgccccaccttaagtggtaagcatgtttaattatcaaaggccccatttgtcaggggtgagagaaaagtcaaaagataaattggggccttgtaaaaggccagggtaaaatgtctcaggcaagcaaaagattgtccccttctgcatatgggtaaaactgagacgtccccgtgagcccgaggctggaagtggtgtctgccttcaagggttaatccctctttgttccaagcagaagcattctggcatcccagtgaagagctcaggccctcaggaagtgtctgctgaatggaatggcccagcattagcccagtattggaaaagacaccagcccaggggccctgactcgtcacacttccctttcctaagcctctgagggtggagattcccctaggagcgcttggccagctgggaaggcagcgcccagctgcacttgttgttgatacagcataagtgaatcatgggcatttccctgagagcagtgggagaggccctctgagttggaagttgagctccacctcctttccaagtgagcactcagtgttgaatcacagttacaacccactggggctggtgggagatgcgttgtatgggactggaagcaagaggttcattcaaagagaaactcatgggatttgtaaccagatgaatcatgatttctaagacttctgatcaaaaatactgtgaaataaagaatgttaatcaactttggacctggagatgatttgcctttctgaacataagagagcttcaaagccccaaattcctgggctggggattccacagagttgacctctctgattttctactgctcttccctcccctctccagctacatactctgcctcagggccttcgcatgtgctgttccctctgcctagaacactctctcccaagtatatgtctggttccccgactcactttattcaagtccctgctcaggtgtcaccttccctgagaggcttccctgacctcctgtctaaaatgtcaccctcattactctccacccccttactctgctataatttctccttaataggacactgtataacttattttcttattatcttcttctccctctagaatataaatttatgaaaatacaaatgttattttttttactgctgtaactccagttcctagaacaatttccagcacatagcaagtgttcagtaaatatttgctgcttgaatctgctccagaattaacaagaaagccatctcttcctctgatctggggtctgttttgttcattactttgttcactccttcttccatttattcattcaataaacatttattgggaacctg

SEQ ID NO: 28569 - DNA, 2008 bp, Homo sapiens
  source 1..2008: mol_type = unassigned DNA
agtcccgggccggcccgtaccgccaggcgatcgcgctgatggcggcgctggcagcagcggccaagaaggtgtggagcgcgcggcggctgctggtgctgctgttcacgccgctcgcgctgctgccggtggtcttcgccctcccgcccaaggaaggccgctgcttgtttgtcatcctgctcatggcggtgtactggtgcacggaggccctgccgctctcagtgacggcgctgctgcccatcgtcctcttccccttcatgggcatcttgccctccaacaaggtctgcccccagtacttcctcgacaccaacttcctcttcctcagtgggctgatcatggccagcgccattgaggagtggaacctgcaccggcgaatcgccctcaagatcctgatgcttgttggagtccagccggccaggctcatcctggggatgatggtgaccacctcgttcttgtccatgtggctgagcaacaccgcctccactgccatgatgcttcccattgccaatgccatcctgaaaagtctctttggccagaaggaggttcgaaaggaccccagccaggagagtgaagagaacacagcaaagaccaccctggggagacagaggttccactggatctgccggctgactccaggaaggaggatgaatatcgtcggaacatctggaagggcttcctcatctccatcccctactcagccagtattgggggcacagccacactcacgggcacagcccctaacctcatcctgcttggccagctcaagaggctggctctggatctccttcctgtacgggggactgagcttcaggggctggaggaagaataaatctgagataagaaccaatgcagaagatagggctcgagctgtaattcgggaagaataccagaacctggggcccatcaagtttgccgaacaggctgttttcatccttttctgcatgtttgccatcctcctcttcacccgggacccgaagttcatccctggctgggccagcctcttcaatcctgggtttctttctgatgctgtcaccggcgtggctattgtcaccatcttgttcttcttcccgtcccaaaggccctctctcaagtggtggtttgacttcaaagctcccaacacagagacagagcccttgctgacctggaagaaggcccaggagacagtgccctggaacatcatccttctcctgggagggggcttcgccatggccaaaggctgtgaggaatcggggctgtctgtatggattggtgggcagctgcaccccctggagaatgtgccccccgccctggctgtgctgctcatcactgtggtcatcgccttcttcactgagtttgccagcaacacggcgaccatcatcatcttcctgccggtcctggcagagctggccatccgcctgagagtgcaccccctgtatctgatgattccgggcacagtcggctgctcctttgccttcatgctcccggtctcaacgccccccaactccatcgccttcgcctctggacacttgctggtcaaagacatggtgcggacaggcctcctgatgaacctgatgggtgtcctgctgctcagtttggctatgaatacctgggcacagaccatcttccagctgggcaccttcccggactgggctgatatgtactcggtcaatgtcacagcattgccacccaccttggccaatgacacatttcggaccctctgagtccccctggaggactcccttgaggctgaaccctctcaaagggctgtcaccatcacctgctgctaggacactacaaaacaatcaaataattcttttctgtaatccaatatgcagcaagcaagggtgacctccagtggcccactcaagtccatgagccattatctaggatactttctctctctttcatgcagttcaaagcccaggtatctctcagatctgctgcctgagaaataagctcctttatcagttagctgttttatcattaggatacaagacagcccagtgtcatcaacagtgagcaaatctggcat

SEQ ID NO: 28570 - DNA, 876 bp, Homo sapiens
  source 1..876: mol_type = unassigned DNA
ggaagtggcactaaggtccaaaggaagctacatatgggtggtccctgctacaccagcctcccaagcctcccagtgcaccttctaggagacaagcaaggaaggccgctgcttgtttgtcatcctgctcatggcggtgtactggtgcacggaggccctgccgctctcagtgacggcgctgctgcccatcgtcctcttccccttcatgggcatcttgccctccaacaaggtctgcccccagtacttcctcgacaccaacttcctcttcctcagtgggctgatcatggccagcgccattgaggagtggaacctgcaccggcgaatcgccctcaagatcctgatgcttgttggagtccagccggccaggctcatcctggggatgatggtgaccacctcgttcttgtccatgtggctgagcaacaccgcctccactgccatgatgcttcccattgccaatgccatcctgaaaagtctctttggccagaaggaggttcgaaaggaccccagccaggagagtgaagagaacacaggaatagaacccaatactttcctctctgaggaaaggctgaaacttcaagctccccttgtgataagacttggtcagataactgagtctggtcaatggaatatgagtggaaatgatgtgtgcaacttccgggttctgtccttcctgccgggtggaatgtgaatatgatggcacctgggacccaaagacaggagccacatcttgagagatagatggcagatctgcccctgtggctttggatcatttacctcagtgaacacaacaagcattatccatgaaaccataggttttgtgtgctagttctagtttttaaaatatgaattaaattaaatacgtatctgttaaaacttaaa

SEQ ID NO: 28571 - DNA, 3932 bp, Homo sapiens
  source 1..3932: mol_type = unassigned DNA
agtcccgggccggcccgtaccgccaggcgatcgcgctgatggcggcgctggcagcagcggccaagaaggtgtggagcgcgcggcggctgctggtgctgctgttcacgccgctcgcgctgctgccggtggtcttcgccctcccgcccaaggaaggccgctgcttgtttgtcatcctgctcatggcggtgtactggtgcacggaggccctgccgctctcagtgacggcgctgctgcccatcgtcctcttccccttcatgggcatcttgccctccaacaaggtctgcccccagtacttcctcgacaccaacttcctcttcctcagtgggctgatcatggccagcgccattgaggagtggaacctgcaccggcgaatcgccctcaagatcctgatgcttgttggagtccagccggccaggctcatcctggggatgatggtgaccacctcgttcttgtccatgtggctgagcaacaccgcctccactgccatgatgcttcccattgccaatgccatcctgaaaagtctctttggccagaaggaggttcgaaaggaccccagccaggagagtgaagagaacacagctgctgtgcggagaaacggcctacacactgtgcccacggagatgcagtttctcgccagcacagaagccaaagaccaccctggggagacagaggttccactggatctgccggctgactccaggaaggaggatgaatatcgtcggaacatctggaagggcttcctcatctccatcccctactcagccagtattgggggcacagccacactcacgggcacagcccctaacctcatcctgcttggccagctcaagagtttctttccgcagtgtgacgtggtgaatttcggctcctggttcattttcgccttccctcttatgctgttgttcctgttggcaggctggctctggatctccttcctgtacgggggactgagcttcaggggctggaggaagaataaatctgagataagaaccaatgcagaagatagggctcgagctgtaattcgggaagaataccagaacctggggcccatcaagtttgccgaacaggctgttttcatccttttctgcatgtttgccatcctcctcttcacccgggacccgaagttcatccctggctgggccagcctcttcaatcctgggtttctttctgatgctgtcaccggcgtggctattgtcaccatcttgttcttcttcccgtcccaaaggccctctctcaagtggtggtttgacttcaaaggaatcggggctgtctgtatggattggtgggcagctgcaccccctggagaatgtgccccccgccctggctgtgctgctcatcactgtggtcatcgccttcttcactgagtttgccagcaacacggcgaccatcatcatcttcctgccggtcctggcagagctggccatccgcctgagagtgcaccccctgtatctgatgattccgggcacagtcggctgctcctttgccttcatgctcccggtctcaacgccccccaactccatcgccttcgcctctggacacttgctggtcaaagacatggtgcggacaggcctcctgatgaacctgatgggtgtcctgctgctcagtttggctatgaatacctgggcacagaccatcttccagctgggcaccttcccggactgggctgatatgtactcggtcaatgtcacagcattgccacccaccttggccaatgacacatttcggaccctctgagtccccctggaggactcccttgaggctgaaccctctcaaagggctgtcaccatcacctgctgctaggacactacaaaacaatcaaataattcttttctgtaatccaatatgcagcaagcaagggtgacctccagtggcccactcaagtccatgagccattatctaggatactttctctctctttcatgcagttcaaagcccaggtatctctcagatctgctgcctgagaaataagctcctttatcagttagctgttttatcattaggatacaagacagcccagtgtcatcaacagtgagcaaatctggcatggtgtttgtctcgtacagttgggataggaggccattcattcccatgggcacagctaacattatcccccagtgattactttcgattacactgaagagaccaccttgtctttaaagatcactttcctgggctgcaatgttccaacccagttgttccagctgttcacaaccagtgtgtgattttgcttagttggtgcccattctgcaccagttgttttacccctgccgataaccagcagtcagagattcttttttaatccttggagacagggaaagggacagatagctttccaaggacatgagactgtgcaaagcctctttgctgtttctctgggctcctgagcataccaggggaagttctagaaaccgcagctgacatctcgacccaagagatttaggattctcctgtttcatctgggtcagtttggccataattctggggtcaggccaggcctgggtcctgccctcccatggggtgactcatgacccctccagccaggactctcctacatgtggcccccataggcctctgtggctgcaaggcggtcagttgctgcttgtcccagcaggtggccttgatctctccatgccccaccttaagtggtaagcatgtttaattatcaaaggccccatttgtcaggggtgagagaaaagtcaaaagataaattggggccttgtaaaaggccagggtaaaatgtctcaggcaagcaaaagattgtccccttctgcatatgggtaaaactgagacgtccccgtgagcccgaggctggaagtggtgtctgccttcaagggttaatccctctttgttccaagcagaagcattctggcatcccagtgaagagctcaggccctcaggaagtgtctgctgaatggaatggcccagcattagcccagtattggaaaagacaccagcccaggggccctgactcgtcacacttccctttcctaagcctctgagggtggagattcccctaggagcgcttggccagctgggaaggcagcgcccagctgcacttgttgttgatacagcataagtgaatcatgggcatttccctgagagcagtgggagaggccctctgagttggaagttgagctccacctcctttccaagtgagcactcagtgttgaatcacagttacaacccactggggctggtgggagatgcgttgtatgggactggaagcaagaggttcattcaaagagaaactcatgggatttgtaaccagatgaatcatgatttctaagacttctgatcaaaaatactgtgaaataaagaatgttaatcaactttggacctggagatgatttgcctttctgaacataagagagcttcaaagccccaaattcctgggctggggattccacagagttgacctctctgattttctactgctcttccctcccctctccagctacatactctgcctcagggccttcgcatgtgctgttccctctgcctagaacactctctcccaagtatatgtctggttccccgactcactttattcaagtccctgctcaggtgtcaccttccctgagaggcttccctgacctcctgtctaaaatgtcaccctcattactctccacccccttactctgctataatttctccttaataggacactgtataacttattttcttattatcttcttctccctctagaatataaatttatgaaaatacaaatgttattttttttactgctgtaactccagttcctagaacaatttccagcacatagcaagtgttcagtaaatatttgctgcttgaatctgctccagaattaacaagaaagccatctcttcctctgatctggggtctgttttgttcattactttgttcactccttcttccatttattcattcaataaacatttattgggaacctg

SEQ ID NO: 28572 - DNA, 1597 bp, Homo sapiens
  source 1..1597: mol_type = unassigned DNA
ttagccgggcatgatggcgggtgcctgtaatctcagctacttgggaggctgagataggagaatcgcttgaacccaggatgtggaggttgcagtgagccgagatcgccactgcactccagcctggacagggcactgggagtgtggcagggggcaattgggactcccttgttcccctggagtttaacctagtggtaaacactttcagacgacgaatcatgctatttggggattttgtacagggtgaggaagtggcactaaggtccaaaggaagctacatatgggtggtccctgctacaccagcctcccaagcctcccagtgcaccttctaggagacaagcaaggaaggccgctgcttgtttgtcatcctgctcatggcggtgtactggtgcacggaggccctgccgctctcagtgacggcgctgctgcccatcgtcctcttccccttcatgggcatcttgccctccaacaaggtctgcccccagtacttcctcgacaccaacttcctcttcctcagtgggctgatcatggccagcgccattgaggagtggaacctgcaccggcgaatcgccctcaagatcctgatgcttgttggagtccagccggccaggctcatcctggggatgatggtgaccacctcgttcttgtccatgtggctgagcaacaccgcctccactgccatgatgcttcccattgccaatgccatcctgaaaagtctctttggccagaaggaggttcgaaaggaccccagccaggagagtgaagagaacacagctgctgtgcggagaaacggcctacacactgtgcccacggagatgcagtttctcgccagcacagaagccaaagaccaccctggggagacagaggttccactggatctgccggctgactccaggaaggaggatgaatatcgtcggaacatctggaagggcttcctcatctccatcccctactcagccagtattgggggcacagccacactcacgggcacagcccctaacctcatcctgcttggccagctcaagagtttctttccgcagtgtgacgtggtgaatttcggctcctggttcattttcgccttccctcttatgctgttgttcctgttggcaggctggctctggatctccttcctgtacgggggactgagcttcaggggctggaggaagaataaatctgagataagaaccaatgcagaagatagggctcgagctgtaattcgggaagaataccagaacctggggcccatcaagtttgccgaacaggctgttttcatccttttctgcatgtttgccatcctcctcttcacccgggacccgaagttcatccctggctgggccagcctcttcaatcctgggtttctttctgatgctgtcaccggcgtggctattgtcaccatcttgttcttcttcccgtcccaaaggccctctctcaagtggtggtttgacttcaaagctcccaacacagagacagagcccttgctgacctggaagaaggcccaggagacagtgccctggaacatcatccttctcctgggagggggcttcgccatggccaaaggctgtgaggaatcggggctgtctgtatggattggtgggcagct

SEQ ID NO: 28573 - DNA, 1887 bp, Homo sapiens
  source 1..1887: mol_type = unassigned DNA
actgctgccctgagaacaagccggggcaggccctgccgcaggcctccttccccctctgcccccagcccaggcctccttccccctctgccctgagccctgggcctccttccccttctgccccgagccccgctgaccctctgagcatgcatctcctcctgcaggaaggccgctgcttgtttgtcatcctgctcatggcggtgtactggtgcacggaggccctgccgctctcagtgacggcgctgctgcccatcgtcctcttccccttcatgggcatcttgccctccaacaaggtctgcccccagtacttcctcgacaccaacttcctcttcctcagtgggctgatcatggccagcgccattgaggagtggaacctgcaccggcgaatcgccctcaagatcctgatgcttgttggagtccagccggccaggctcatcctggggatgatggtgaccacctcgttcttgtccatgtggctgagcaacaccgcctccactgccatgatgcttcccattgccaatgccatcctgaaaagtctctttggccagaaggaggttcgaaaggaccccagccaggagagtgaagagaacacagctgctgtgcggagaaacggcctacacactgtgcccacggagatgcagtttctcgccagcacagaagccaaagaccaccctggggagacagaggttccactggatctgccggctgactccaggaaggaggatgaatatcgtcggaacatctggaagggcttcctcatctccatcccctactcagccagtattgggggcacagccacactcacgggcacagcccctaacctcatcctgcttggccagctcaagagtttctttccgcagtgtgacgtggtgaatttcggctcctggttcattttcgccttccctcttatgctgttgttcctgttggcaggctggctctggatctccttcctgtacgggggactgagcttcaggggctggaggaagaataaatctgagataagaaccaatgcagaagatagggctcgagctgtaattcgggaagaataccagaacctggggcccatcaagtttgccgaacaggctgttttcatccttttctgcatgtttgccatcctcctcttcacccgggacccgaagttcatccctggctgggccagcctcttcaatcctgggtttctttctgatgctgtcaccggcgtggctattgtcaccatcttgttcttcttcccgtcccaaaggccctctctcaagtggtggtttgacttcaaagctcccaacacagagacagagcccttgctgacctggaagaaggcccaggagacagtgccctggaacatcatccttctcctgggagggggcttcgccatggccaaaggctgtgaggaatcggggctgtctgtatggattggtgggcagctgcaccccctggagaatgtgccccccgccctggctgtgctgctcatcactgtggtcatcgccttcttcactgagtttgccagcaacacggcgaccatcatcatcttcctgccggtcctggcagagctggccatccgcctgagagtgcaccccctgtatctgatgattccgggcacagtcggctgctcctttgccttcatgctcccggtctcaacgccccccaactccatcgccttcgcctctggacacttgctggtcaaagacatggtgcggacaggcctcctgatgaacctgatgggtgtcctgctgctcagtttggctatgaatacctgggcacagaccatcttccagctgggcaccttcccggactgggctgatatgtactcggtcaatgtcacagcattgccacccaccttggccaatgacacatttcggaccctctgagtccccctggaggactcccttgaggctg

SEQ ID NO: 28574 - DNA, 3540 bp, Homo sapiens
  source 1..3540: mol_type = unassigned DNA
gtaagctgcctccatcatcctaaaaaacgaccatgctgaaagagctcctctgtatttcttggcagaccctttccagttttcatcctgggtgtttctgaacaggaacatatctcattgaagtatttgcacctctacctacagacaaggaaaaggcttggagcacctccattcattgtgccaacaggacctgaatgaccgattgtttcttgcttactacttgtggtcaactaagtagagattcataagacctttatagaaccactgacaacactgtgaccaaggaaacttccatcgatagaagagtggctgtgacccgaaggaatgtctgacccccacagcagtcctctcctgccagagccactttccagcagatacaaactctacgaggcagagtttaccagcccgagctggccctcgacatccccggatactcacccagctctgcccctcctggaaatgcctgaagaaaaggatctccggtcttccaatgaagacagtcacattgtgaagatcgaaaagctcaatgaaaggagtaaaaggaaagacgacggggtggcccatcgggactcagcaggccaaaggtgcatctgcctctccaaagcagtgggctacctcacgggcgacatgaaggagtacaggatctggctgaaagacaagcaccttgccctccagttcatagactgggtcctgagagggaccgctcaggtgatgttcatcaacaatcctctcagcggcctcatcatcttcatagggctgctgatccagaatccctggtggacaatcactgggggcctggggacagtggtctcgaccttaacagctctcgccttgggccaagacaggtctgccattgcctcaggactccatgggtacaacgggatgctggtgggactgctgatggccgtgttctcggagaagttagactactactggtggcttctgtttcctgtgaccttcacagccatgtcctgcccagttctttctagtgccttgaattccatcttcagcaagtgggacctcccggtcttcactctgcccttcaacattgcagtcaccttgtaccttgcagccacaggccactacaacctcttcttccccacaacactggtagagcctgtgtcttcagtgcccaatatcacctggacagagatggaaatgcccctgctgttacaagccatccctgttggggtcggccaggtgtatggctgtgacaatccctggacaggcggcgtgttcctggtggctctgttcatctcctcgccactcatctgcttgcatgcagccattggctcaatcgtggggctgctagcagccctgtcagtggccacacccttcgagaccatctacacaggcctctggagctacaactgcgtcctctcctgcatcgccatcggaggcatgttctatgccctcacctggcagactcacctgctggccctcatctgtgccctgttctgtgcatacatggaagcagccatctccaacatcatgtcagtggtgggcgtgccaccaggcacctgggccttctgccttgccaccatcatcttcctgctcctgacgacaaacaacccagccatcttcagactcccactcagcaaagtcacctaccccgaggccaaccgcatctactacctgacagtgaaaagcggtgaagaagagaaggcccccagcggaggcggtggggagcatccacccacagcaggcccaaaggtggaggagggctcggaggctgtgctctccaagcacaggagtgtatttcacatcgagtggtcatccattcggaggaggagcaaagtgtttggaaaaggcgaacaccaggaaagacaaaacaaagacccatttccctatcgataccggaagcccacagtcgagctgcttgatctggacaccatggaggagagctctgagataaaagtggaaacaaacatttccaagacatcctggattcggagttccatggctgccagtgggaaaagggtcagcaaagccctcagctacatcacaggagagatgaaggagtgtggagagggacttaaagacaagtccccagtgttccagttctttgactgggtcctccgaggcacatctcaagtgatgtttgtgaacaaccccctcagcggcatcctcatcatcctcggcctcttcatccagaacccctggtgggcgatctcaggctgcctgggtaccatcatgtccaccttgacagccctcatcctgagtcaggacaagtcggccatcgctgcaggatttcacggctacaatggggtgctggtggggctgctgatggccgtgttctcagacaaaggtgactactactggtggctgttgctacccgtcatcatcatgtccatgtcttgccccatcctctccagtgccctgggtaccatcttcagcaagtgggacctcccagtcttcacactgcccttcaatatcactgtgactttgtacctggcagccacgggccactacaaccttttcttccccacaacgctgctgcagcctgcatccgccatgcccaacatcacctggtcagaggtccaagtgcccttgcttttgagagccatccccgttggaattggccaagtgtacggctgtgataacccctggactggaggcatcttcctcatagctctgttcatatcctcacctctcatttgcttgcatgcagcaattggatccaccatggggatgctagcagcactcactattgcgacgccctttgactccatctacttcggcctgtgtggcttcaacagcaccctcgcatgcatagcgataggaggcatgttctacgtcatcacctggcagacgcacctcctcgccatcgcctgcgcactgtttgctgcctacctgggtgctgccctggctaacatgttatctgtgtttggattgccgccctgcacttggcccttctgtctctcagctctcaccttcctgctcctgacgaccaataaccccgccatctacaagctcccgctcagcaaagtcacctacccagaggccaaccgcatctactacctgtcccaggagagaaacagaagggcatcaatcataacaaagtatcaggcctacgatgtctcctaagtttccctgtctaaaacacatcagtgtaaattcaggcttcagcacgccgtccagatccccaggataagagaccacttagccttccctttggtctgttctgtgactctctccccaaacacaaagaagcgtgtatgtagtcaccattccagaacctctcttttctaagatgcacaacacttatcaaagatatgtttagtttagactttatacccttagctttcccataagagctccctttgtggggaacttgccctcttctgcgaaataagcctcatccttaaagagaagtcaccggccgggcacggtggctcacgcctgtaatcccagcactttgggaggccgaggcgggtggatcacgaggtcaggagatcgagaccatcctggcgaacatggtgagaccccatctctactaaaaatacaaaaaattagccaggcatggtggcgggcacctgtagt

SEQ ID NO: 28575 - DNA, 3971 bp, Homo sapiens
  source 1..3971: mol_type = unassigned DNA
acacagagcagagtggggctctgagtatataactgttaggtgcctccctccagcaccatctcctgagaagcactctcccttgtcgtggaggtgggcaaatctttatcagccactgccttctgctgccaggaagccagctagagtggtctttaaagaaaactgggcatctcctgctacttaaaatcaaaaactacctaaaataaagattatagagccagaggaagagatagccatggaggacagccccactatggttagagtggacagccccactatggttaggggtgaaaaccaggtttcgccatgtcaagggagaaggtgcttccccaaagctcttggctatgtcaccggtgacatgaaagaacttgccaaccagcttaaagacaaacccgtggtgctccagttcattgactggattctccggggcatatcccaagtggtgttcgtcaacaaccccgtcagtggaatcctgattctggtaggacttcttgttcagaacccctggtgggctctcactggctggctgggaacagtggtctccactctgatggccctcttgctcagccaggacaggtcattaatagcatctgggctctatggctacaatgccaccctggtgggagtactcatggctgtcttttcggacaagggagactatttctggtggctgttactccctgtatgtgctatgtccatgacttgcccaattttctcaagtgcattgaattccatgctcagcaaatgggacctccccgtcttcaccctccctttcaacatggcgttgtcaatgtacctttcagccacaggacattacaatccattctttccagccaaactggtcatacctataactacagctccaaatatctcctggtctgacctcagtgccctggagttgttgaaatctataccagtgggagttggtcagatctatggctgtgataatccatggacagggggcattttcctgggagccatcctactctcctccccactcatgtgcctgcatgctgccataggatcattgctgggcatagcagcgggactcagtctttcagccccatttgaggacatctactttggactctggggtttcaacagctctctggcctgcattgcaatgggaggaatgttcatggcgctcacctggcaaacccacctcctggctcttggctgtgccctgttcacggcctatcttggagtcggcatggcaaactttatggctgaggttggattgccagcttgtacctggcccttctgtttggccacgctattgttcctcatcatgaccacaaaaaattccaacatctacaagatgcccctcagtaaagttacttatcctgaagaaaaccgcatcttctacctgcaagccaagaaaagaatggtggaaagccctttgtgagaacaagccccatttgcagccatggtcacgagtcatttctgcctgactgctccagctaacttccagggtctcagcaaactgctgtttttcacgagtatcaactttcatactgacgcgtctgtaatctgttcttatgctcattttgtattttcctttcaactccaggaatatccttgagcatatgagagtcacatccaggtgatgtgctctggtatggaatttgaaaccccaatggggccttggcactaagactggaatgtatataaagtcaaagtgctccaacagaaggaggaagtgaaaacaaactattagtatttattgatattcttggtgtttagctggctcgatgatgttaacagtattaaaaattaaaccccataaaccaactaagccttatggaattcacagtcacaaaatcgaagttaatccagaattctgtgataagcagcttggctttttttttaaatcaatgcaagttacacattatagccagaatctgtatcacagaggtgcaagctgacagcagagctcagtccccacttcctgcaaacaatggcctgcaccctatcccttgtgtgtgtgacattctctcatgggacaatgttggggtttttcagactgacaggactgcaagagggagaaaggaattttgtcaatcaaaattattctgtattgcaacttttctcagagattgcaaaggattttttaggtagagattatttttccttatgaaaaatgatctgttttaaatgagataaaataggagaagttcctggcttaacctgttcttacatattaaagaaaagttacttactgtatttatgaaatactcagcttaggcatttttactttaacccctaaattgattttgtaaatgccacaaatgcatagaattgttaccaacctccaaagggctctttaaaatcatattttttattcatttgaggatgtcttataaagactgaaggcaaaggtcagattgcttacgggtgttatttttataagttgttgaattccttaatttaaaaaagctcattattttttgcacactcacaatattctctctcagaaatcaatggcatttgaaccaccaaaaagaaataaagggctgagtgcggtggctcacgcctgtaatcccagcactttggggagcccaggcgggcagattgcttgaacccaggagttcaagaccagcctgggcagcatggtgaaaccctgtatctacaaaaaatacaaaaattagccaggcatggtggtgggtgcctgtagttccagctacttgggaggctgaggtgggaaaatgacttgagcccaggaggaggaggctgcagtgagctaagattgcaccactgcactccaacctgggcgacaagagtgaaactgtgtctctcaaaaaaaaaaaaaaacaaacaaaaacaaaaacaaaacaaaacaaaacaaaacaaaacaggtaaggattcccctgttttcctctctttaattttaaagttatcagttccgtaaagtctctgtaaccaaacatactgaagacagcaacagaagtcacgttcagggactggctcacacctgtaatcccagcactttgggagatggaggtaaaaggatctcttgagcccaggagttcaagaccagcttgggcaacatagcaagactccatctcttaaaaaataaaaatagtaacattagccaggtgtagcagcacacatctgcagcagctactcaggaggctgaggtggaaagatcgcttgtgcacagaagttcgaggctgcagtgagctatatgatcatgtcactgcactccagcctgtgtgaccgagcaagaccctatctcaaaaaaattaattaattaattaattaattaatttaaaaaggaagtcatgttcatttactttccacttcagtgtgtatcgtgtagtattttggaggttggaaagtgaaacgtaggaatcctgaagattttttccacttctagtttgcagtgctcagtgcacaatatacattttgctgaatgaataaacagaaatagggaagtaaacctacaaatattttagggagaagctcacttcttccttttctcaggaaaccaagcaagcaaacatatcgttccaattttaaaacccagtgaccaaagcctttggaactatgaatttgcaactgtcataggtttatggatattgctgtggagaagctcaattttcagtgtttgaactgaaccctttcttgttagggaacgtgtgaaagaagaattgtggggaaaaaaaagcaagcataaccaaagatcatcagcagtgaagaatctaggctgtggctgagagaaccagaggcctctaaaatggacccgagtcgatcttcagaacagggatctaccatgcaggagcttcttgtgctcacacaaatctgtaaatgggaacattgtacattgtcgaatttaaatgatattaattttctcaagctatttttgttactattttcctaaaattgaatatttgcagggagcacttatactttttcctaatgtctgtataacaaatttctatgcaagtacatgaataaattatgctcacagctca

SEQ ID NO: 28576 - DNA, 1390 bp, Homo sapiens
  source 1..1390: mol_type = unassigned DNA
atctcctgagaagcactctcccttgtcgtggaggtgggcaaatctttatcagccactgccttctgctgccaggaagccagctagagtggtctttaaagaaaactgggcatctcctgctacttaaaatcaaaaactacctaaaataaagattataacaaacccgtggtgctccagttcattgactggattctccggggcatatcccaagtggtgttcgtcaacaaccccgtcagtggaatcctgattctggtaggacttcttgttcagaacccctggtgggctctcactggctggctgggaacagtggtctccactctgatggccctcttgctcagccaggacaggtcattaatagcatctgggctctatggctacaatgccaccctggtgggagtactcatggctgtcttttcggacaagggagactatttctggtggctgttactccctgtatgtgctatgtccatgacttgcccaattttctcaagtgcattgaattccatgctcagcaaatgggacctccccgtcttcaccctccctttcaacatggcgttgtcaatgtacctttcagccacaggacattacaatccattctttccagccaaactggtcatacctataactacagctccaaatatctcctggtctgacctcagtgccctggagttgttgaaatctataccagtgggagttggtcagatctatggctgtgataatccatggacagggggcattttcctgggagccatcctactctcctccccactcatgtgcctgcatgctgccataggatcattgctgggcatagcagcgggactcagtctttcagccccatttgaggacatctactttggactctggggtttcaacagctctctggcctgcattgcaatgggaggaatgttcatggcgctcacctggcaaacccacctcctggctcttggctgtgccctgttcacggcctatcttggagtcggcatggcaaactttatggctgaggttggattgccagcttgtacctggcccttctgtttggccacgctattgttcctcatcatgaccacaaaaaattccaacatctacaagatgcccctcagtaaagttacttatcctgaagaaaaccgcatcttctacctgcaagccaagaaaagaatggtggaaagccctttgtgagaacaagccccatttgcagccatggtcacgagtcatttctgcctgactgctccagctaacttccagggtctcagcaaactgctgtttttcacgagtatcaactttcatactgacgcgtctgtaatctgttcttatgctcattttgtattttcctttcaactccaggaatatccttgagcatatgagagtcacatccaggtgatgtgctctggtatgg

SEQ ID NO: 28577 - DNA, 4129 bp, Homo sapiens
  source 1..4129: mol_type = unassigned DNA
acacagagcagagtggggctctgagtatataactgttaggtgcctccctccagcaccatctcctgagaagcactctcccttgtcgtggaggtgggcaaatctttatcagccactgccttctgctgccaggaagccagctagagtggtctttaaagaaaactgggcatctcctgctacttaaaatcaaaaactacctaaaataaagattataaaaaagtaaggatgaatggacggtctttgattggcggcgctggtgacgcccgtcatggtcctgtttggaaggacccttttggaactaaagctggtgacgcagcgcgcagaggcatcgcccggctaagcttggccctggcagatgggtcgcaggaacaggagccagaggaagagatagccatggaggacagccccactatggttagagtggacagccccactatggttaggggtgaaaaccaggtttcgccatgtcaagggagaaggtgcttccccaaagctcttggctatgtcaccggtgacatgaaagaacttgccaaccagcttaaagacaaacccgtggtgctccagttcattgactggattctccggggcatatcccaagtggtgttcgtcaacaaccccgtcagtggaatcctgattctggtaggacttcttgttcagaacccctggtgggctctcactggctggctgggaacagtggtctccactctgatggccctcttgctcagccaggacaggtcattaatagcatctgggctctatggctacaatgccaccctggtgggagtactcatggctgtcttttcggacaagggagactatttctggtggctgttactccctgtatgtgctatgtccatgacttgcccaattttctcaagtgcattgaattccatgctcagcaaatgggacctccccgtcttcaccctccctttcaacatggcgttgtcaatgtacctttcagccacaggacattacaatccattctttccagccaaactggtcatacctataactacagctccaaatatctcctggtctgacctcagtgccctggagttgttgaaatctataccagtgggagttggtcagatctatggctgtgataatccatggacagggggcattttcctgggagccatcctactctcctccccactcatgtgcctgcatgctgccataggatcattgctgggcatagcagcgggactcagtctttcagccccatttgaggacatctactttggactctggggtttcaacagctctctggcctgcattgcaatgggaggaatgttcatggcgctcacctggcaaacccacctcctggctcttggctgtgccctgttcacggcctatcttggagtcggcatggcaaactttatggctgaggttggattgccagcttgtacctggcccttctgtttggccacgctattgttcctcatcatgaccacaaaaaattccaacatctacaagatgcccctcagtaaagttacttatcctgaagaaaaccgcatcttctacctgcaagccaagaaaagaatggtggaaagccctttgtgagaacaagccccatttgcagccatggtcacgagtcatttctgcctgactgctccagctaacttccagggtctcagcaaactgctgtttttcacgagtatcaactttcatactgacgcgtctgtaatctgttcttatgctcattttgtattttcctttcaactccaggaatatccttgagcatatgagagtcacatccaggtgatgtgctctggtatggaatttgaaaccccaatggggccttggcactaagactggaatgtatataaagtcaaagtgctccaacagaaggaggaagtgaaaacaaactattagtatttattgatattcttggtgtttagctggctcgatgatgttaacagtattaaaaattaaaccccataaaccaactaagccttatggaattcacagtcacaaaatcgaagttaatccagaattctgtgataagcagcttggctttttttttaaatcaatgcaagttacacattatagccagaatctgtatcacagaggtgcaagctgacagcagagctcagtccccacttcctgcaaacaatggcctgcaccctatcccttgtgtgtgtgacattctctcatgggacaatgttggggtttttcagactgacaggactgcaagagggagaaaggaattttgtcaatcaaaattattctgtattgcaacttttctcagagattgcaaaggattttttaggtagagattatttttccttatgaaaaatgatctgttttaaatgagataaaataggagaagttcctggcttaacctgttcttacatattaaagaaaagttacttactgtatttatgaaatactcagcttaggcatttttactttaacccctaaattgattttgtaaatgccacaaatgcatagaattgttaccaacctccaaagggctctttaaaatcatattttttattcatttgaggatgtcttataaagactgaaggcaaaggtcagattgcttacgggtgttatttttataagttgttgaattccttaatttaaaaaagctcattattttttgcacactcacaatattctctctcagaaatcaatggcatttgaaccaccaaaaagaaataaagggctgagtgcggtggctcacgcctgtaatcccagcactttggggagcccaggcgggcagattgcttgaacccaggagttcaagaccagcctgggcagcatggtgaaaccctgtatctacaaaaaatacaaaaattagccaggcatggtggtgggtgcctgtagttccagctacttgggaggctgaggtgggaaaatgacttgagcccaggaggaggaggctgcagtgagctaagattgcaccactgcactccaacctgggcgacaagagtgaaactgtgtctctcaaaaaaaaaaaaaaacaaacaaaaacaaaaacaaaacaaaacaaaacaaaacaaaacaggtaaggattcccctgttttcctctctttaattttaaagttatcagttccgtaaagtctctgtaaccaaacatactgaagacagcaacagaagtcacgttcagggactggctcacacctgtaatcccagcactttgggagatggaggtaaaaggatctcttgagcccaggagttcaagaccagcttgggcaacatagcaagactccatctcttaaaaaataaaaatagtaacattagccaggtgtagcagcacacatctgcagcagctactcaggaggctgaggtggaaagatcgcttgtgcacagaagttcgaggctgcagtgagctatatgatcatgtcactgcactccagcctgtgtgaccgagcaagaccctatctcaaaaaaattaattaattaattaattaattaatttaaaaaggaagtcatgttcatttactttccacttcagtgtgtatcgtgtagtattttggaggttggaaagtgaaacgtaggaatcctgaagattttttccacttctagtttgcagtgctcagtgcacaatatacattttgctgaatgaataaacagaaatagggaagtaaacctacaaatattttagggagaagctcacttcttccttttctcaggaaaccaagcaagcaaacatatcgttccaattttaaaacccagtgaccaaagcctttggaactatgaatttgcaactgtcataggtttatggatattgctgtggagaagctcaattttcagtgtttgaactgaaccctttcttgttagggaacgtgtgaaagaagaattgtggggaaaaaaaagcaagcataaccaaagatcatcagcagtgaagaatctaggctgtggctgagagaaccagaggcctctaaaatggacccgagtcgatcttcagaacagggatctaccatgcaggagcttcttgtgctcacacaaatctgtaaatgggaacattgtacattgtcgaatttaaatgatattaattttctcaagctatttttgttactattttcctaaaattgaatatttgcagggagcacttatactttttcctaatgtctgtataacaaatttctatgcaagtacatgaataaattatgctcacagctca

SEQ ID NO: 28578 - DNA, 4226 bp, Homo sapiens
  source 1..4226: mol_type = unassigned DNA
acgcagcagaacaaaatctgggcattggtccctgtgtaggatggcttcccgttattttttttttaagcaaagtaaatgaacatcaaatttccatagtcagctgctgtctttctgcccactgagagctctttggtgaaggcaaagtcctccttcttcattagcggtctcccatgtggggccacatcttccctcaccaggaacccagtgggcgcgctccagcccccctcagcttgccttttgcgtggtcattagagctagggcacacgtcatgctgattcacatatttttgccctttgtcatgtattgagaaaaagtaaggatgaatggacggtctttgattggcggcgctggtgacgcccgtcatggtcctgtttggaaggacccttttggaactaaagctggtgacgcagcgcgcagaggcatcgcccggctaagcttggccctggcagatgggtcgcaggaacaggagccagaggaagagatagccatggaggacagccccactatggttagagtggacagccccactatggttaggggtgaaaaccaggtttcgccatgtcaagggagaaggtgcttccccaaagctcttggctatgtcaccggtgacatgaaagaacttgccaaccagcttaaagacaaacccgtggtgctccagttcattgactggattctccggggcatatcccaagtggtgttcgtcaacaaccccgtcagtggaatcctgattctggtaggacttcttgttcagaacccctggtgggctctcactggctggctgggaacagtggtctccactctgatggccctcttgctcagccaggacaggtcattaatagcatctgggctctatggctacaatgccaccctggtgggagtactcatggctgtcttttcggacaagggagactatttctggtggctgttactccctgtatgtgctatgtccatgacttgcccaattttctcaagtgcattgaattccatgctcagcaaatgggacctccccgtcttcaccctccctttcaacatggcgttgtcaatgtacctttcagccacaggacattacaatccattctttccagccaaactggtcatacctataactacagctccaaatatctcctggtctgacctcagtgccctggagttgttgaaatctataccagtgggagttggtcagatctatggctgtgataatccatggacagggggcattttcctgggagccatcctactctcctccccactcatgtgcctgcatgctgccataggatcattgctgggcatagcagcgggactcagtctttcagccccatttgaggacatctactttggactctggggtttcaacagctctctggcctgcattgcaatgggaggaatgttcatggcgctcacctggcaaacccacctcctggctcttggctgtgccctgttcacggcctatcttggagtcggcatggcaaactttatggctgaggttggattgccagcttgtacctggcccttctgtttggccacgctattgttcctcatcatgaccacaaaaaattccaacatctacaagatgcccctcagtaaagttacttatcctgaagaaaaccgcatcttctacctgcaagccaagaaaagaatggtggaaagccctttgtgagaacaagccccatttgcagccatggtcacgagtcatttctgcctgactgctccagctaacttccagggtctcagcaaactgctgtttttcacgagtatcaactttcatactgacgcgtctgtaatctgttcttatgctcattttgtattttcctttcaactccaggaatatccttgagcatatgagagtcacatccaggtgatgtgctctggtatggaatttgaaaccccaatggggccttggcactaagactggaatgtatataaagtcaaagtgctccaacagaaggaggaagtgaaaacaaactattagtatttattgatattcttggtgtttagctggctcgatgatgttaacagtattaaaaattaaaccccataaaccaactaagccttatggaattcacagtcacaaaatcgaagttaatccagaattctgtgataagcagcttggctttttttttaaatcaatgcaagttacacattatagccagaatctgtatcacagaggtgcaagctgacagcagagctcagtccccacttcctgcaaacaatggcctgcaccctatcccttgtgtgtgtgacattctctcatgggacaatgttggggtttttcagactgacaggactgcaagagggagaaaggaattttgtcaatcaaaattattctgtattgcaacttttctcagagattgcaaaggattttttaggtagagattatttttccttatgaaaaatgatctgttttaaatgagataaaataggagaagttcctggcttaacctgttcttacatattaaagaaaagttacttactgtatttatgaaatactcagcttaggcatttttactttaacccctaaattgattttgtaaatgccacaaatgcatagaattgttaccaacctccaaagggctctttaaaatcatattttttattcatttgaggatgtcttataaagactgaaggcaaaggtcagattgcttacgggtgttatttttataagttgttgaattccttaatttaaaaaagctcattattttttgcacactcacaatattctctctcagaaatcaatggcatttgaaccaccaaaaagaaataaagggctgagtgcggtggctcacgcctgtaatcccagcactttggggagcccaggcgggcagattgcttgaacccaggagttcaagaccagcctgggcagcatggtgaaaccctgtatctacaaaaaatacaaaaattagccaggcatggtggtgggtgcctgtagttccagctacttgggaggctgaggtgggaaaatgacttgagcccaggaggaggaggctgcagtgagctaagattgcaccactgcactccaacctgggcgacaagagtgaaactgtgtctctcaaaaaaaaaaaaaaacaaacaaaaacaaaaacaaaacaaaacaaaacaaaacaaaacaggtaaggattcccctgttttcctctctttaattttaaagttatcagttccgtaaagtctctgtaaccaaacatactgaagacagcaacagaagtcacgttcagggactggctcacacctgtaatcccagcactttgggagatggaggtaaaaggatctcttgagcccaggagttcaagaccagcttgggcaacatagcaagactccatctcttaaaaaataaaaatagtaacattagccaggtgtagcagcacacatctgcagcagctactcaggaggctgaggtggaaagatcgcttgtgcacagaagttcgaggctgcagtgagctatatgatcatgtcactgcactccagcctgtgtgaccgagcaagaccctatctcaaaaaaattaattaattaattaattaattaatttaaaaaggaagtcatgttcatttactttccacttcagtgtgtatcgtgtagtattttggaggttggaaagtgaaacgtaggaatcctgaagattttttccacttctagtttgcagtgctcagtgcacaatatacattttgctgaatgaataaacagaaatagggaagtaaacctacaaatattttagggagaagctcacttcttccttttctcaggaaaccaagcaagcaaacatatcgttccaattttaaaacccagtgaccaaagcctttggaactatgaatttgcaactgtcataggtttatggatattgctgtggagaagctcaattttcagtgtttgaactgaaccctttcttgttagggaacgtgtgaaagaagaattgtggggaaaaaaaagcaagcataaccaaagatcatcagcagtgaagaatctaggctgtggctgagagaaccagaggcctctaaaatggacccgagtcgatcttcagaacagggatctaccatgcaggagcttcttgtgctcacacaaatctgtaaatgggaacattgtacattgtcgaatttaaatgatattaattttctcaagctatttttgttactattttcctaaaattgaatatttgcagggagcacttatactttttcctaatgtctgtataacaaatttctatgcaagtacatgaataaattatgctcacagctca

SEQ ID NO: 28579 - DNA, 1684 bp, Homo sapiens
  source 1..1684: mol_type = unassigned DNA
gcactctcccttgtcgtggaggtgggcaaatctttatcagccactgccttctgctgccaggaagccagctagagtggtctttaaagaaaactgggcatctcctgctacttaaaatcaaaaactacctaaaataaagattataaaaaagtaaggatgaatggacggtctttgattggcggcgctggtgacgcccgtcatggtcctgtttggaaggacccttttggaactaaagctggtgacgcagcgcgcagaggcatcgcccggctaagcttggccctggcagatgggtcgcaggaacaggagccagaggaagagatagccatggaggacagccccactatggttagagtggacagccccactatggttaggggtgaaaaccaggtttcgccatgtcaagggagaaggtgcttccccaaagctcttggctatgtcaccggtgacatgaaagaacttgccaaccagcttaaagacaaacccgtggtgctccagttcattgactggattctccggggcatatcccaagtggtgttcgtcaacaaccccgtcagtggaatcctgattctggtaggacttcttgttcagaacccctggtgggctctcactggctggctgggaacagtggtctccactctgatggccctcttgctcagccaggacaggtcattaatagcatctgggctctatggctacaatgccaccctggtgggagtactcatggctgtcttttcggacaagggagactatttctggtggctgttactccctgtatgtgctatgtccatgacttgttgttgaaatctataccagtgggagttggtcagatctatggctgtgataatccatggacagggggcattttcctgggagccatcctactctcctccccactcatgtgcctgcatgctgccataggatcattgctgggcatagcagcgggactcagtctttcagccccatttgaggacatctactttggactctggggtttcaacagctctctggcctgcattgcaatgggaggaatgttcatggcgctcacctggcaaacccacctcctggctcttggctgtgccctgttcacggcctatcttggagtcggcatggcaaactttatggctgaggttggattgccagcttgtacctggcccttctgtttggccacgctattgttcctcatcatgaccacaaaaaattccaacatctacaagatgcccctcagtaaagttacttatcctgaagaaaaccgcatcttctacctgcaagccaagaaaagaatggtggaaagccctttgtgagaacaagccccatttgcagccatggtcacgagtcatttctgcctgactgctccagctaacttccagggtctcagcaaactgctgtttttcacgagtatcaactttcatactgacgcgtctgtaatctgttcttatgctcattttgtattttcctttcaactccaggaatatccttgagcatatgagagtcacatccaggtgatgtgctctggtatggaatttgaaaccccaatggggccttggcactaagactggaatgtatataaagtcaaagtgctccaacagaaggaggaagtgaaaacaaactattagtatttattgatattcttggtgtttagctggctcgatgatgttaacagtattaaaaattaaaccccataaaccaa

SEQ ID NO: 28580 - DNA, 2371 bp, Homo sapiens
  source 1..2371: mol_type = unassigned DNA
gcaccatctcctgagaagcactctcccttgtcgtggaggtgggcaaatctttatcagccactgccttctgctgccaggaagccagctagagtggtctttaaagaaaactgggcatctcctgctacttaaaatcaaaaactacctaaaataaagattataaaaaagtaaggatgaatggacggtctttgattggcggcgctggtgacgcccgtcatggtcctgtttggaaggacccttttggaactaaagctggtgacgcagcgcgcagaggcatcgcccggctaagcttggccctggcagatgggtcgcaggaacaggtcattaatagcatctgggctctatggctacaatgccaccctggtgggagtactcatggctgtcttttcggacaagggagactatttctggtggctgttactccctgtatgtgctatgtccatgacttgcccaattttctcaagtgcattgaattccatgctcagcaaatgggacctccccgtcttcaccctccctttcaacatggcgttgtcaatgtacctttcagccacaggacattacaatccattctttccagccaaactggtcatacctataactacagctccaaatatctcctggtctgacctcagtgccctggagttgttgaaatctataccagtgggagttggtcagatctatggctgtgataatccatggacagggggcattttcctgggagccatcctactctcctccccactcatgtgcctgcatgctgccataggatcattgctgggcatagcagcgggactcagtctttcagccccatttgaggacatctactttggactctggggtttcaacagctctctggcctgcattgcaatgggaggaatgttcatggcgctcacctggcaaacccacctcctggctcttggctgtgccctgttcacggcctatcttggagtcggcatggcaaactttatggctgaggttggattgccagcttgtacctggcccttctgtttggccacgctattgttcctcatcatgaccacaaaaaattccaacatctacaagatgcccctcagtaaagttacttatcctgaagaaaaccgcatcttctacctgcaagccaagaaaagaatggtggaaagccctttgtgagaacaagccccatttgcagccatggtcacgagtcatttctgcctgactgctccagctaacttccagggtctcagcaaactgctgtttttcacgagtatcaactttcatactgacgcgtctgtaatctgttcttatgctcattttgtattttcctttcaactccaggaatatccttgagcatatgagagtcacatccaggtgatgtgctctggtatggaatttgaaaccccaatggggccttggcactaagactggaatgtatataaagtcaaagtgctccaacagaaggaggaagtgaaaacaaactattagtatttattgatattcttggtgtttagctggctcgatgatgttaacagtattaaaaattaaaccccataaaccaactaagccttatggaattcacagtcacaaaatcgaagttaatccagaattctgtgataagcagcttggctttttttttaaatcaatgcaagttacacattatagccagaatctgtatcacagaggtgcaagctgacagcagagctcagtccccacttcctgcaaacaatggcctgcaccctatcccttgtgtgtgtgacattctctcatgggacaatgttggggtttttcagactgacaggactgcaagagggagaaaggaattttgtcaatcaaaattattctgtattgcaacttttctcagagattgcaaaggattttttaggtagagattatttttccttatgaaaaatgatctgttttaaatgagataaaataggagaagttcctggcttaacctgttcttacatattaaagaaaagttacttactgtatttatgaaatactcagcttaggcatttttactttaacccctaaattgattttgtaaatgccacaaatgcatagaattgttaccaacctccaaagggctctttaaaatcatattttttattcatttgaggatgtcttataaagactgaaggcaaaggtcagattgcttacgggtgttatttttataagttgttgaattccttaatttaaaaaagctcattattttttgcacactcacaatattctctctcagaaatcaatggcatttgaaccaccaaaaagaaataaagggctgagtgcggtggctcacgcctgtaatcccagcactttggggagcccaggcgggcagattgcttgaacccaggagttcaagaccagcctgggcagcatggtgaaaccctgtatctac

SEQ ID NO: 28581 - DNA, 1048 bp, Homo sapiens
  source 1..1048: mol_type = unassigned DNA
atctcctgagaagcactctcccttgtcgtggaggtgggcaaatctttatcagccactgccttctgctgccaggaagccagctagagtggtctttaaagaaaactgggcatctcctgctacttaaaatcaaaaactacctaaaataaagattatagtcattaatagcatctgggctctatggctacaatgccaccctggtgggagtactcatggctgtcttttcggacaagggagactatttctggtggctgttactccctgtatgtgctatgtccatgacttgcccaattttctcaagtgcattgaattccatgctcagcaaatgggacctccccgtcttcaccctccctttcaacatggcgttgtcaatgtacctttcagccacaggacattacaatccattctttccagccaaactggtcatacctataactacagctccaaatatctcctggtctgacctcagtgccctggagttgttgaaatctataccagtgggagttggtcagatctatggctgtgataatccatggacagggggcattttcctgggagccatcctactctcctccccactcatgtgcctgcatgctgccataggatcattgctgggcatagcagcgggactcagtctttcagccccatttgaggacatctactttggactctggggtttcaacagctctctggcctgcattgcaatgggaggaatgttcatggcgctcacctggcaaacccacctcctggctcttggctgtgccctgttcacggcctatcttggagtcggcatggcaaactttatggctgaggttggattgccagcttgtacctggcccttctgtttggccacgctattgttcctcatcatgaccacaaaaaattccaacatctacaagatgcccctcagtaaagttacttatcctgaagaaaaccgcatcttctacctgcaagccaagaaaagaatggtggaaagccctttgtgagaacaagccccatttgcagccatggtcacgagtcatttctgcctgactgctccagctaacttcca

SEQ ID NO: 28582 - DNA, 4167 bp, Homo sapiens
  source 1..4167: mol_type = unassigned DNA
ttttttttttttttttgagacacagtttgctctgtcacccaggctggagtacattggcactatcttggctcactgcaacctccacctcccaggttcaagagattcttctgtctcagcctcccagtagctaggactacaagtgtgtgccaccacaccctgctaatttttgtatttttagtagagacagggtttcaccacattggccaggctggtctcgaacttctgacgtcaagtgatccacccgactcggcctctcaaagtgctgggattacaggcgtgggccgccgcacccggccatttgcttttgattttactggctcataggtggaagggacttgccttgcctcagatgaaactttggactttgactttcaagttaatactggaataagttaagactttgggggactgttgctaaggcacaattttgttttgaaatgtataaagaacataatatctgggaggggccaggggcagaatgatatggtttggctctgtgtccacacctgaatatcatctcaaattgtaatcccagtaatccccatatgttgagggcaggacccagggcaaggtgactggatcatgggagcggtttcccccatgctgttctcgtgatagtgagtgaattctcacaagatctgatggttttataagtgtttggcaagttcctgctccacaccatctctctcttctgccgccatttgagaaggtccaagtttgcttccccttcgccttccaccatgactgtaagtttcctgaggcctccccagcaatgtggaagttccatcgatagaagagtggctgtgacccgaaggaatgtctgacccccacagcagtcctctcctgccagagccactttccagcagatacaaactctacgaggcagagtttaccagcccgagctggccctcgacatccccggatactcacccagctctgcccctcctggaaatgcctgaagaaaaggatctccggtcttccaatgaagacagtcacattgtgaagatcgaaaagctcaatgaaaggagtaaaaggaaagacgacggggtggcccatcgggactcagcaggccaaaggtgcatctgcctctccaaagcagtgggctacctcacgggcgacatgaaggagtacaggatctggctgaaagacaagcaccttgccctccagttcatagactgggtcctgagagggaccgctcaggtgatgttcatcaacaatcctctcagcggcctcatcatcttcatagggctgctgatccagaatccctggtggacaatcactgggggcctggggacagtggtctcgaccttaacagctctcgccttgggccaagacaggtctgccattgcctcaggactccatgggtacaacgggatgctggtgggactgctgatggccgtgttctcggagaagttagactactactggtggcttctgtttcctgtgaccttcacagccatgtcctgcccagttctttctagtgccttgaattccatcttcagcaagtgggacctcccggtcttcactctgcccttcaacattgcagtcaccttgtaccttgcagccacaggccactacaacctcttcttccccacaacactggtagagcctgtgtcttcagtgcccaatatcacctggacagagatggaaatgcccctgctgttacaagccatccctgttggggtcggccaggtgtatggctgtgacaatccctggacaggcggcgtgttcctggtggctctgttcatctcctcgccactcatctgcttgcatgcagccattggctcaatcgtggggctgctagcagccctgtcagtggccacacccttcgagaccatctacacaggcctctggagctacaactgcgtcctctcctgcatcgccatcggaggcatgttctatgccctcacctggcagactcacctgctggccctcatctgtgccctgttctgtgcatacatggaagcagccatctccaacatcatgtcagtggtgggcgtgccaccaggcacctgggccttctgccttgccaccatcatcttcctgctcctgacgacaaacaacccagccatcttcagactcccactcagcaaagtcacctaccccgaggccaaccgcatctactacctgacagtgaaaagcggtgaagaagagaaggcccccagcggaggcggtggggagcatccacccacagcaggcccaaaggtggaggagggctcggaggctgtgctctccaagcacaggagtgtatttcacatcgagtggtcatccattcggaggaggagcaaagtgtttggaaaaggcgaacaccaggaaagacaaaacaaagacccatttccctatcgataccggaagcccacagtcgagctgcttgatctggacaccatggaggagagctctgagataaaagtggaaacaaacatttccaagacatcctggattcggagttccatggctgccagtgggaaaagggtcagcaaagccctcagctacatcacaggagagatgaaggagtgtggagagggacttaaagacaagtccccagtgttccagttctttgactgggtcctccgaggcacatctcaagtgatgtttgtgaacaaccccctcagcggcatcctcatcatcctcggcctcttcatccagaacccctggtgggcgatctcaggctgcctgggtaccatcatgtccaccttgacagccctcatcctgagtcaggacaagtcggccatcgctgcaggatttcacggctacaatggggtgctggtggggctgctgatggccgtgttctcagacaaaggtgactactactggtggctgttgctacccgtcatcatcatgtccatgtcttgccccatcctctccagtgccctgggtaccatcttcagcaagtgggacctcccagtcttcacactgcccttcaatatcactgtgactttgtacctggcagccacgggccactacaaccttttcttccccacaacgctgctgcagcctgcatccgccatgcccaacatcacctggtcagaggtccaagtgcccttgcttttgagagccatccccgttggaattggccaagtgtacggctgtgataacccctggactggaggcatcttcctcatagctctgttcatatcctcacctctcatttgcttgcatgcagcaattggatccaccatggggatgctagcagcactcactattgcgacgccctttgactccatctacttcggcctgtgtggcttcaacagcaccctcgcatgcatagcgataggaggcatgttctacgtcatcacctggcagacgcacctcctcgccatcgcctgcgcactgtttgctgcctacctgggtgctgccctggctaacatgttatctgtgtttggattgccgccctgcacttggcccttctgtctctcagctctcaccttcctgctcctgacgaccaataaccccgccatctacaagctcccgctcagcaaagtcacctacccagaggccaaccgcatctactacctgtcccaggagagaaacagaagggcatcaatcataacaaagtatcaggcctacgatgtctcctaagtttccctgtctaaaacacatcagtgtaaattcaggcttcagcacgccgtccagatccccaggataagagaccacttagccttccctttggtctgttctgtgactctctccccaaacacaaagaagcgtgtatgtagtcaccattccagaacctctcttttctaagatgcacaacacttatcaaagatatgtttagtttagactttatacccttagctttcccataagagctccctttgtggggaacttgccctcttctgcgaaataagcctcatccttaaagagaagtcaccggccgggcacggtggctcacgcctgtaatcccagcactttgggaggccgaggcgggtggatcacgaggtcaggagatcgagaccatcctggcgaacatggtgagaccccatctctactaaaaatacaaaaaattagccaggcatggtggcgggcacctgtagtcccagctacttgggaggctgaggcaggagaatggcgtgaacccgggaggtggagcttgcagtgagccaagatcacgccactgcactccagcctgggcaacggagtgagactctgtctcaaaaaaaaaaaaaa

SEQ ID NO: 28583 - DNA, 1729 bp, Homo sapiens
  source 1..1729: mol_type = unassigned DNA
atctctctcttctgccgccatttgagaaggtccaagtttgcttccccttcgccttccaccatgacttccatcgatagaagagtggctgtgacccgaaggaatgtctgacccccacagcagtcctctcctgccagagccactttccagcagatacaaactctacgaggcagagtttaccagcccgagctggccctcgacatccccggatactcacccagctctgcccctcctggaaatgcctgaagaaaaggatctccggtcttccaatgaagacagtcacattgtgaagatcgaaaagctcaatgaaaggagtaaaaggaaagacgacggggtggcccatcgggactcagcaggccaaaggtgcatctgcctctccaaagcagtgggctacctcacgggcgacatgaaggagtacaggatctggctgaaagacaagcaccttgccctccagttcatagactgggtcctgagagggaccgctcaggtgatgttcatcaacaatcctctcagcggcctcatcatcttcatagggctgctgatccagaatccctggtggacaatcactgggggcctggggacagtggtctcgaccttaacagctctcgccttgggccaagacaggtctgccattgcctcaggactccatgggtacaacgggatgctggtgggactgctgatggccgtgttctcggagaagttagactactactggtggcttctgtttcctgtgaccttcacagccatgtcctggatggagacggattttaactggagtaagagtggatgctggaagcatctgctacaataatccacaattgtctgctacaaaaccccacagagatgacagtgtttagattagagtgatatccatgaacatgccacaggccactacaacctcttcttccccacaacactggtagagcctgtgtcttcagtgcccaatatcacctggacagagatggaaatgcccctgctgttacaagccatccctgttggggtcggccaggtgtatggctgtgacaatccctggacaggcggcgtgttcctggtggctctgttcatctcctcgccactcatctgcttgcatgcagccattggctcaatcgtggggctgctagcagccctgtcagtggccacacccttcgagaccatctacacaggcctctggagctacaactgcgtcctctcctgcatcgccatcggaggcatgttctatgccctcacctggcagactcacctgctggccctcatctgtgccctgttctgtgcatacatggaagcagccatctccaacatcatgtcagtggtgggcgtgccaccaggcacctgggccttctgccttgccaccatcatcttcctgctcctgacgacaaacaacccagccatcttcagactcccactcagcaaagtcacctaccccgaggccaaccgcatctactacctgacagtgaaaagcggtgaagaagagaaggcccccagcggtgaatagccatgttcggggaagaaacgctctttgcctgacctgatgtcctctccctgtgttctctgctctggttcaatcagttgcagcactcaccttctttgcctctccttgcacctgtgtagaaccaagcacacctgtaactttctttccctgaagctgattttcattctctgccagaatctccataactatctattgtgcgacattaagggatgttggtattacagtaaaatttccggagttagc

SEQ ID NO: 28584 - DNA, 1619 bp, Homo sapiens
  source 1..1619: mol_type = unassigned DNA
cagtcaccggtaagttactgaatctgcgttggctgcctttcatgccactggtgctcctttgtggctatggaccagtggggggtgtatttcaatcctgtgcttgtttctttttgtcagagtttctttggttatcccctgagcatcttcttcatcgtggtcaatgagttttgcgaaagattttcctactatggaatgcgagcaatcctgattctgtacttcacaaatttcatcagctgggatgataacctgtccaccgccatctaccatacgtttgtggctctgtgctacctgacgccaattctcggagctcttatcgccgactcgtggctgggaaagttcaagaccattgtgtcgctctccattgtctacacaattggacaagcagtcacctcagtaagctccattaatgacctcacagaccacaaccatgatggcacccccgacagccttcctgtgcacgtggtgctgtccttgatcggcctggccctgatagctctcgggactggaggaatcaaaccctgtgtgtctgcgtttggtggagatcagtttgaagagggccaggagaaacaaagaaacagatttttttccatcttttacttggctattaatgctggaagtttgctttccacaatcatcacacccatgctcagaggtaagagatacctgaaaggaacttctgttggtcttttttagtaaggccaagtccgtgtcttcttcgttttgttctgttcttcccttctgccctgttttctagctgtcagctacatgctgggatgcacgttggaatctggagtaagtgcttccttccctgtgagtttcacctcctttttgtcttatttaaatcccttatcccagtgaccactggagagtctaagccatccttagcatgggcatccatcttcctaaactgttattcatgcaaagtcatgctcgtggtaagaggtaagaggcaagagaggtgccttggaagccaagctggtggccgtagctgccattttagccttcaagctttgctccccagtgatatttctgtgacttaggaagagtttactgggcaaaattgtattgattttttgtttgttttgttttgtttttagaaggagtcttgctctgtcacccacgctggagcgcagtggcgtgatcttggctcactgcaacctccacctcctgggttcaagcaattctcctgcctcagcctcctgagtagctgggacaacaggcgcctgccaccatgcccggataatattttttgtatttttagtagagatgggatttcaccatgttagccaggatggtctcgatctcctgccctcgtgatctgcctgccttggcctcccaaagtgctgggattacaggtgtgagccaccacgcctggctaaggcaaagtttttttctttgctttcccatcatctcaagtatttccaaaagaactgctcagataaagagaatgggacagtgtcagtaactatcagaggtttgtgcttgctaatgctccatagagagtttgtgaatttcccatgtggaagggaatatgtggtgttactggtgacaaactaacaagaccatcctgtccacatttgaatcagattagattatgaaataaagatttcagggggatt

SEQ ID NO: 28585 - DNA, 1621 bp, Homo sapiens
  source 1..1621: mol_type = unassigned DNA
cagtcaccggtaagttactgaatctgcgttggctgcctttcatgccactggtgctcctttgtggctatggaccagtggggggtgtatttcaatcctgtgcttgtttcttttttgtcagagtttctttggttatcccctgagcatcttcttcatcgtggtcaatgagttttgcgaaagattttcctactatggaatgcgagcaatcctgattctgtacttcacaaatttcatcagctgggatgataacctgtccaccgccatctaccatacgtttgtggctctgtgctacctgacgccaattctcggagctcttatcgccgactcgtggctgggaaagttcaagaccattgtgtcgctctccattgtctacacaattggacaagcagtcacctcagtaagctccattaatgacctcacagaccacaaccatgatggcacccccgacagccttcctgtgcacgtggtgctgtccttgatcggcctggccctgatagctctcgggactggaggaatcaaaccctgtgtgtctgcgtttggtggagatcagtttgaagagggccaggagaaacaaagaaacagatttttttccatcttttacttggctattaatgctggaagtttgctttccacaatcatcacacccatgctcagaggtaagagatacctgaaaggaacttctgttggtctttttttagtaaggccaagtccgtgtcttcttcgttttgttctgttcttcccttctgccctgttttctagctgtcagctacatgctgggatgcacgttggaatctggagtaagtgcttccttccctgtgagtttcacctcctttttgtcttatttaaatcccttatcccagtgaccactggagagtctaagccatccttagcatgggcatccatcttcctaaactgttattcatgcaaagtcatgctcgtggtaagaggtaagaggcaagagaggtgccttggaagccaagctggtggccgtagctgccattttagccttcaagctttgctccccagtgatatttctgtgacttaggaagagtttactgggcaaaattgtattgattttttgtttgttttgttttgtttttagaaggagtcttgctctgtcacccacgctggagcgcagtggcgtgatcttggctcactgcaacctccacctcctgggttcaagcaattctcctgcctcagcctcctgagtagctgggacaacaggcgcctgccaccatgcccggataatattttttgtatttttagtagagatgggatttcaccatgttagccaggatggtctcgatctcctgccctcgtgatctgcctgccttggcctcccaaagtgctgggattacaggtgtgagccaccacgcctggctaaggcaaagtttttttctttgctttcccatcatctcaagtatttccaaaagaactgctcagataaagagaatgggacagtgtcagtaactatcagaggtttgtgcttgctaatgctccatagagagtttgtgaatttcccatgtggaagggaatatgtggtgttactggtgacaaactaacaagaccatcctgtccacatttgaatcagattagattatgaaataaagatttcagggggatt

SEQ ID NO: 28586 - DNA, 2263 bp, Homo sapiens
  source 1..2263: mol_type = unassigned DNA
cacctgccaggagcacgtcccgccggcaggtcgcaggagccctgggagccgccgccatgggaatgtccaaatcacacagtttctttggttatcccctgagcatcttcttcatcgtggtcaatgagttttgcgaaagattttcctactatggaatgcgagcaatcctgattctgtacttcacaaatttcatcagctgggatgataacctgtccaccgccatctaccatacgtttgtggctctgtgctacctgacgccaattctcggagctcttatcgccgactcgtggctgggaaagttcaagaccattgtgtcgctctccattgtctacacaattggacaagcagtcacctcagtaagctccattaatgacctcacagaccacaaccatgatggcacccccgacagccttcctgtgcacgtggtgctgtccttgatcggcctggccctgatagctctcgggactggaggaatcaaaccctgtgtgtctgcgtttggtggagatcagtttgaagagggccaggagaaacaaagaaacagatttttttccatcttttacttggctattaatgctggaagtttgctttccacaatcatcacacccatgctcagagttcaacaatgtggaattcacagtaaacaagcttgttacccactggcctttggggttcctgctgctctcatggctgtagccctgattgtgtttgtccttggcagtgggatgtacaagaagttcaagccacagggcaacatcatgggtaaagtggccaagtgcatcggttttgccatcaaaaatagatttaggcatcggagtaaggcatttcccaagagggagcactggctggactgggctaaagagaaatacgatgagcggctcatctcccaaattaagatggttacgagggtgatgttcctgtatattccactcccaatgttctgggccttgtttgaccagcagggctccaggtggacactgcaggcaacaactatgtccgggaaaatcggagctcttgaaattcagcccgatcagatgcagaccgtgaacgccatcctgatcgtgatcatggtcccgatcttcgatgctgtgctgtaccctctcattgcaaaatgtggcttcaatttcacctccttgaagaagatggcagttggcatggtcctggcctccatggcctttgtggtggctgccatcgtgcaggtggaaatcgataaaactcttccagtcttccccaaaggaaacgaagtccaaattaaagttttgaatataggaaacaataccatgaatatatctcttcctggagagatggtgacacttggcccaatgtctcaaacaaatgcatttatgacttttgatgtaaacaaactgacaaggataaacatttcttctcctggatcaccagtcactgctgtaactgacgacttcaagcagggccaacgccacacgcttctagtgtgggcccccaatcactaccaggtggtaaaggatggtcttaaccagaagccagaaaaaggggaaaatggaatcagatttgtaaatacttttaacgagctcatcaccatcacaatgagtgggaaagtttatgcaaacatcagcagctacaatgccagcacataccagttttttccttctggcataaaaggcttcacaataagctcaacagagattccgccacaatgtcaacctaatttcaatactttctaccttgaatttggtagtgcttatacctatatagtccaaaggaagaatgacagctgccctgaagtgaaggtgtttgaagatatttcagccaacacagttaacatggctctgcaaatcccgcagtattttcttctcacctgtggcgaagtggtcttctctgtcacgggattggaattctcatattctcaggctccttccaacatgaagtcggtgcttcaggcaggatggctgctgaccgtggctgttggcaacatcattgtgctcatcgtggcaggggcaggccagttcagcaaacagtgggccgagtacattctatttgccgcgttgcttctggtcgtctgtgtaatttttgccatcatggctcggttctatacttacatcaacccagcggagatcgaagctcaatttgatgaggatgaaaagaaaaacagactggaaaagagtaacccatatttcatgtcaggggccaattcacagaaacagatgtgaaggtcaggaggcaagtggaggatggactgggcccgcagatgccctgacctctgcccccaggtagcaggacactccattgg

SEQ ID NO: 28587 - DNA, 3910 bp, Homo sapiens
  source 1..3910: mol_type = unassigned DNA
agagggcgcgcgcggctgaaagcgtgtggaggcgcgggctgcagttcggatgtctgtgtggcggggagggggcggcggccgggagagacgactccgccccctgcgcgcatgctccggccccggcgggttataaggcagcctcgctggcccggccagacaaagtggtgagctgcgacgtgactggctagctgcgtgggtactggaacaagcaaacgaggcagcgagcgaaggacgggagccggaccctgggccccgtggaactccagcctgcgccaccacgtcacgcacacgctcggcgctgcgatccgcgcatataacgatatttggatttgacctgcattttggaatttatctacacttaaaatgccaccagcagttggaggtccagttggatacacccccccagatggaggctggggctgggcagtggtaattggagctttcatttccatcggcttctcttatgcatttcccaaatcaattactgtcttcttcaaagagattgaaggtatattccatgccaccaccagcgaagtgtcatggatatcctccataatgttggctgtcatgtatggtggaggtcctatcagcagtatcctggtgaataaatatggaagtcgtatagtcatgattgttggtggctgcttgtcaggctgtggcttgattgcagcttctttctgtaacaccgtacagcaactatacgtctgtattggagtcattggaggtcttgggcttgccttcaacttgaatccagctctgaccatgattggcaagtatttctacaagaggcgaccattggccaacggactggccatggcaggcagccctgtgttcctctgtactctggcccccctcaatcaggttttcttcggtatctttggatggagaggaagctttctaattcttgggggcttgctactaaactgctgtgttgctggagccctcatgcgaccaatcgggcccaagccaaccaaggcagggaaagataagtctaaagcatcccttgagaaagctggaaaatctggtgtgaaaaaagatctgcatgatgcaaatacagatcttattggaagacaccctaaacaagagaaacgatcagtcttccaaacaattaatcagttcctggacttaaccctattcacccacagaggctttttgctatacctctctggaaatgtgatcatgttttttggactctttgcacctttggtgtttcttagtagttatgggaagagtcagcattattctagtgagaagtctgccttccttctttccattctggcttttgttgacatggtagcccgaccatctatgggacttgtagccaacacaaagccaataagacctcgaattcagtatttctttgcggcttccgttgttgcaaatggagtgtgtcatatgctagcacctttatccactacctatgttggattctgtgtctatgcgggattctttggatttgccttcgggtggctcagctccgtattgtttgaaacattgatggaccttgttggaccccagaggttctccagcgctgtgggattggtgaccattgtggaatgctgtcctgtcctcctggggccaccacttttaggtcggctcaatgacatgtatggagactacaaatacacatactgggcatgtggcgtcgtcctaattatttcaggtatctatctcttcattggcatgggcatcaattatcgacttttggcaaaagaacagaaagcaaacgagcagaaaaaggaaagtaaagaggaagagaccagtatagatgttgctgggaagccaaatgaagttaccaaagcagcagaatctccggaccagaaagacacagatggagggcccaaggaggaggaaagtccagtctgaatccatggggctgaagggtaaattgagcagttcatgacccaggatatctgaaaatattctactggcctgtaatctaccagtggtgctcaatgcaaatagtagacatttgtgtggaaatcataccagttgttcattgatgggatttttgtttgactccttaccaatagcctgaatttgaggagggaatgattggtagcaaaggatgggggaaagaagtaggttctgttttgttttgttttaatcttagcttttaatagtgtcataaagattataatatgtgccttaagttttagtctttagaactctagagagccttaacttcttaaaccatttttgctgaattcatctatttcgagtgttgtgttaaaaggaaaaataacaactaacttgtttgaggcaaatctaaaatttaaaattaatcttgcttcattgttacatgtaatatatttcagacattttcactggaagatttatgaacagaaatattggttgaaagttagagattttacaaaatgctgacaaaaatattttcctagcatcagtagatttctggcatatgtttctgctagctatatatttaggaaattcaaagcataaaactttggcaacatcttggctgttctagacacagtgtacttgtcaacccctctcaggtaccttttcttgggatgcttattagaagccaagtaaagtgcttaaggtttgttttcattaaattagctatttctgctcccctgttcaaagatgcattttgagtgtttatagatcactgccctttttgaaatcacctggtattatttttcttactggaaaagttagtattaaaatctacagaactacatatttgtgcctccttggtaaatacaacacatctaattaaatgtagacagatatttcaaacatcagctgaattcacttaagtttttccaaaacctcagttaaactgtgaagctattggaatttttttttcctggaatttttcccctttgattcacagtggtcccatttatatctgcttctagcttagtgctatgtgtgagatatgtgtgtgtttggtgtttttgtttttttgtttttttttttttaaggtttgcaaattaaaaagggccagaaaaatttggcaccaggcaaacgaataaagataggattgggaaagaagttgctaagtgtgcttagttttaataagtaattccttctcttttttcagagaaggccttacagaaaattgttgtgcttagaattgctggatgcatttttaccctccacacaaacctaaaaattttgtgacccctttcacttacctgaaaagtagagaaatggattcagtataaggataaggagggaaggtggaccagaatgaaaactgtaaatatttttttaacctaatatcacttaaatcgaggcagaaagatacagacattcaatgaattatattcaatgcatttaaaataccactgtaattgacagagtaaaagtatagatacaaaaccttgtgtaagaggctgacttttccaaataaacattttttaagaaaacatttcttctcccaaatgtctattttcttgaggaaaatattgctgtgtcttcattttcattaccaggtttcattttgggccttgctaaattgattgaattaaatcctccagcttttgaaccttgatatttgtgtatatgatttattttcatttgaatttctcctttcctcttctttgctgtaaggcaaggaggaggggaattttaaaaccatcttatttgaactgagagcatccagagcagttaaccttaaggaaacaatgaaaaactccctttgtatgcctgggcatcatggcagatagaggaagagtgttagaggagaaaactgctgctgagagtattggcaggcttggcctcagtttggactctgtaattttctttggacccaagtctgtaacctctgcgtacttcttctctcttaccttctataaaaatgaggattactgttggtgagggaataaggaatgtaagtaaaggaaatctgaaaaaataaaagtaaagcaagtataaa

SEQ ID NO: 28588 - DNA, 865 bp, Homo sapiens
  source 1..865: mol_type = unassigned DNA
tccacgtggccgaggtgcacaccccaacccactgggccagtctccccaccctcttacctgctcttctttcccgactcgtctttaatacccaccaggcgccaaccgccgcgggcctggctctatggtggcaagttgcatgggttctcccatcaggacctcccgatgagcctacgagatatttggatttgacctgcattttggaatttatctacacttaaaatgccaccagcagttggaggtccagttggatacacccccccagatggaggctggggctgggcagtggtaattggagctttcatttccatcggcttctcttatgcatttcccaaatcaattactgtcttcttcaaagagattgaaggtatattccatgccaccaccagcgaagtgtcatggatatcctccataatgttggctgtcatgtatggtggaggtcctatcagcagtatcctggtgaataaatatggaagtcgtatagtcatgattgttggtggctgcttgtcaggctgtggcttgattgcagcttctttctgtaacaccgtacagcaactatacgtctgtattggagtcattggaggtcttgggcttgccttcaacttgaatccagctctgaccatgattggcaagtatttctacaagaggcgaccattggccaacggactggccatggcaggcagccctgtgttcctctgtactctggcccccctcaatcaggttttcttcggtatctttggatggagaggaagctttctaattcttgggggcttgctactaaactgctgtgttgctggagccctcatgcgaccaatcgggcccaagccaaccaaggcagggaaagataagtctaaagcatcccttgaga

SEQ ID NO: 28589 - DNA, 3117 bp, Homo sapiens
  source 1..3117: mol_type = unassigned DNA
acggtgccctcgctgccctggtggggtcggaggggacctccggggttgggagactttgtctccggcggagggaggcggcccagcagagggcatcgtggtcacaggcagccgcgtggcctcggactgcagtgctggtgaaggagaccttgaggcgctggggtcagcgcctctcttagccgagccgcgggccccgtgctaagatgccggtcccaggcctggccgaggagttgggtcgtggtgcccggtgacggtggggaagtcccttcccccctaagtcttcaataggctcctcgagagatgctttgatctggaaaagggataacatgaggctgctgcatgtggtacctccagactctcctggccgcttctgccccaagggaagggactcggggcagaagttatttatgattcgtgacattgtccgccccaaccttcttggcccgccgatccttgccccacctggtgacttgcgagagtggtgcggagagccgcattccccacagccaaggcgtgactgcagggttcgagtagactttgcggaggggacggggcagcccgcagactcctgggagtggtgctgacgggggctctttgtcattcaacctgtggctgccagcgtccgccgcagcgcccttctactcatggacttaaggcggccctgttgagagaaatctggaggatagcgttacacttggtccgatgcaagttttttgttccaagatactttaaaggatacatgtgaaagccagatgaagaagtacatagggcaaagtctggaagggtccccaagtacaggagcctcttcccccgtggaattggggtatgctatcctccctgcacatggatgcaatgaccaacctggaatctcatcagatatttggatttgacctgcattttggaatttatctacacttaaaatgccaccagcagttggaggtccagttggatacacccccccagatggaggctggggctgggcagtggtaattggagctttcatttccatcggcttctcttatgcatttcccaaatcaattactgtcttcttcaaagagattgaaggtatattccatgccaccaccagcgaagtgtcatggatatcctccataatgttggctgtcatgtatggtggaggtcctatcagcagtatcctggtgaataaatatggaagtcgtatagtcatgattgttggtggctgcttgtcaggctgtggcttgattgcagcttctttctgtaacaccgtacagcaactatacgtctgtattggagtcattggaggtcttgggcttgccttcaacttgaatccagctctgaccatgattggcaagtatttctacaagaggcgaccattggccaacggactggccatggcaggcagccctgtgttcctctgtactctggcccccctcaatcaggttttcttcggtatctttggatggagaggaagctttctaattcttgggggcttgctactaaactgctgtgttgctggagccctcatgcgaccaatcgggcccaagccaaccaaggcagggaaagataagtctaaagcatcccttgagaaagctggaaaatctggtgtgaaaaaagatctgcatgatgcaaatacagatcttattggaagacaccctaaacaagagaaacgatcagtcttccaaacaattaatcagttcctggacttaaccctattcacccacagaggctttttgctatacctctctggaaatgtgatcatgttttttggactctttgcacctttggtgtttcttagtagttatgggaagagtcagcattattctagtgagaagtctgccttccttctttccattctggcttttgttgacatggtagcccgaccatctatgggacttgtagccaacacaaagccaataagacctcgaattcagtatttctttgcggcttccgttgttgcaaatggagtgtgtcatatgctagcacctttatccactacctatgttggattctgtgtctatgcgggattctttggatttgccttcgggtggctcagctccgtattgtttgaaacattgatggaccttgttggaccccagaggttctccagcgctgtgggattggtgaccattgtggaatgctgtcctgtcctcctggggccaccacttttaggtatagtatatctccctactaatgtgggtctattacaaaacaagcatgtaagatgggaatgctgacagaaagcaaacattagtgagctatttgggtaagaataaatctttctcatttatgtacccttgatgctgggacaatgcttggcacagcataattgctcaaatatagaatctaattaaatggaaccatcaaggcaaaagggggatcaaatattgttacaaatgtcagtgttttttctttttttttgagatggagtcttgctctgttgcccaggctggagtgcagtggcaccatctcagctcactgcaacctccgcctcccaggttcaagcgattcccctgcctcagcctcccggtagctgggattacagatgcatgccaccatgcctggccaatttttatatctttaatagagacagggtttcgccatgttggccaggctggtctctaactcctgacctcaaacgatccacttgtctcagcctcccaaagtgctgggtaacaggtgtgagccactgtgcctggcctaaaatatgtttttttctgatcgcaaaactgatgtgcttagtgtagaaaagcatgtagaaaaacaacccaatctttaaagcgctagtgattatttcattttaaaaatgaagtatatttcacataagttttttttttttttttttttttttttaagacagtcttggtcttgttgcccaggctggagtgcaatggcgcgatctcggctcactgcaacctctgcctcctgggttcaagcaattctcctgcctcagcctcccaagtagctgtgattacaggcgcccaccaccatgcccagctaatttttgtatttttagtagagacggtttcaccatgttggccaggctcgtcttgaactcctaacctcaggtggtccacccgccttggcctcccaaagtgctgggattacaggcatgagccaccatgcctgatccataaatttttt

SEQ ID NO: 28590 - DNA, 1099 bp, Homo sapiens
  source 1..1099: mol_type = unassigned DNA
tccagaatgaagttcagagaaacaaaggaatgaatgataacatgacaacatagaagggagagtaagagagtagatagcatgggaaggtccaacccatatccagttggagtctgagaaaagtgaaaagagagaatgggggagaagcaatatttgaagacataatagatatttggatttgacctgcattttggaatttatctacacttaaaatgccaccagcagttggaggtccagttggatacacccccccagatggaggctggggctgggcagtggtaattggagctttcatttccatcggcttctcttatgcatttcccaaatcaattactgtcttcttcaaagagattgaaggtatattccatgccaccaccagcgaagtgtcatggatatcctccataatgttggctgtcatgtatggtggaggtcctatcagcagtatcctggtgaataaatatggaagtcgtatagtcatgattgttggtggctgcttgtcaggctgtggcttgattgcagcttctttctgtaacaccgtacagcaactatacgtctgtattggagtcattggaggtcttgggcttgccttcaacttgaatccagctctgaccatgattggcaagtatttctacaagaggcgaccattggccaacggactggccatggcaggcagccctgtgttcctctgtactctggcccccctcaatcaggttttcttcggtatctttggatggagaggaagctttctaattcttgggggcttgctactaaactgctgtgttgctggagccctcatgcgaccaatcgggcccaagccaaccaaggcagggaaagataagtctaaagcatcccttgagaaagctggaaaatctggtgtgaaaaaagatctgcatgatgcaaatacagatcttattggaagacaccctaaacaagagaaacgatcagtcttccaaacaattaatcagttcctggacttaaccctattcacccacagaggctttttgctatacctctctggaaatgtgatcatgttttttggactctttgcacctttggtgtttcttagtagttatgggaagagtcagcattattctagtgagaa

SEQ ID NO: 28591 - DNA, 2201 bp, Homo sapiens
  source 1..2201: mol_type = unassigned DNA
gctcggcgctgcgatccgcgcatataacggttagttgggtaacagccggcggcacgcggcgcggaccccacggtgccctcgctgccctggtggggtcggaggggacctccggggttgggagactttgtctccggcggagggaggcggcccagcagagggcatcgtggtcacaggcagccgcgtggcctcggactgcagtgctggtgaaggagaccttgaggcgctggggtcagcgcctctcttagccgagccgcgggccccgtgctaagatgccggtcccaggcctggccgaggagttgggtcgtggtgcccggtgacggtggggaagtcccttcccccctaagtcttcaataggctcctcgagagatgctttgatctggaaaagggataacatgaggctgctgcatgtggtacctccagactctcctggccgcttctgccccaagggaagggactcggggcagaagttatttatgattcgtgacattgtccgccccaaccttcttggcccgccgatccttgccccacctggtgacttgcgagagtggtgcggagagccgcattccccacagccaaggcgtgactgcagggttcgagtagactttgcggaggggacggggcagcccgcagactcctgggagtggtgctgacgggggctctttgtcattcaacctgtggctgccagcgtccgccgcagcgcccttctactcatggacttaaggcggccctgttgagagaaatctggaggatagcgttacacttggtccgatgcaagttttttgttccaaatatttggatttgacctgcattttggaatttatctacacttaaaatgccaccagcagttggaggtccagttggatacacccccccagatggaggctggggctgggcagtggtaattggagctttcatttccatcggcttctcttatgcatttcccaaatcaattactgtcttcttcaaagagattgaaggtatattccatgccaccaccagcgaagtgtcatggatatcctccataatgttggctgtcatgtatggtggaggtcctatcagcagtatcctggtgaataaatatggaagtcgtatagtcatgattgttggtggctgcttgtcaggctgtggcttgattgcagcttctttctgtaacaccgtacagcaactatacgtctgtattggagtcattggaggtcttgggcttgccttcaacttgaatccagctctgaccatgattggcaagtatttctacaagaggcgaccattggccaacggactggccatggcaggcagccctgtgttcctctgtactctggcccccctcaatcaggttttcttcggtatctttggatggagaggaagctttctaattcttgggggcttgctactaaactgctgtgttgctggagccctcatgcgaccaatcgggcccaagccaaccaaggcagggaaagataagtctaaagcatcccttgagaaagctggaaaatctggtgtgaaaaaagatctgcatgatgcaaatacagatcttattggaagacaccctaaacaagagaaacgatcagtcttccaaacaattaatcagttcctggacttaaccctattcacccacagaggctttttgctatacctctctggaaatgtgatcatgttttttggactctttgcacctttggtgtttcttagtagttatgggaagagtcagcattattctagtgagaagtctgccttccttctttccattctggcttttgttgacatggtagcccgaccatctatgggacttgtagccaacacaaagccaataagacctcgaattcagtatttctttgcggcttccgttgttgcaaatggagtgtgtcatatgctagcacctttatccactacctatgttggattctgtgtctatgcgggattctttggatttgccttcgggtggctcagctccgtattgtttgaaacattgatggaccttgttggaccccagaggttctccagcgctgtgggattggtgaccattgtggaatgctgtcctgtcctcctggggccaccacttttaggtcggctcaatgacatgtatggagactacaaatacacatactgggcatgtggcgtcgtcctaattatttcaggtatctatctcttcattggcatgggcatcaattatcgacttttggcaaaagaacagaaagcaaacgagc

SEQ ID NO: 28592 - DNA, 4374 bp, Homo sapiens
  source 1..4374: mol_type = unassigned DNA
gctcggcgctgcgatccgcgcatataacggttagttgggtaacagccggcggcacgcggcgcggaccccacggtgccctcgctgccctggtggggtcggaggggacctccggggttgggagactttgtctccggcggagggaggcggcccagcagagggcatcgtggtcacaggcagccgcgtggcctcggactgcagtgctggtgaaggagaccttgaggcgctggggtcagcgcctctcttagccgagccgcgggccccgtgctaagatgccggtcccaggcctggccgaggagttgggtcgtggtgcccggtgacggtggggaagtcccttcccccctaagtcttcaataggctcctcgagagatgctttgatctggaaaagggataacatgaggctgctgcatgtggtacctccagactctcctggccgcttctgccccaagggaagggactcggggcagaagttatttatgattcgtgacattgtccgccccaaccttcttggcccgccgatccttgccccacctggtgacttgcgagagtggtgcggagagccgcattccccacagccaaggcgtgactgcagggttcgagtagactttgcggaggggacggggcagcccgcagactcctgggagtggtgctgacgggggctctttgtcattcaacctgtggctgccagcgtccgccgcagcgcccttctactcatggacttaaggcggccctgttgagagaaatctggaggatagcgttacacttggtccgatgcaagttttttgttccaaatatttggatttgacctgcattttggaatttatctacacttaaaatgccaccagcagttggaggtccagttggatacacccccccagatggaggctggggctgggcagtggtaattggagctttcatttccatcggcttctcttatgcatttcccaaatcaattactgtcttcttcaaagagattgaaggtatattccatgccaccaccagcgaagtgtcatggatatcctccataatgttggctgtcatgtatggtggaggtcctatcagcagtatcctggtgaataaatatggaagtcgtatagtcatgattgttggtggctgcttgtcaggctgtggcttgattgcagcttctttctgtaacaccgtacagcaactatacgtctgtattggagtcattggaggtcttgggcttgccttcaacttgaatccagctctgaccatgattggcaagtatttctacaagaggcgaccattggccaacggactggccatggcaggcagccctgtgttcctctgtactctggcccccctcaatcaggttttcttcggtatctttggatggagaggaagctttctaattcttgggggcttgctactaaactgctgtgttgctggagccctcatgcgaccaatcgggcccaagccaaccaaggcagggaaagataagtctaaagcatcccttgagaaagctggaaaatctggtgtgaaaaaagatctgcatgatgcaaatacagatcttattggaagacaccctaaacaagagaaacgatcagtcttccaaacaattaatcagttcctggacttaaccctattcacccacagaggctttttgctatacctctctggaaatgtgatcatgttttttggactctttgcacctttggtgtttcttagtagttatgggaagagtcagcattattctagtgagaagtctgccttccttctttccattctggcttttgttgacatggtagcccgaccatctatgggacttgtagccaacacaaagccaataagacctcgaattcagtatttctttgcggcttccgttgttgcaaatggagtgtgtcatatgctagcacctttatccactacctatgttggattctgtgtctatgcgggattctttggatttgccttcgggtggctcagctccgtattgtttgaaacattgatggaccttgttggaccccagaggttctccagcgctgtgggattggtgaccattgtggaatgctgtcctgtcctcctggggccaccacttttaggtcggctcaatgacatgtatggagactacaaatacacatactgggcatgtggcgtcgtcctaattatttcaggtatctatctcttcattggcatgggcatcaattatcgacttttggcaaaagaacagaaagcaaacgagcagaaaaaggaaagtaaagaggaagagaccagtatagatgttgctgggaagccaaatgaagttaccaaagcagcagaatctccggaccagaaagacacagatggagggcccaaggaggaggaaagtccagtctgaatccatggggctgaagggtaaattgagcagttcatgacccaggatatctgaaaatattctactggcctgtaatctaccagtggtgctcaatgcaaatagtagacatttgtgtggaaatcataccagttgttcattgatgggatttttgtttgactccttaccaatagcctgaatttgaggagggaatgattggtagcaaaggatgggggaaagaagtaggttctgttttgttttgttttaatcttagcttttaatagtgtcataaagattataatatgtgccttaagttttagtctttagaactctagagagccttaacttcttaaaccatttttgctgaattcatctatttcgagtgttgtgttaaaaggaaaaataacaactaacttgtttgaggcaaatctaaaatttaaaattaatcttgcttcattgttacatgtaatatatttcagacattttcactggaagatttatgaacagaaatattggttgaaagttagagattttacaaaatgctgacaaaaatattttcctagcatcagtagatttctggcatatgtttctgctagctatatatttaggaaattcaaagcataaaactttggcaacatcttggctgttctagacacagtgtacttgtcaacccctctcaggtaccttttcttgggatgcttattagaagccaagtaaagtgcttaaggtttgttttcattaaattagctatttctgctcccctgttcaaagatgcattttgagtgtttatagatcactgccctttttgaaatcacctggtattatttttcttactggaaaagttagtattaaaatctacagaactacatatttgtgcctccttggtaaatacaacacatctaattaaatgtagacagatatttcaaacatcagctgaattcacttaagtttttccaaaacctcagttaaactgtgaagctattggaatttttttttcctggaatttttcccctttgattcacagtggtcccatttatatctgcttctagcttagtgctatgtgtgagatatgtgtgtgtttggtgtttttgtttttttgtttttttttttttaaggtttgcaaattaaaaagggccagaaaaatttggcaccaggcaaacgaataaagataggattgggaaagaagttgctaagtgtgcttagttttaataagtaattccttctcttttttcagagaaggccttacagaaaattgttgtgcttagaattgctggatgcatttttaccctccacacaaacctaaaaattttgtgacccctttcacttacctgaaaagtagagaaatggattcagtataaggataaggagggaaggtggaccagaatgaaaactgtaaatatttttttaacctaatatcacttaaatcgaggcagaaagatacagacattcaatgaattatattcaatgcatttaaaataccactgtaattgacagagtaaaagtatagatacaaaaccttgtgtaagaggctgacttttccaaataaacattttttaagaaaacatttcttctcccaaatgtctattttcttgaggaaaatattgctgtgtcttcattttcattaccaggtttcattttgggccttgctaaattgattgaattaaatcctccagcttttgaaccttgatatttgtgtatatgatttattttcatttgaatttctcctttcctcttctttgctgtaaggcaaggaggaggggaattttaaaaccatcttatttgaactgagagcatccagagcagttaaccttaaggaaacaatgaaaaactccctttgtatgcctgggcatcatggcagatagaggaagagtgttagaggagaaaactgctgctgagagtattggcaggcttggcctcagtttggactctgtaattttctttggacccaagtctgtaacctctgcgtacttcttctctcttaccttctataaaaatgaggattactgttggtgagggaataaggaatgtaagtaaaggaaatctgaaaaaataaaagtaaagcaagt

SEQ ID NO: 28593 - DNA, 2799 bp, Homo sapiens
  source 1..2799: mol_type = unassigned DNA
ttccatcgagcctctgtaccttacctatggaatcatatttgcctgcggctgctcctttgcataccagccttcattggtcattttgggacactatttcaagaagcgccttggactggtgaatggcattgtcactgctggcagcagtgtcttcacaatcctgctgcctttgctcttaagggttctgattgacagcgtgggcctcttttacacattgagggtgctctgcatcttcatgtttgttctctttctggctggctttacttaccgacctcttgctaccagtaccaaagataaagagagtggaggtagcggatcctccctcttttccaggaaaaagttcagtcctccaaaaaaaattttcaattttgccatcttcaaggtgacagcttatgcagtgtgggcagttggaataccacttgcactttttggatactttgtgccttatgttcacttgatctcaacatctgctgcaatttgactgttcagatgaaacatgtaaatgaaagatttcaagatgaaaaaaataaagaggttgttctcatgtgcattggcgtcacttcaggagttggacgactgctctttggccggattgcagattatgtgcctggtgtgaagaaggtttatctacaggtactctcctttttcttcattggtctgatgtccatgatgattcctctgtgtagcatctttggggccctcattgctgtgtgcctcatcatgggtctcttcgatggatgcttcatttccattatggctcccatagcctttgagttagttggtgcccaggatgtctcccaagcaattggatttctgctcggattcatgtctatacccatgactgttggcccacccattgcagggttacttcgtgacaaactgggctcctatgatgtggcattctacctcgctggagtccctccccttattggaggtgctgtgctttgttttatcccgtggatccatagtaagaagcaaagagagatcagtaaaaccactggaaaagaaaagatggagaaaatgttggaaaaccagaactctctgctgtcaagttcatctggaatgttcaagaaagaatctgactctattatttaatatcttacatacctccaccagactggacttgctttttgaattttaagcaagtttcctttccttttatacaaattgcaaatttcatatttttttaatcacatcctaggaatagcacaataattgggaaatagaacccttatcactagaagaaccattttctgccactaaatatctctgatgtttccatgagtctgagggcagagactctggtatatgaaaacgtctgaaagtcacatattgtgaaaatttgaagctatctcagtaaaaagcagctttggaaactgtgaatgatctttagcttgtacaaatgtttaaaaatacctcaggctatactgaaagggttgcagtttggttaggagtggaaatattttgtttgttaatgatgtcttcagttctggtacctctgttttactttcttatgctctttggaaactttttgcaaaatttaagcctgggttctagataataccagatctacctaaacctcaagtctatgttaaagttgctttcctgctgttaaataagctatgatattaagatattctgacttgctccagtgtcaagggaccttctgggagcaggtgctaacatagtgttcagaatcaatatgtgagatgaaaaggatcccctccaggaggatcctgagctgttcagaaatcatttaagtttacagcgttgttccctttgcgtttgcagtgcgttttactcaagtagccagaaacaccccacgtttctgaatttgtttaaactgtaacaataaagtaaaatagaatgcatgaaagatattctggcgattgtaacttagaatttttctgacttctggatttgttggcactagaacctgatatttaaagtcttactgagcagctatcaagtggcagttacaggcacaaattggtggaggctggaggatggggaggggagcaaaaccctttatatttgtgaagaaaatatctgtagctgatagaaataattgcttaaattggtttatgaaattaatgagtctgaaaaggttaaaagcacttataaaaagaaccaagtcctacatttccagaactttctggcaaaaatttgcactcatattatttatcctatgaacattcccattgtttttttttgctatttatatacagattatcataagaaagctctcagtttgaggacccaaaataaaaccaaagtcatgccatgacccatactcatttacaaaaacaagaacactttcctctatccctaaaattatgctttagtacttgaggcctttaaaagttagtgcttttgattgtgaagacattcagcaacttactttgtcatacatgcagttgcaccttaccacttctaatagtgtcatatttcatattcaggggacttagataatttgcctgtggatggttcttttgcaggaaaaaaaatctacattttgaccatactaccctttcatgtccttattataagcttttagaaaatgatttcattcagtcatgtccagttatataaaacgttactttctcatttttgagaagttcaacaaaacatactactaagaccaatcatcaaacccactattataaatgttaattttggctgggtaaggtggcttgcgcctataatcccagcactttgggaggctgaggagggaagattgcttgagcccaggagtttgagaccagcctgggcaacatagcaagatcctgtctctactaaaaa

SEQ ID NO: 28594 - DNA, 3430 bp, Homo sapiens
  source 1..3430: mol_type = unassigned DNA
gcggccgcctgcgcgctggccgcctgcgcgctgccagcccgcccgcccgccaggggctccgccgccctcgcctcggcctcgttagcccgccaggagccccgcagctcctccgggagcccgctggtaactcgcgtccctcgcgcttctccggcgcctgaggggcccgcctcgggccatggtgctctcccaggaggagccggactccgcgcggggcacgagcgaggcgcagccgctcggccccgcgcccacgggggccgctccgccgcccggcccgggaccctcggacagccccgaggcggctgtcgagaaggtggaggtggagctggcggggccggcgaccgcggagccccatgagccccccgaaccccccgagggcggctggggctggctggtgatgctggcggccatgtggtgcaacgggtcggtgttcggcatccagaacgcttgcggggtgctcttcgtgtccatgctggaaaccttcggctccaaagacgatgacaagatggtctttaagacagcatgggtaggttctctctccatggggatgattttcttttgctgcccaatagtcagcgtcttcacagacctatttggttgtcggaaaacagctgtcgtgggtgctgctgttggatttgttgggctcatgtccagttcttttgtaagttccatcgagcctctgtaccttacctatggaatcatatttgcctgcggctgctcctttgcataccagccttcattggtcattttgggacactatttcaagaagcgccttggactggtgaatggcattgtcactgctggcagcagtgtcttcacaatcctgctgcctttgctcttaagggttctgattgacagcgtgggcctcttttacacattgagggtgctctgcatcttcatgtttgttctctttctggctggctttacttaccgacctcttgctaccagtaccaaagataaagagagtggaggtagcggatcctccctcttttccaggaaaaagttcagtcctccaaaaaaaattttcaattttgccatcttcaaggtgacagcttatgcagtgtgggcagttggaataccacttgcactttttggatactttgtgccttatgttcacttgatgaaacatgtaaatgaaagatttcaagatgaaaaaaataaagaggttgttctcatgtgcattggcgtcacttcaggagttggacgactgctctttggccggattgcagattatgtgcctggtgtgaagaaggtttatctacaggtactctcctttttcttcattggtctgatgtccatgatgattcctctgtgtagcatctttggggccctcattgctgtgtgcctcatcatgggtctcttcgatggatgcttcatttccattatggctcccatagcctttgagttagttggtgcccaggatgtctcccaagcaattggatttctgctcggattcatgtctatacccatgactgttggcccacccattgcagggttacttcgtgacaaactgggctcctatgatgtggcattctacctcgctggagtccctccccttattggaggtgctgtgctttgttttatcccgtggatccatagtaagaagcaaagagagatcagtaaaaccactggaaaagaaaagatggagaaaatgttggaaaaccagaactctctgctgtcaagttcatctggaatgttcaagaaagaatctgactctattatttaatatcttacatacctccaccagactggacttgctttttgaattttaagcaagtttcctttccttttatacaaattgcaaatttcatatttttttaatcacatcctaggaatagcacaataattgggaaatagaacccttatcactagaagaaccattttctgccactaaatatctctgatgtttccatgagtctgagggcagagactctggtatatgaaaacgtctgaaagtcacatattgtgaaaatttgaagctatctcagtaaaaagcagctttggaaactgtgaatgatctttagcttgtacaaatgtttaaaaatacctcaggctatactgaaagggttgcagtttggttaggagtggaaatattttgtttgttaatgatgtcttcagttctggtacctctgttttactttcttatgctctttggaaactttttgcaaaatttaagcctgggttctagataataccagatctacctaaacctcaagtctatgttaaagttgctttcctgctgttaaataagctatgatattaagatattctgacttgctccagtgtcaagggaccttctgggagcaggtgctaacatagtgttcagaatcaatatgtgagatgaaaaggatcccctccaggaggatcctgagctgttcagaaatcatttaagtttacagcgttgttccctttgcgtttgcagtgcgttttactcaagtagccagaaacaccccacgtttctgaatttgtttaaactgtaacaataaagtaaaatagaatgcatgaaagatattctggcgattgtaacttagaatttttctgacttctggatttgttggcactagaacctgatatttaaagtcttactgagcagctatcaagtggcagttacaggcacaaattggtggaggctggaggatggggaggggagcaaaaccctttatatttgtgaagaaaatatctgtagctgatagaaataattgcttaaattggtttatgaaattaatgagtctgaaaaggttaaaagcacttataaaaagaaccaagtcctacatttccagaactttctggcaaaaatttgcactcatattatttatcctatgaacattcccattgtttttttttgctatttatatacagattatcataagaaagctctcagtttgaggacccaaaataaaaccaaagtcatgccatgacccatactcatttacaaaaacaagaacactttcctctatccctaaaattatgctttagtacttgaggcctttaaaagttagtgcttttgattgtgaagacattcagcaacttactttgtcatacatgcagttgcaccttaccacttctaatagtgtcatatttcatattcaggggacttagataatttgcctgtggatggttcttttgcaggaaaaaaaatctacattttgaccatactaccctttcatgtccttattataagcttttagaaaatgatttcattcagtcatgtccagttatataaaacgttactttctcatttttgagaagttcaacaaaacatactactaagaccaatcatcaaacccactattataaatgttaattttggctgggtaaggtggcttgcgcctataatcccagcactttgggaggctgaggagggaagattgcttgagcccaggagtttgagaccagcctgggcaacatagcaagatcctgtctctactaaaaa

SEQ ID NO: 28595 - DNA, 1153 bp, Homo sapiens
  source 1..1153: mol_type = unassigned DNA
gcggccgcctgcgcgctggccgcctgcgcgctgccagcccgcccgcccgccaggggctccgccgccctcgcctcggcctcgttagcccgccaggagccccgcagctcctccgggagcccgctggtaactcgcgtccctcgcgcttctccggcgcctgaggggcccgcctcgggccatggtgctctcccaggaggagccggactccgcgcggggcacgagcgaggcgcagccgctcggccccgcgcccacgggggccgctccgccgcccggcccgggaccctcggacagccccgaggcggctgtcgagaaggtggaggtggagctggcggggccggcgaccgcggagccccatgagccccccgaaccccccgagggcggctggggctggctggtgatgctggcggccatgtggtgcaacgggtcggtgttcggcatccagaacgcttgcggggtgctcttcgtgtccatgctggaaaccttcggctccaaagacgatgacaagatggtctttaagacagcatgggtaggttctctctccatggggatgattttcttttgctgcccaatagtcagcgtcttcacagacctatttggttgtcggaaaacagctgtcgtgggtgctgctgttggatttgttgggctcatgtccagttcttttgtaagttccatcgagcctctgtaccttacctatggaatcatatttgcctgcggctgctcctttgcataccagccttcattggtcattttgggacactatttcaagaagcgccttggactggtgaatggcattgtcactgctggcagcagtgtcttcacaatcctgctgcctttgctcttaagggttctgattgacagcgtgggcctcttttacacattgagggtgctctgcatcttcatgtttgttctctttctggctggctttacttaccgacctcttgctaccagtaccaaagataaagagagtggaggtagcggatcctccctcttttccaggaaaaagttcagtcctccaaaaaaaattttcaattttgccatcttcaaggtgacagcttatgcagtgtgggcagttggaataccacttgcactttttggatactttgtgccttatgttcacttggcaaaattcagctttgttatactgaaatacgaataa

SEQ ID NO: 28596 - DNA, 909 bp, Homo sapiens
  source 1..909: mol_type = unassigned DNA
catgggtaggttctctctccatggggatgattttcttttgctgcccaatagtcagcgtcttcacagacctatttggttgtcggaaaacagctgtcgtgggtgctgctgttggatttgttgggctcatgtccagttcttttgtaagttccatcgagcctctgtaccttacctatggaatcatatttgcctgcggctgctcctttgcataccagccttcattggtcattttgggacactatttcaagaagcgccttggactggtgaatggcattgtcactgctggcagcagtgtcttcacaatcctgctgcctttgctcttaagggttctgattgacagcgtgggcctcttttacacattgagggtgctctgcatcttcatgtttgttctctttctggctggctttacttaccgacctcttgctaccagtaccaaagataaagagagtggaggtagcggatcctccctcttttccaggaaaaagttcagtcctccaaaaaaaattttcaattttgccatcttcaaggtgacagcttatgcagtgtgggcagttggaataccacttgcactttttggatactttgtgccttatgttcacttggcaaaattcagctttgttatactgaaatacgaataattaatgtctagactggggttggtgcctcacgcctgtaatcccaccactttggggggctgatgcaggagttcaagaccagcgtgggcaacataaggagacttcatccctacctggggaaggaaaaaaaaaaaagaaggaagaagcagtgtctaaagtatctgcccctggcaacgtttgttcaaaagtgttcattatgtttcttccttttttcttttgtggctgaaaatgtatttacaattcaccgtaaatgataaaaatggcattggcacacata

SEQ ID NO: 28597 - DNA, 646 bp, Homo sapiens
  source 1..646: mol_type = unassigned DNA
catgggtaggttctctctccatggggatgattttcttttgctgcccaatagtcagcgtcttcacagacctatttggttgtcggaaaacagctgtcgtgggtgctgctgttggatttgttgggctcatgtccagttcttttgtaagttccatcgagcctctgtaccttacctatggaatcatatttgcctgcggctgctcctttgcataccagccttcattggtcattttgggacactatttcaagaagcgccttggactggtgaatggcattgtcactgctggcagcagtgtcttcacaatcctgctgcctttgctcttaagggttctgattgacagcgtgggcctcttttacacattgagggtgctctgcatcttcatgtttgttctctttctggctggctttacttaccgacctcttgctaccagtaccaaagataaagagagtggaggtagcggatcctccctcttttccaggaaaaagttcagtcctccaaaaaaaattttcaattttgccatcttcaaggtgacagcttatgcagtgtgggcagttggaataccacttgcactttttggatactttgtgccttatgttcacttggtgagtatgctccttcactgatcatgaatattactatttaataaaga

SEQ ID NO: 28598 - DNA, 1231 bp, Homo sapiens
  source 1..1231: mol_type = unassigned DNA
agtcgggggtgcggggctgtgacctagaggcttcagtgtcgatccccgaggtgttcgcgcgcgccagctgtcctcgcggccgcctgcgcgctggccgcctgcgcgctgccagcccgcccgcccgccaggggctccgccgccctcgcctcggcctcgttagcccgccaggagccccgcagctcctccgggagcccgctggtaactcgcgtccctcgcgcttctccggcgcctgaggggcccgcctcgggccatggtgctctcccaggaggagccggactccgcgcggggcacgagcgaggcgcagccgctcggccccgcgcccacgggggccgctccgccgcccggcccgggaccctcggacagccccgaggcggctgtcgagaaggtggaggtggagctggcggggccggcgaccgcggagccccatgagccccccgaaccccccgagggcggctggggctggctggtgatgctggcggccatgtggtgcaacgggtcggtgttcggcatccagaacgcttgcggggtgctcttcgtgtccatgctggaaaccttcggctccaaagacgatgacaagatggtctttaagacagcatgggtaggttctctctccatggggatgattttcttttgctgcccaatagtcagcgtcttcacagacctatttggttgtcggaaaacagctgtcgtgggtgctgctgttggatttgttgggctcatgtccagttcttttgtaagttccatcgagcctctgtaccttacctatggaatcatatttgcctgcggctgctcctttgcataccagccttcattggtcattttgggacactatttcaagaagcgccttggactggtgaatggcattgtcactgctggcagcagtgtcttcacaatcctgctgcctttgctcttaagggttctgattgacagcgtgggcctcttttacacattgagggtgctctgcatcttcatgtttgttctctttctggctggctttacttaccgacctcttgctaccagtaccaaagataaagagagtggaggtagcggatcctccctcttttccaggaaaaagttcagtcctccaaaaaattttcaattttgccatcttcaaggtgacagcttatgcagtgtgggcagttggaataccacttgcactttttggatactttgtgccttatgttcacttggtgagtatgctccttcactgatcatgaatattactatttaa

SEQ ID NO: 28599 - DNA, 4622 bp, Homo sapiens
  source 1..4622: mol_type = unassigned DNA
tcagtctcgccggcggcccccgctcccggatccccagcgccctggccaagaagcttcctcggctccccctcttccctctccctgacacggttgtgcagagggcgcggtggctcagatacaggatttcgacatattggccggtttgctctcgagctcctgggctcaagcgatctgcccgctttagcctcccaaagtgatgggattacaggcgtgagccaccgtgcctggccataatttttaaaaatgtctagtcagatggcgagtaacccatgggccaggtagcgttctatgccaaccttgaatgccatcaggaagtcactggacagcaaactcttccaagatcataacttggctgttggagcaacctggaaaagaagaaaaaagaaaaaccatggcaaaagtaaatagagctcggtctacctcccctccagatggaggctggggctggatgattgtggctggctgtttccttgttaccatctgcacacgggcagtcacaagatgtatctcaattttttttgtggagttccagacatacttcactcaggattacgcacaaacggcatggatccattccattgtagattgtgtgaccatgctctgtgctccacttgggagtgttgtcagtaaccatttatcctgtcaagtgggaatcatgctgggtggcttgcttgcatctactggactcatcctgagctcatttgccacgagtctgaagcatctctacctcactctgggagttcttacaggtcttggatttgcactttgttactctccagctattgccatggttggcaagtacttcagcagacggaaagcccttgcttatggtatcgccatgtcaggaagtggcattggcaccttcatcctggctcctgtggttcagctccttattgaacagttttcctggcggggagccttactcattcttgggggctttgtcttgaatctctgtgtatgtggtgccttgatgaggccaattactcttaaagaggaccacacaactccagagcagaaccatgtgtgtagaactcagaaagaagacattaagcgggtgtctccctattcatctttgaccaaagaatgggcacagacttgcctctgttgctgtttgcagcaagagtacagttttttactcatgtcagactttgttgtgttagccgtctccgttctgtttatggcttatggctgcagccctctctttgtgtacttggtgccttatgctttgagtgttggagtgagtcatcagcaagctgcttttcttatgtccatacttggagtgattgacattattggcaatatcacatttggatggctgaccgacagaaggtgtctgaagaattaccagtatgtttgctacctctttgccgtgggaatggatgggctctgctatctctgcctcccaatgcttcaaagtctccctctgctcgtgcctttctcttgtacctttggctactttgatggtgcctatgtgactttgatcccagtagtgaccacagagatagtggggaccacctctttgtcatcagcgcttggtgtggtatacttccttcacgcagtgccatacttggtgagcccacccatcgcaggacggctggtagataccaccggcagctacactgcagcattcctcctctgtggattttcaatgatatttagttctgtgttgcttggctttgctagacttataaagagaatgagaaaaacccagttgcagttcattgccaaagaatctgatcctaagctgcagctatggaccaatggatcagtggcttattctgtggcaagagaattagatcagaaacatggggagcctgtggctacagcagtgcctggctacagcctcacatgaccaaaggccttgagccccagaatcttcaggtttgagagaggtggggccaccagattcttcatgtttctgaaactttttattttggcagaaggattgccttccaaggaaattattattattgttttgttaacatattaatatttataagggaaaacagcacataataaggaaagctggactagcccagagccttctcatttgggatttgtgctcataactgaactcgtatcttttggtcaatgggcatagctctgtaagaaatgtaaggacacagctgatataattagctgtaattagggataatttcaaagcataaccaaagcagatgacactgggcagcagctttgttccagtctcaggcccttcatgttccctcctcagaaagaaaatggaaacattaacgtgtagctttgcttaccttgttctggttagagaagggaggtcagcttgggtgtggtggtgaagagtgaagatgccatactttttcatggtggagtttctcattagggttttacttgggattgttaaagaatacttgagattcttcaaaaagtggtgattaatatagaaagaaactcttattttttttttctcttagtcttccagccagcccttgcctctgcccaagggtagacaccactatgagaatccaaataatcatggaatgccatggttggaatagatcttaaagggcatctggtaagatccatttgaaattgtccactggaaaccgaaagctcttttcctaagactgggttccaggctctcacatttgttaccatcacatataatacttactctaaatttagcagaacacacttagtcacaaggacaacctctcaatcttacctgaaatgtcaacaacaccaaaacttcccgtcttttaccttcagagaagaagctcttacttagactgcagacgcattcctgttaggttggaaaaatgttggcagtattccaattgggcaggaactgaattcttgaatcagcaggtctctggtgagagttttctttgcagatcagacatttagttttatcattacccaaaagaggattggagggagtcagttgtctgaaaaatattatcctagagatattctaaaggtgagattcctttctccctgtgttaattcttgttccactatccactgctcttcatctctttatagataataattagaaatctactcattggattataagtttattcattctcaaatactccacttttctatggtttgggataatttctgagtcttcagattgaagagggaaggcatggagggaagaaaaagtccagatcccccagcttgtttccaaccattttaagtccaaagaattataatcctgaatctcacagtgtgtcacacctgtaataggagtaaattatgcaatcaattttaattaccaggagtttaaaatccaaatgtcaaggaactgttttgaccctgaaggctatttaatccactgtcccctacaaggcctcacaagtgctgggggaaaaaaaacagcaatgaggatgatcctgagttaatgtgtatgctccgcaagagagcttgcctataccttgattatttcataaaatcacatgttaatacattgctttcagaatgaaatactgacttgatctgataggagaaaatggtaatatttcatagttgttttccaaagacaaatttaaatgttgtctgttatctccttacttagtttaagaatttagttttgaaccccattgactttgtcatttgcaattttaaaaatatttgggactgggcatggtcgctcacgcctgtaatcccagcactttgggaggctgaggcgggtggatcatgaggtcaggagatcaagaccatcctggctaacatcgtgaaactccgtctctactaaaaatgcaaaaaattagccaggcgtggtggcgggcgcctgtagtcccagctactcatgaggctgaggccggacaatcgcttgaacccaggaggtggaggttgcagtgagccaaaatcatgccactgcactccaccctgggcgacagagcaagactccatctcaaaaaaaaaaaattggaaggtatctgtaaaatgtcaaagttaagatgaagttatatctgtttggaatagcactttgccctaaatatcatttcttgaattttcaagcctaaagatgtttaaaaatatgaatagttacaaatattcttatacatattttttatcatgatcacaacaaaattttgtttatgtggttctgcaatataatttctgtgaagtattacaagtatttatgaaaaataagcatagtgatcagaaattttaaagattttgtataaaaacatttgggagatttgactttatacatgcatagatttgcattttactttcccttttgaggcagcatttttagaaaatcagtaagaaaaatgtacatcttaaggtctactattttacatttctacacagaattttagtgttaatgttccatgtgtctatactgtttatttcaaaactgagaaattcatgggaatgatgtattttgtggaatcaagaacaaaattatagtgggataattttacatcttaaatatttctttctactactgtaagctctactttggaattatctgagtagaaaatcagaagacattatctaactttgtagatacactgtatgattgggctttttgttcagattgtaatttcattaatagatgaaatatttatgctaatattttcttatttcaaaagcaaaataaaatgaatttattgtcctgtgtttgg

SEQ ID NO: 28600 - DNA, 4617 bp, Homo sapiens
  source 1..4617: mol_type = unassigned DNA
tcagtctcgccggcggcccccgctcccggatccccagcgccctggccaagaagcttcctcggctccccctcttccctctccctgacacggttgtgcagagggcgcggtggctcagatacaggatttcgacatattggccggtttgctctcgagctcctgggctcaagcgatctgcccgctttagcctcccaaagtgatgggattacaggcgtgagccaccgtgcctggccataatttttaaaaatgtctagtcagatggcgagtaacccatgggccaggtagcgttctatgccaaccttgaatgccatcaggaagtcactggacagcaaactcttccaagatcataacttggctgttggagcaacctggaaaagaagaaaaaagaaaaaccatggcaaaagtaaatagagctcggtctacctcccctccagatggaggctggggctggatgattgtggctggctgtttccttgttaccatctgcacacgggcagtcacaagatgtatctcaattttttttgtggagttccagacatacttcactcaggattacgcacaaacggcatggatccattccattgtagattgtgtgaccatgctctgtgctccacttgggagtgttgtcagtaaccatttatcctgtcaagtgggaatcatgctgggtggcttgcttgcatctactggactcatcctgagctcatttgccacgagtctgaagcatctctacctcactctgggagttcttacaggtcttggatttgcactttgttactctccagctattgccatggttggcaagtacttcagcagacggaaagcccttgcttatggtatcgccatgtcaggaagtggcattggcaccttcatcctggctcctgtggttcagctccttattgaacagttttcctggcggggagccttactcattcttgggggctttgtcttgaatctctgtgtatgtggtgccttgatgaggccaattactcttaaagaggaccacacaactccagagcagaaccatgtgtgtagaactcagaaagaagacattaagcgggtgtctccctattcatctttgaccaaagaatgggcacagacttgcctctgttgctgtttgcagcaagagtacagttttttactcatgtcagactttgttgtgttagccgtctccgttctgtttatggcttatggctgcagccctctctttgtgtacttggtgccttatgctttgagtgttggagtgagtcatcagcaagctgcttttcttatgtccatacttggagtgattgacattattggcaatatcacatttggatggctgaccgacagaaggtgtctgaagaattaccagtatgtttgctacctctttgccgtgggaatggatgggctctgctatctctgcctcccaatgcttcaaagtctccctctgctcgtgcctttctcttgtacctttggctactttgatggtgcctatgtgactttgatcccagtagtgaccacagagatagtggggaccacctctttgtcatcagcgcttggtgtggtatacttccttcacgcagtgccatacttggtgagcccacccatcgcaggacggctggtagataccaccggcagctacactgcagcattcctcctctgtggattttcaatgatatttagttctgtgttgcttggctttgctagacttataaagagaatgagaaaaacccagttgcagttcattgccaaagaatctgatcctaagctgcagctatggaccaatggatcagtggcttattctgtggcaagagaattagatcagaaacatggggagcctgtggctacagcagtgcctggctacagcctcacatgaccaaaggccttgagccccagaatcttcaggtttgagagaggtggggccaccagattcttcatgtttctgaaactttttattttggcagaaggattgccttccaaggaaattattattattgttttgttaacatattaatatttataagggaaaacagcacataataaggaaagctggactagcccagagccttctcatttgggatttgtgctcataactgaactcgtatcttttggtcaatgggcatagctctgtaagaaatgtaaggacacagctgatataattagctgtaattagggataatttcaaagcataaccaaagcagatgacactgggcagcagctttgttccagtctcaggcccttcatgttccctcctcagaaagaaaatggaaacattaacgtgtagctttgcttaccttgttctggttagagaagggaggtcagcttgggtgtggtggtgaagagtgaagatgccatactttttcatggtggagtttctcattagggttttacttgggattgttaaagaatacttgagattcttcaaaaagtggtgattaatatagaaagaaactcttattttttttttctcttagtcttccagccagcccttgcctctgcccaagggtagacaccactatgagaatccaaataatcatggaatgccatggttggaatagatcttaaagggcatctggtaagatccatttgaaattgtccactggaaaccgaaagctcttttcctaagactgggttccaggctctcacatttgttaccatcacatataatacttactctaaatttagcagaacacacttagtcacaaggacaacctctcaatcttacctgaaatgtcaacaacaccaaaacttcccgtcttttaccttcagagaagaagctcttacttagactgcagacgcattcctgttaggttggaaaaatgttggcagtattccaattgggcaggaactgaattcttgaatcagcaggtctctggtgagagttttctttgcagatcagacatttagttttatcattacccaaaagaggattggagggagtcagttgtctgaaaaatattatcctagagatattctaaaggtgagattcctttctccctgtgttaattcttgttccactatccactgctcttcatctctttatagataataattagaaatctactcattggattataagtttattcattctcaaatactccacttttctatggtttgggataatttctgagtcttcagattgaagagggaaggcatggagggaagaaaaagtccagatcccccagcttgtttccaaccattttaagtccaaagaattataatcctgaatctcacagtgtgtcacacctgtaataggagtaaattatgcaatcaattttaattaccaggagtttaaaatccaaatgtcaaggaactgttttgaccctgaaggctatttaatccactgtcccctacaaggcctcacaagtgctgggggaaaaaaaacagcaatgaggatgatcctgagttaatgtgtatgctccgcaagagagcttgcctataccttgattatttcataaaatcacatgttaatacattgctttcagaatgaaatactgacttgatctgataggagaaaatggtaatatttcatagttgttttccaaagacaaatttaaatgttgtctgttatctccttacttagtttaagaatttagttttgaaccccattgactttgtcatttgcaattttaaaaatatttgggactgggcatggtcgctcacgcctgtaatcccagcactttgggaggctgaggcgggtggatcatgaggtcaggagatcaagaccatcctggctaacatcgtgaaactccgtctctactaaaaatgcaaaaaattagccaggcgtggtggcgggcgcctgtagtcccagctactcatgaggctgaggccggacaatcgcttgaacccaggaggtggaggttgcagtgagccaaaatcatgccactgcactccaccctgggcgacagagcaagactccatctcaaaaaaaaaaaattggaaggtatctgtaaaatgtcaaagttaagatgaagttatatctgtttggaatagcactttgccctaaatatcatttcttgaattttcaagcctaaagatgtttaaaaatatgaatagttacaaatattcttatacatattttttatcatgatcacaacaaaattttgtttatgtggttctgcaatataatttctgtgaagtattacaagtatttatgaaaaataagcatagtgatcagaaattttaaagattttgtataaaaacatttgggagatttgactttatacatgcatagatttgcattttactttcccttttgaggcagcatttttagaaaatcagtaagaaaaatgtacatcttaaggtctactattttacatttctacacagaattttagtgttaatgttccatgtgtctatactgtttatttcaaaactgagaaattcatgggaatgatgtattttgtggaatcaagaacaaaattatagtgggataattttacatcttaaatatttctttctactactgtaagctctactttggaattatctgagtagaaaatcagaagacattatctaactttgtagatacactgtatgattgggctttttgttcagattgtaatttcattaatagatgaaatatttatgctaatattttcttatttcaaaagcaaaataaaatgaatttattgtcctgtg

SEQ ID NO: 28601 - DNA, 340 bp, Homo sapiens
  source 1..340: mol_type = unassigned DNA
gaaatggaggtgttctgacctatgatcagacaaggtaggtcagaaaccagctccagaaaccaggaaaaagttcctgccttggggagagaaagaaataggtgaaaggagggcagaaaaggagccctgcctgttttgctcgttgttgcctcactagcccataccagagtgcagggtgcgctgtaagccgtgaccgcatcacagatcatcagcatgcagagatggcgagtaacccatgggccaggtagcgttctatgccaaccttgaatgccatcaggaagtcactggacagcaaactcttccaagatcataacttggctgttggagcaacctggaaaagaag

SEQ ID NO: 28602 - DNA, 1423 bp, Homo sapiens
  source 1..1423: mol_type = unassigned DNA
tcagtctcgccggcggcccccgctcccggatccccagcgccctggccaagaagcttcctcggctccccctcttccctctccctgacacggttgtgcagagggcgcggtggctcagatacaggatttcgacatattggccggtttgctctcgagctcctgggctcaagcgatctgcccgctttagcctcccaaagtgatgggattacaggcgtgagccaccgtgcctggccataatttttaaaaatgtctagtcagatggcgagtaacccatgggccaggtagcgttctatgccaaccttgaatgccatcaggaagtcactggacagcaaactcttccaagatcataacttggctgttggagcaacctggaaaagaagaaaaaagaaaaaccatggcaaaagtaaatagagctcggtctacctcccctccagatggaggctggggctggatgattgtggctggctgtttccttgttaccatctgcacacgggcagtcacaagatgtatctcaattttttttgtggagttccagacatacttcactcaggattacgcacaaacggcatggatccattccattgtagattgtgtgaccatgctctgtgctccacttgggagtgttgtcagtaaccatttatcctgtcaagtgggaatcatgctgggtggcttgcttgcatctactggactcatcctgagctcatttgccacgagtctgaagcatctctacctcactctgggagttcttacaggtcttggatttgcactttgttactctccagctattgccatggttggcaagtacttcagcagacggaaagcccttgcttatggtatcgccatgtcaggaagtggcattggcaccttcatcctggctcctgtggttcagctccttattgaacagttttcctggcggggagccttactcattcttgggggctttgtcttgaatctctgtgtatgtggtgccttgatgaggccaattactcttaaagaggaccacacaactccagagcagaaccatgtgtgtagaactcagaaagaagacattaagcgggtgtctccctattcatctttgaccaaagaatgggcacagacttgcctctgttgctgtttgcagcaagagtacagttttttactcatgtcagactttgttgtgttagccgtctccgttctgtttatggcttatggctgcagccctctctttgtgtacttggtgccttatgctttgagtgttggagtgagtcatcagcaagctgcttttcttatgtccatacttggagtgattgacattattggcaatatcacatttggatggctgaccgacagaagattttgtataaaaacatttggcatttttagaaaatcagtaagaaaaatgtacatcttaaggtctactattttacatttctacacagaattttag

SEQ ID NO: 28603 - DNA, 4819 bp, Homo sapiens
  source 1..4819: mol_type = unassigned DNA
gctgcatggccgcctcctcccctcccaggccgccagggatttgccgggaagagcgggggcagggggagactcccgggggtgcgcaggaccgcggggggccgagtcctcgggctcgagaagattgtgtccacccgctgtccgaggcccaggctgtcccctcaggtcgtcctcctcaagtccaaggagggacatgggagctcctgagggcagggtggggttcctcgcgggccagctgtcgtcctagggtccccggtgccacctcagttgcgggctgcttgtgaggaaggagggtatgggagcaaaaaataggaggggtcttcccgaggctcggggttgatcagtgtcggttctagagcctgcggggaaaagagggcaggagaacaggatagtttgtgcttccttttttccattttaacttttcctctaacgggcatccgggcaagaacagggttcagtagtttgggaagggagctgggggaggcagtggcggctggagtaggtaggcgagtaaaaggaggaggaagggctggggagaagagcgaggctgtagcggctgcctgttgagggaggaagaggtggggggtgtggaggagggggaggagagagagatgacatggggagaggaggaggggggttggacgtgggaggaggaggagagggctcgagggaccgtctgtcgcgggacgggctggccagctggggcgcggagcctggaggaggaggcagcggcagcggcagcagcagccctccgagcagcagcagctgcagcagcagaaacaagtaccagccacaaagcggctcctctggcccaagcagccacagtccccccgccgcgatggcgctgcaaagccaggcgagcgaggaagcaaaggggccctggcaggaggcagaccaggaacagcaggagccggtgggtagcccagagccggagtctgagccggagcctgagcccgagcccgagcccgtgccagtgcccccgcccgagccccagccggagccccagcccctaccggaccccgcacccctgccggagctggagttcgagtccgagcgggtgcacgaacccgagcccacgcctacggtagagacccgcggcaccgcgcgcggcttccagcctcccgaaggtggcttcggctgggtggtggtgttcgctgccacctggtgcaacggctccatcttcggcatccataactctgtcgggatcctctactccatgctgctagaggaggaaaaggaaaaaaatcgccaagtggagttccaagcagcatgggtcggagccctcgcgatgggtatgatcttcttctgttctcccattgtgagtatattcactgaccgtttgggctgccgaatcacagcaaccgcgggggctgccgttgctttcattggcctccataccagctccttcaccagctccctaagcctgcgctacttcacctacgggattctctttggttgtggctgttccttcgcctttcagccatccctcgtcatcctgggccactactttcaacgccgcctgggtctggccaatggtgtggtgtctgctgggagtagcattttctccatgtccttccccttcctcatcagaatgctgggggataagatcaagctggcccaaaccttccaggtgctgagtaccttcatgtttgttcttatgctgctttcactcacctaccggcccctcctgcccagctcccaggacaccccaagcaagagaggtgtccgcaccctgcaccagcgctttctggctcagctcaggaagtacttcaacatgcgagtgttccgccaacgcacttaccgcatctgggccttcggaattgctgctgctgcccttggctactttgttccctatgtacacctgatgaagtatgtggaggaggagttctcagaaatcaaggagacctgggtgctcttggtgtgtattggggctacctcaggccttgggcgtcttgtgtcaggccacatcagtgactccatccctggacttaagaagatctacttgcaggtcctttccttcctgctcctgggcctgatgtccatgatgattcccctgtgccgggacttcgggggccttatcgtcgtctgtcttttcctgggcctttgcgatggcttcttcatcaccatcatggcccccattgcatttgagctggtgggcccaatgcaggcctcacaggccattggctacctcctgggcatgatggccctgccaatgattgctgggccccccattgcaggcctactccgcaactgttttggggactaccatgtggccttctactttgccggtgtgccccccatcatcggggctgtaatcctcttcttcgtccctctgatgcatcaaaggatgttcaagaaagagcagagagattccagcaaggataagatgttggcccctgacccagaccccaatggggagctactgccgggctcccccaaccctgaggaaccaatctaatgcctttcttgccattgtgtgccctttcccagctcttccccttcatcccaccctgctcagcatttacatttttgccaccagcacacttgttcccagacctgcgcacacagcatttcagccacctgacaatctccttggagtcaaagctccaggtgttccaaactcattaactaaattctccccagaatgcttttaaattttccagggcctttctcctcccaggatctgggaaagcttgggaaccacccctggcctttggaacctctccatatactttctaagctctgggggaggaggaggatgggacctcctggacccagcttgttagtcacccactataatcaactgccaaaggtgctactgtgtccccaggagcctaatagggtaggcccaaatctctgtttgctgaggaggtcattgccatccatatttgggagccactgggtggaggggcagggaggcaaaatgagacaagtagccttggttagtcttagagttgctgatgactgtggcttcccaagaactgggtacaagcagtgcccttattgtatggttggttaacagtctgctcccctcttcccttccttctttttttcctctactgacttctctccatactctttcccctctatttctttgtatgactgtcatagacacatgggtgcttgaagaaaggagggacccggaacttgggccaatcagcctcaccttgtcccagtccactcctaacactagcatcagtcccactcatctcaggctgagccacatctcactttttcgctcaagctatataatcctagactggaagagtagaatatcatatagggaagaaaccttaaacaccacagtgttccatgttccagtcactgatttttacaaatcttacagtccaaggcattaacctcaaggccctcccagcaccccattcttgtatacacatggcaaaatgtgaagaaactcctttcatctcagcaggtagaggaggactgatgacacgagctgccatggcgggaggaggggcagtagttattgatatggtgagccccatctctcagttttcatgacaggtctatatttctacctgggccaggccaggaaagagactatttaagaaaaaaaaaatcaattcctagcctggatcccaaaaaggtacaggcagcagttgcacatagggttggaaaatttcttttgggaaggggaagccatcccagcctttaccacccaatgtgtctcccatgctgggcatcctaggccactttgcttagagggcattaaaggtgccatgaaaggtagactctgaaccactttgatccctctgaagtaggtgactgatgcctccttatgcccaggctctggcaacagtcttactgaagaacattcccagtgcccctggctaggggcagagggcactgccaggctgtgttcagttagcacagctcacctcattaggagctcagcctctctcctcactctgcctctttgtgtctctttttctcctctctgagcctttgtctattgtgttcctgtcacccaccctttcatcatctttttgccaggcattcctggctgtcacttggagccaacagtaacttgccaccttaaggcagggtcatccccgggccaggaggatgaggttgtcctgaggggctccaaagaagacaatagttcccactcatgattttccgttacaaacaggcagctggggcatggttggcctccaatgatttcattcaaggccaaagtcctgagccccctccgctggtcccagtccagctcttatcaactccccaaaggaaaacccactggttcttagctctgtgggtaggaaggggccctagaaagggcctagttactatcctgtcagttctaacagtagtggaacaggagaatctgggccctaggagccctgtaactcccaggagagaccactgaaaatactggagcaacaatgcccctgcttccatttctccccacctcactctcaccaagtcaccagagggtggttctgtaggacctcttttgttgcttaagatgcagatggctcttaagaatcaggcagtcgcccacttctctccagatgaagggaagacattcataggtcccaaatctgcccattcagatgtcacataatatggtgggatatcaatttacttcttccacacatgtggttgtgcacatgtgagcttgtgtgcttttggagagaatgttgattggcaaaagcagcacagtattaatatttagagtaggatgcagcctcttatgcaccacagttaaatctagaacgaacaaaatttcagagctcaagacatgggacatttaaatcctcaaggagtttggaacaaaataaacagatctaaaaatttg

SEQ ID NO: 28604 - DNA, 4536 bp, Homo sapiens
  source 1..4536: mol_type = unassigned DNA
gtatgttcaggattctaaaaagagcaatggttcacaaggaaacttctgcctcaggtggggagaggagtccatagatcagggaaacttatgtcttggtgaaatggaagaccatgtttctaaacacctgtcgccaggttacttgaatttccactagaggagcagaaatgccaccaatgccaagtgccccacctgtgcatccacctccagatggaggatggggttggattgtggttggagcagcttttatctccattggattttcctatgcattccccaaagctgtcaccgtattcttcaaagaaattcagcaaatattccacactacctacagtgaaatagcatggatttcatccattatgctggctgttatgtacgcaggaggtcctgtaagtagtgttttggtgaataaatacggcagccggccggtggtgatagcaggaggcttattatgctgtcttggaatggtgttggcctcctttagtagcagcgtggtacagctgtacctcactatgggattcattacaggtttaggtttagccttcaacctgcaacccgccttaaccataattggcaaatacttctataggaagcgacccatggcaaatggattggccatggcaggaagtcctgttttcttaagttcattggctcctttcaatcagtacctttttaatacttttggctggaaaggaagcttcctgattttgggaagtctacttttgaatgcctgtgtggctggttccctcatgagaccccttggacccaatcaaaccacttctaagtctaaaaataagactggcaaaacagaagatgattcaagcccaaagaaaatcaaaacgaagaaatcaacttgggaaaaagttaataagtatttagatttctccctttttaagcatagaggatttctgatatatctgtctggaaatgtcattatgttcctaggtttttttgcccccattatattcttggctccatatgctaaagaccaaggaattgatgagtactcggcagcttttctgctatctgttatggctttcgttgatatgtttgctaggccttctgtaggattaattgcaaactccaaatatattcgacctcgaattcagtacttcttcagttttgcaatcatgttcaatggagtgtgtcacctcttgtgcccactggcacaggactacacaagcctggtattatatgctgtattttttggccttggatttgggagtgttagcagtgttctctttgaaactctcatggacctcgtgggtgcaccaagattttccagtgccgtcggacttgtcacaattgtggagtgtggcccagttcttcttggccctcctcttgcaggtaaattggtggatttaactggagaatataaatacatgtacatgtcctgtggggctattgtggtagcagcaagcgtgtggctgctcattggcaatgctatcaactatagattgcttgcaaaggaaaggaaggaggaaaatgcaaggcagaagaccagagaatctgaacccttgagcaaatctaaacattcggaagatgttaacgtcaaagtttcaaatgcacagagtgtaacctcagaaagagaaactaacatttaacaagaatcacatctctgatttcagtgtttatgactttatctaggagtttgtttttcattttgtttttttaaagtattagaaaaggttttagctgaaatgaggagtcacaattaaggatggaggtgatattttcctcaatggcaaattttaaattagtttttaaaaacttacttatttgggtagttaaattttgagattatgcatagaaagaatccatgctataggtttatttccatacctgactctgggtgtggtggttaaaatactaattttaaagtcttccagtgactttcggtcttggttatatggagaattctgaatcccaaacccctggtttaagtaggtagaaggaggatgcctaatcctacaaagtgaccctttatacatttcattttttatttgatattaaagtatgagatagagttgagagacaattaattatcccctcttacacacaaacacacatactcccacatacttacccacatgtacacagagtatctggagaataaaacccaaattcaaaaaaaaaaatgataatttatttttaaggtaaaaataatccatgaagataaaagaaacatatgtctgcgtgctactttacaatgttggttttaaagataagcacatgggtaaaaatgagggtgatccttattcaaaaataacatctgactactataaaaatatttgcatatataagtttgacaaagaaaagaaaatcaatgttaaaccattaaatctgagcactgttagacttgattaatccatgcacatgattttttttgagtagggagcattagtacctggtgctagagaatagaaccctcaaataatttttagaattcttacctaatatgtaaaagtctgcatgactcttaacaatgagtcacatccattgattttacagggattttagttcgtaatccagaaagtaataatcagggattttattttaatcaggcatcaatccagattcactgttatactgaaatatcaaagtaaaatcctagttggcaggattgtaagtagaccgaattctaatttttcccaacacatagtggtaattggaggttactgttatgaatactccatctgactacgactaagagagtgaggggtggttttaatgaaccctctaagctctctcagttccttcccttccacaaaatgcaagagcaaaagcaaactacaaacaggccttgtgctcaaccactggaaatgcctcctgggataagaatggcagcacttgaaaattctgccctctactgatgagacttcctgctgcctttggacataactaagccaggaaactttaaaagccttctagaaatagaggcactgtatgacttgcaatcgtaggtatagtttataacctgatagcaaaaaacttgaaatattgcagcccagtttaattcagcactttcccattttcataactatgtgaaaacatctgggaatttgaatcactcctgaatacagaggcatattctttttaaactataaataccattttgagtgagaaagtacttttaaacaagaaagaaattgtacattatgactaaagttataaatacaatatttatatctataaatctgaagtttaacatgattaatttaaaaagtatttagtgcttgacaaagtagtgtcactcttaagatgtcaaagggaattagccattttttttattgtaataaaggcaggtgctatttttttctggtgagattgcacctggataccaggcttttgtaatagttaacattaaacatttgattcataaagttaattcactgcttaagcatgtggctcatatttaggaagctatataaaattcagtttttcatttaacatttgctcttttgcatatgaagagatatttgtatttttcaaatgttaagtaaaacaagatgtgccaatatcataggtaaataaattagggaaaatgtgggactttatggctgtttttaatttagtttcacccgatcttgattcttgaattagctatgtttatatttttagttcttttttattcaactcagatttgtcaagaaatgtaacctctaaattgtgtagtacctctccaatcataaattttcaaaaaaaaattctactttccaaaaagtgtcttgaattctctgaaaaggcacattaaactaatatgaacatcagataccagggggaaataaatggcaaagtaataatcatgaggttttaggtcaaagactacattatatatattttttattaccttctagtagagacatcctcctgggtgcatttcagtggccttctccagggaggaggtttatttacttactgatgagtttctcgtcacgtcaaaaccagttcacatttgtctggctgctctttggttgtcttcattcgttatttatttctaacactgtattaaattgttagaaaagaaagtaaaacttgcacattcaaagcacatgatttgtacagtcacacctggcagtagcactgcacagttacaaatatgcacacacgttaactgctatgcataaatattgacagttaaaccagaacacaattgaaacagtgacataaatacctacaggattcagaattgttccagggtaatataaattattctacttgttcactctccccaccctcttgaacttgttagaagatttgctgctttagcagaatctttccaagattgagaaaagtgtatcaacctaggattttcattactatatagtcacataaatggaggaggagatatatttggcttctgcctctgcaacaattagtatgaacatatttctttctctagggaataataggttttaaacatttgagatatcatgaagcaaagtcagggtataccactacaatccccactaatctctattcccacattatgaaattgtacagaagaaagggtgtcattaaatcaaggtatccagataa

SEQ ID NO: 28605 - DNA, 1878 bp, Homo sapiens
  source 1..1878: mol_type = unassigned DNA
aaaaagagcaatggttcacaaggaaacttctgcctcaggtggggagaggagtccatagatcagggaaacttatgtcttggtgaaatggaagaccatgtttctaaacacctgtcgccaggttacttgaatttccactagaggagcagaaatgccaccaatgccaagtgccccacctgtgcatccacctccagatggaggatggggttggattgtggttggagcagcttttatctccattggattttcctatgcattccccaaagctgtcaccgtattcttcaaagaaattcagcaaatattccacactacctacagtgaaatagcatggatttcatccattatgctggctgttatgtacgcaggaggtagaatatttgaaagctttttgatcttcacatccttgaggattcagtgcagctttactcaatcaggatcatgcctagctgccgtacataatgactcctctgatgaatctgggaaaaggagatggaaaatcttctggaaaggatttgctattctagataacatcacgatcattcactgttatgggaggaggtcaaaataccaacattaacagaagtttggaagaagtttatttcaatcctcatgggtgactttaagaggctcaggacttcagtgaagtcctgtaagtagtgttttggtgaataaatacggcagccggccggtggtgatagcaggaggcttattatgctgtcttggaatggtgttggcctcctttagtagcagcgtggtacagctgtacctcactatgggattcattacaggtttaggtttagccttcaacctgcaacccgccttaaccataattggcaaatacttctataggaagcgacccatggcaaatggattggccatggcaggaagtcctgttttcttaagttcattggctcctttcaatcagtacctttttaatacttttggctggaaaggaagcttcctgattttgggaagtctacttttgaatgcctgtgtggctggttccctcatgagaccccttggacccaatcaaaccacttctaagtctaaaaataagactggcaaaacagaagatgattcaagcccaaagaaaatcaaaacgaagaaatcaacttgggaaaaagttaataagtatttagatttctccctttttaagcatagaggatttctgatatatctgtctggaaatgtcattatgttcctaggtttttttgcccccattatattcttggctccatatgctaaagaccaaggaattgatgagtactcggcagcttttctgctatctgttatggctttcgttgatatgtttgctaggccttctgtaggattaattgcaaactccaaatatattcgacctcgaattcagtacttcttcagttttgcaatcatgttcaatggagtgtgtcacctcttgtgcccactggcacaggactacacaagcctggtattatatgctgtattttttggccttggatttgggagtgttagcagtgttctctttgaaactctcatggacctcgtgggtgcaccaagattttccagtgccgtcggacttgtcacaattgtggagtgtggcccagttcttcttggccctcctcttgcaggtaaattggtggatttaactggagaatataaatacatgtacatgtcctgtggggctattgtggtagcagcaagcgtgtggctgctcattggcaatgctatcaactatagattgcttgcaaaggaaaggaaggaggaaaatgcaaggcagaagaccagagaatctgaacccttgagcaaatctaaacattcggaagatgttaacgtcaaagtttcaaatgcacagagtgtaacctcagaaagagaaactaacatttaacaagaatcacatctctg

SEQ ID NO: 28606 - DNA, 1969 bp, Homo sapiens
  source 1..1969: mol_type = unassigned DNA
attccattcacccgttgacagcgaggcgaatcggctgcggtttgctgggaacggagggctgcagcgcccaccctgcgccagagaccagataaagagtcaatcttaagatgtgatactttcctgtgaaacctgaaacaaggtgatctggggaaccaaagactctgggactcttggtgccaacagagttactctgttacttgaatttccactagaggagcagaaatgccaccaatgccaagtgccccacctgtgcatccacctccagatggaggatggggttggattgtggttggagcagcttttatctccattggattttcctatgcattccccaaagctgtcaccgtattcttcaaagaaattcagcaaatattccacactacctacagtgaaatagcatggatttcatccattatgctggctgttatgtacgcaggaggtcctgtaagtagtgttttggtgaataaatacggcagccggccggtggtgatagcaggaggcttattatgctgtcttggaatggtgttggcctcctttagtagcagcgtggtacagctgtacctcactatgggattcattacaggtttaggtttagccttcaacctgcaacccgccttaaccataattggcaaatacttctataggaagcgacccatggcaaatggattggccatggcaggaagtcctgttttcttaagttcattggctcctttcaatcagtacctttttaatacttttggctggaaaggaagcttcctgattttgggaagtctacttttgaatgcctgtgtggctggttccctcatgagaccccttggacccaatcaaaccacttctaagtctaaaaataagactggcaaaacagaagatgattcaagcccaaagaaaatcaaaacgaagaaatcaacttgggaaaaagttaataagtatttagatttctccctttttaagcatagaggatttctgatatatctgtctggaaatgtcattatgttcctaggtttttttgcccccattatattcttggctccatatgctaaagaccaaggaattgatgagtactcggcagcttttctgctatctgttatggctttcgttgatatgtttgctaggccttctgtaggattaattgcaaactccaaatatattcgacctcgaattcagtacttcttcagttttgcaatcatgttcaatggagtgtgtcacctcttgtgcccactggcacaggactacacaagcctggtattatatgctgtattttttggccttggatttgggagtgttagcagtgttctctttgaaactctcatggacctcgtgggtgcaccaagattttccagtgccgtcggacttgtcacaattgtggagtgtggcccagttcttcttggccctcctcttgcaggtaaattggtggatttaactggagaatataaatacatgtacatgtcctgtggggctattgtggtagcagcaagcgtgtggctgctcattggcaatgctatcaactatagattgcttgcaaaggaaaggaaggaggaaaatgcaaggcagaagaccagagaatctgaacccttgagcaaatctaaacattcggaagatgttaacgtcaaagtttcaaatgcacagagtgtaacctcagaaagagaaactaacatttaacaagaatcacatctctgatttcagtgtttatgactttatctaggagtttgtttttcattttgtttttttaaagtattagaaaaggttttagctgaaatgaggagtcacaattaaggatggaggtgatattttcctcaatggcaaattttaaattagtttttaaaaacttacttatttgggtagttaaattttgagattatgcatagaaagaatccatgctataggtttatttccatacctgactctgggtgtggtggttaaaatactaattttaaagtcttccagtgactttcggtcttggttatatgga

SEQ ID NO: 28607 - DNA, 1815 bp, Homo sapiens
  source 1..1815: mol_type = unassigned DNA
agcggatgctgcatcgcggcgcccttctccacccccttttctcctctacttccgcgaaaaggattgcagactgccttggaaagggcggtcgtgcccagtgccactttcccggagtcaatcttaagatgtgatactttcctgtgaaacctgaaacaaggtgatctggggaaccaaagactctgggactcttggtgccaacagagttactctataatccaaaatctactctacatcttttcctttgtattgccttcaaatatcactcttcaaagtttagtgactaggcttaaagattccacatataatccaaagaaatctgttcaagtggacatctatcaacacgttacttgaatttccactagaggagcagaaatgccaccaatgccaagtgccccacctgtgcatccacctccagatggaggatggggttggattgtggttggagcagcttttatctccattggattttcctatgcattccccaaagctgtcaccgtattcttcaaagaaattcagcaaatattccacactacctacagtgaaatagcatggatttcatccattatgctggctgttatgtacgcaggaggtcctgtaagtagtgttttggtgaataaatacggcagccggccggtggtgatagcaggaggcttattatgctgtcttggaatggtgttggcctcctttagtagcagcgtggtacagctgtacctcactatgggattcattacaggtttaggtttagccttcaacctgcaacccgccttaaccataattggcaaatacttctataggaagcgacccatggcaaatggattggccatggcaggaagtcctgttttcttaagttcattggctcctttcaatcagtacctttttaatacttttggctggaaaggaagcttcctgattttgggaagtctacttttgaatgcctgtgtggctggttccctcatgagaccccttggacccaatcaaaccacttctaagtctaaaaataagactggcaaaacagaagatgattcaagcccaaagaaaatcaaaacgaagaaatcaacttgggaaaaagttaataagtatttagatttctccctttttaagcatagaggatttctgatatatctgtctggaaatgtcattatgttcctaggtttttttgcccccattatattcttggctccatatgctaaagaccaaggaattgatgagtactcggcagcttttctgctatctgttatggctttcgttgatatgtttgctaggccttctgtaggattaattgcaaactccaaatatattcgacctcgaattcagtacttcttcagttttgcaatcatgttcaatggagtgtgtcacctcttgtgcccactggcacaggactacacaagcctggtattatatgctgtattttttggccttggatttgggagtgttagcagtgttctctttgaaactctcatggacctcgtgggtgcaccaagattttccagtgccgtcggacttgtcacaattgtggagtgtggcccagttcttcttggccctcctcttgcaggtaaattggtggatttaactggagaatataaatacatgtacatgtcctgtggggctattgtggtagcagcaagcgtgtggctgctcattggcaatgctatcaactatagattgcttgcaaaggaaaggaaggaggaaaatgcaaggcagaagaccagagaatctgaacccttgagcaaatctaaacattcggaagatgttaacgtcaaagtttcaaatgcacagagtgtaacctcagaaagagaaactaacatttaacaagaa

SEQ ID NO: 28608 - DNA, 2250 bp, Homo sapiens
  source 1..2250: mol_type = unassigned DNA
tccccttcccgccaccgcctccttctccgctggctgtggcgggcgaggacacgtcaggggccataaataaataaataattccattcacccgttgacagcgaggcgaatcggctgcggtttgctgggaacggagggctgcagcgcccaccctgcgccagagaccagataaagagtcaatcttaagatgtgatactttcctgtgaaacctgaaacaaggtgatctggggaaccaaagactctgggactcttggtgccaacagagttactctaggagcagaaatgccaccaatgccaagtgccccacctgtgcatccacctccagatggaggatggggttggattgtggttggagcagcttttatctccattggattttcctatgcattccccaaagctgtcaccgtattcttcaaagaaattcagcaaatattccacactacctacagtgaaatagcatggatttcatccattatgctggctgttatgtacgcaggaggtcctgtaagtagtgttttggtgaataaatacggcagccggccggtggtgatagcaggaggcttattatgctgtcttggaatggtgttggcctcctttagtagcagcgtggtacagctgtacctcactatgggattcattacaggtttaggtttagccttcaacctgcaacccgccttaaccataattggcaaatacttctataggaagcgacccatggcaaatggattggccatggcaggaagtcctgttttcttaagttcattggctcctttcaatcagtacctttttaatacttttggctggaaaggaagcttcctgattttgggaagtctacttttgaatgcctgtgtggctggttccctcatgagaccccttggacccaatcaaaccacttctaagtctaaaaataagactggcaaaacagaagatgattcaagcccaaagaaaatcaaaacgaagaaatcaacttgggaaaaagttaataagtatttagatttctccctttttaagcatagaggatttctgatatatctgtctggaaatgtcattatgttcctaggtttttttgcccccattatattcttggctccatatgctaaagaccaaggaattgatgagtactcggcagcttttctgctatctgttatggctttcgttgatatgtttgctaggccttctgtaggattaattgcaaactccaaatatattcgacctcgaattcagtacttcttcagttttgcaatcatgttcaatggagtgtgtcacctcttgtgcccactggcacaggactacacaagcctggtattatatgctgtattttttggccttggatttgggagtgttagcagtgttctctttgaaactctcatggacctcgtgggtgcaccaagattttccagtgccgtcggacttgtcacaattgtggagtgtggcccagttcttcttggccctcctcttgcaggtaaattggtggatttaactggagaatataaatacatgtacatgtcctgtggggctattgtggtagcagcaagcgtgtggctgctcattggcaatgctatcaactatagattgcttgcaaaggaaaggaaggaggaaaatgcaaggcagaagaccagagaatctgaacccttgagcaaatctaaacattcggaagatgttaacgtcaaagtttcaaatgcacagagtgtaacctcagaaagagaaactaacatttaacaagaatcacatctctgatttcagtgtttatgactttatctaggagtttgtttttcattttgtttttttaaagtattagaaaaggttttagctgaaatgaggagtcacaattaaggatggaggtgatattttcctcaatggcaaattttaaattagtttttaaaaacttacttatttgggtagttaaattttgagattatgcatagaaagaatccatgctataggtttatttccatacctgactctgggtgtggtggttaaaatactaattttaaagtcttccagtgactttcggtcttggttatatggagaattctgaatcccaaacccctggtttaagtaggtagaaggaggatgcctaatcctacaaagtgaccctttatacatttcattttttatttgatattaaagtatgagatagagttgagagacaattaattatcccctcttacacacaaacacacatactcccacatacttacccacatgtacacagagtatctggagaataaaacccaaattcaaaaaaaaaaa

SEQ ID NO: 28609 - DNA, 3646 bp, Homo sapiens
  source 1..3646: mol_type = unassigned DNA
agtttgaggccaacactaggaagtgtctggaaccggatccggaggcttcacaatctatatgttgcctccaaaggacctgcagagaaacgcctcctgattttgtcttacaatggaacttaaaaagtcgcctgacggtggatggggctgggtgattgtgtttgtctccttccttactcagtttttgtgttacggatccccactagctgttggagtcctgtacatagaatggctggatgcctttggtgaaggaaaaggaaaaacagcctgggttggatccctggcaagtggagttggcttgcttgcaagtcctgtctgcagtctctgtgtctcatcttttggagcaagacctgtcacaatcttcagtggcttcatggtggctggaggcctgatgttgagcagttttgctcccaatatctactttctgtttttttcctatggcattgttgtaggtcttggatgtggtttattatacactgcaacagtgaccattacgtgccagtattttgacgatcgccgaggcctagcgcttggcctgatttcaacaggttcaagcgttggccttttcatatatgctgctctgcagaggatgctggttgagttctatggactggatggatgcttgctgattgtgggtgctttagctttaaatatattagcctgtggcagtctgatgagacccctccaatcttctgattgtcctttgcctaaaaaaatagctccagaagatctaccagataaatactccatttacaatgaaaaaggaaagaatctggaagaaaacataaacattcttgacaagagctacagtagtgaggaaaaatgcaggatcacgttagccaatggtgactggaaacaagacagcctacttcataaaaaccccacagtgacacacacaaaagagcctgaaacgtacaaaaagaaagttgcagaacagacatatttttgcaaacagcttgccaagaggaagtggcagttatataaaaactactgtggtgaaactgtggctctttttaaaaacaaagtattttcagcccttttcattgctatcttactctttgacatcggagggtttccaccttcattacttatggaagatgtagcaagaagttcaaacgtgaaagaagaagagtttattatgccacttatttccattataggcattatgacagcagttggtaaactgcttttagggatactggctgacttcaagtggattaataccttgtatctttatgttgctaccttaatcatcatgggcctagccttgtgtgcaattccatttgccaaaagctatgtcacattggcgttgctttctgggatcctagggtttcttactggtaattggtccatctttccatatgtgaccacgaagactgtgggaattgaaaaattagcccatgcctatgggatattaatgttctttgctggacttggaaatagcctaggaccacccatcgttggttggttttatgactggacccagacctatgatattgcattttattttagtggcttctgcgtcctgctgggaggttttattctgctgctggcagccttgccctcttgggatacatgcaacaagcaactccccaagccagctccaacaactttcttgtacaaagttgcctctaatgtttagaagaatattggaagacactatttttgctattttataccatatagcaacgatattttaacagattctcaagcaaattttctagagtcaagactattttctcatagcaaaatttcacaatgactgactctgaatgaattatttttttttatatatcctattttttatgtagtgtatgcgtagcctctatctcgtatttttttctatttctcctccccacaccatcaatgggactattctgttttgctgttattcactagttcttaacattgtaaaaagtttgaccagcctcagaaggctttctctgtgtaaagaagtataatttctctgccgactccatttaatccactgcaaggcacctagagagactgctcctattttaaaagtgatgcaagcatcatgataagatatgtgtgaagcccactaggaaataaatcattctcttctctatgtttgacttgctagtaaacagaagacttcaagccagccaggaaattaaagtggcgactaaaacagccttaagaattgcagtggagcaaattggtcattttttaaaaaaatatattttaacctacagtcaccagttttcattattctatttacctcactgaagtactcgcatgttgtttggtacccactgagcaactgtttcagttcctaaggtatttgctgagatgtgggtgaactccaaatggagaagtagtcactgtagactttcttcatggttgaccactccaaccttgctcacttttgcttcttggccatccactcagctgatgtttcctgggaagtgctaattttacctgtttccaaattggaaacacatttctcaatcattccgttctggcaaatgggaaacatccatttgctttgggcacagtggggatgggctgcaagttcttgcatatcctcccagtgaagcatttatttgctactatcagattttaccactatcaaatataattcaagggcagaattaaacgtgagtgtgtgtgtgtgtgtgtgtgtgtgctatgcatgctctaagtctgcatgggatatgggaatggaaaagggcaataagaaattaatacccttatgcagttgcatttaaccttaagaaaaatgtccttgggataaactccaatgtttaatacattgattttttttctaaagaaatgggttttaaactttggtatgcatcagaattccctatagatctttttgaaaatataggtacctgggtatcacacatagaacttttaattctgctggtgtaggctgttgcccaaacatctataattttactgagctcttcaagtgattctgataacacagcctggattgagaatttttataagattggcaatggaaaaacatttattcttttaaataataatttttttaaaacccaagaggtcaggggattttataaaccaatagccaagtgttctttaaataggaggcacccttcccattgtgccaaaatcatcttttcatttattttgaaatttgtatgattattttatacttgtatgttgcctttcttcgaaggcgcctgaagcactttataaacacaaatcctcacaatacctctgtgaggtaggtaaatagtacttttctatgtagtaaacctggaatatggagaatttcataacagttcattctacttaataatgcaataatggagctccaagttgtcttggacttctacaccacactcagacttctggaaagttttctgtacctcattctttagtccctgtcaaggttagtaaataaaataagtgacataaaaaaaaaaaaaactaaactacttgttgtgttgaaagttcctttttgccagttatgttcaggaaacccaataacctgaaaaagtttgactttgatgtgacatcttcatattcatcaatgctgataattgtccaaaggcatcttcactatgtctgctaaataacatccaatgtgggcgttatctgttgtctaggggatgaattttaagttacaataaaatatttttctttgttttgc

SEQ ID NO: 28610 - DNA, 4174 bp, Homo sapiens
  source 1..4174: mol_type = unassigned DNA
gtgcgcaccgagagggcgcctggccgacggcgcccacctctctcgtggctttggtggctccaggcctggtagggccggggccgcggctcgggcagtgccctccctactcctggccgggccgggagcagcgggagcaggcgcagcgcccctaccgcccgcttttccgcctccatctcctccgcctcctcctcctccttcccccaaccacccgcgcagtcacaaccggttcagactggccggggtgccccgcaaagagagacaagggagaaaaagacagcagggaaaaccccggggaggagaaggcgaaagagaaggtggagctcagagaagggggccggctccccagctccatgtggccgccgccgctgcgggtctgtgggggcagagggcggcggctcccggggcagcgcgtagcgggaccgattgcctaatactccggcaggggccggggccgcagctggctcggataaatagccgcccggctggcccggagctgcaggggagagcggcggccgcgatccccaccacaccaccagcccggccgcacggggcactgagccgggtgctgagcaccggaggccccgccgaggccgggactcaggacctgcagagaaacgcctcctgattttgtcttacaatggaacttaaaaagtcgcctgacggtggatggggctgggtgattgtgtttgtctccttccttactcagtttttgtgttacggatccccactagctgttggagtcctgtacatagaatggctggatgcctttggtgaaggaaaaggaaaaacagcctgggttggatccctggcaagtggagttggcttgcttgcaagtcctgtctgcagtctctgtgtctcatcttttggagcaagacctgtcacaatcttcagtggcttcatggtggctggaggcctgatgttgagcagttttgctcccaatatctactttctgtttttttcctatggcattgttgtaggtcttggatgtggtttattatacactgcaacagtgaccattacgtgccagtattttgacgatcgccgaggcctagcgcttggcctgatttcaacaggttcaagcgttggccttttcatatatgctgctctgcagaggatgctggttgagttctatggactggatggatgcttgctgattgtgggtgctttagctttaaatatattagcctgtggcagtctgatgagacccctccaatcttctgattgtcctttgcctaaaaaaatagctccagaagatctaccagataaatactccatttacaatgaaaaaggaaagaatctggaagaaaacataaacattcttgacaagagctacagtagtgaggaaaaatgcaggatcacgttagccaatggtgactggaaacaagacagcctacttcataaaaaccccacagtgacacacacaaaagagcctgaaacgtacaaaaagaaagttgcagaacagacatatttttgcaaacagcttgccaagaggaagtggcagttatataaaaactactgtggtgaaactgtggctctttttaaaaacaaagtattttcagcccttttcattgctatcttactctttgacatcggagggtttccaccttcattacttatggaagatgtagcaagaagttcaaacgtgaaagaagaagagtttattatgccacttatttccattataggcattatgacagcagttggtaaactgcttttagggatactggctgacttcaagtggattaataccttgtatctttatgttgctaccttaatcatcatgggcctagccttgtgtgcaattccatttgccaaaagctatgtcacattggcgttgctttctgggatcctagggtttcttactggtaattggtccatctttccatatgtgaccacgaagactgtgggaattgaaaaattagcccatgcctatgggatattaatgttctttgctggacttggaaatagcctaggaccacccatcgttggttggttttatgactggacccagacctatgatattgcattttattttagtggcttctgcgtcctgctgggaggttttattctgctgctggcagccttgccctcttgggatacatgcaacaagcaactccccaagccagctccaacaactttcttgtacaaagttgcctctaatgtttagaagaatattggaagacactatttttgctattttataccatatagcaacgatattttaacagattctcaagcaaattttctagagtcaagactattttctcatagcaaaatttcacaatgactgactctgaatgaattatttttttttatatatcctattttttatgtagtgtatgcgtagcctctatctcgtatttttttctatttctcctccccacaccatcaatgggactattctgttttgctgttattcactagttcttaacattgtaaaaagtttgaccagcctcagaaggctttctctgtgtaaagaagtataatttctctgccgactccatttaatccactgcaaggcacctagagagactgctcctattttaaaagtgatgcaagcatcatgataagatatgtgtgaagcccactaggaaataaatcattctcttctctatgtttgacttgctagtaaacagaagacttcaagccagccaggaaattaaagtggcgactaaaacagccttaagaattgcagtggagcaaattggtcattttttaaaaaaatatattttaacctacagtcaccagttttcattattctatttacctcactgaagtactcgcatgttgtttggtacccactgagcaactgtttcagttcctaaggtatttgctgagatgtgggtgaactccaaatggagaagtagtcactgtagactttcttcatggttgaccactccaaccttgctcacttttgcttcttggccatccactcagctgatgtttcctgggaagtgctaattttacctgtttccaaattggaaacacatttctcaatcattccgttctggcaaatgggaaacatccatttgctttgggcacagtggggatgggctgcaagttcttgcatatcctcccagtgaagcatttatttgctactatcagattttaccactatcaaatataattcaagggcagaattaaacgtgagtgtgtgtgtgtgtgtgtgtgtgtgctatgcatgctctaagtctgcatgggatatgggaatggaaaagggcaataagaaattaatacccttatgcagttgcatttaaccttaagaaaaatgtccttgggataaactccaatgtttaatacattgattttttttctaaagaaatgggttttaaactttggtatgcatcagaattccctatagatctttttgaaaatataggtacctgggtatcacacatagaacttttaattctgctggtgtaggctgttgcccaaacatctataattttactgagctcttcaagtgattctgataacacagcctggattgagaatttttataagattggcaatggaaaaacatttattcttttaaataataatttttttaaaacccaagaggtcaggggattttataaaccaatagccaagtgttctttaaataggaggcacccttcccattgtgccaaaatcatcttttcatttattttgaaatttgtatgattattttatacttgtatgttgcctttcttcgaaggcgcctgaagcactttataaacacaaatcctcacaatacctctgtgaggtaggtaaatagtacttttctatgtagtaaacctggaatatggagaatttcataacagttcattctacttaataatgcaataatggagctccaagttgtcttggacttctacaccacactcagacttctggaaagttttctgtacctcattctttagtccctgtcaaggttagtaaataaaataagtgacataaaaaaaaaaaaaactaaactacttgttgtgttgaaagttcctttttgccagttatgttcaggaaacccaataacctgaaaaagtttgactttgatgtgacatcttcatattcatcaatgctgataattgtccaaaggcatcttcactatgtctgctaaataacatccaatgtgggcgttatctgttgtctaggggatgaattttaagttacaataaaatatttttctttgttttgc

SEQ ID NO: 28611 - DNA, 452 bp, Homo sapiens
  source 1..452: mol_type = unassigned DNA
gccgggtgctgagcaccggaggccccgccgaggccgggactcaggtaacctgctctggcttcagcagcgcccagaggctttccagagagctgataaccacgaacaaacttggctgtcaaaagcaaatcaatgctttaccttgttttctgggtgcctagtctatccaacacaaactatccccgaagtttagtcaggatttacgctaaatatattacttatatagacctgcagagaaacgcctcctgattttgtcttacaatggaacttaaaaagtcgcctgacggtggatggggctgggtgattgtgtttgtctccttccttactcagtttttgtgttacggatccccactagctgttggagtcctgtacatagaatggctggatgcctttggtgaaggaaaaggaaaaacagcctgggttggatccctggcaagtggagttggcttgcttgc

SEQ ID NO: 28612 - DNA, 3455 bp, Homo sapiens
  source 1..3455: mol_type = unassigned DNA
ggctcactttgcgccaatcctacgagaactcccagaactccgcttccctagtccaacccaagccagagttgcccacacctaagatggcggcgggggcggagtcggcgcggccgcctctgggcgggaccgcggggactagacgtggccgcggggcggtgtcatcgcccccgccccgcccggtccagccagctcggcccgggggcttcgggctgtcgggccggcgctcccttctctgccaggtggcgagtacacctgctcacgtaggcgtcatgaggtctccggttcgagacctggcccggaacgatggcgaggagagcacggaccgcacgcctcttctaccgggcgccccacgggccgaagccgctccagtgtgctgctctgctcgttacaacttagcaattttggccttttttggtttcttcattgtgtatgcattacgtgtgaatctgagtgttgcgttagtggatatggtagattcaaatacaactttagaagataatagaacttccaaggcgtgtccagagcattctgctcccataaaagttcatcataatcaaacgggtaagaagtaccaatgggatgcagaaactcaaggatggattctcggttcctttttttatggctacatcatcacacagattcctggaggatatgttgccagcaaaataggggggaaaatgctgctaggatttgggatccttggcactgctgtcctcaccctgttcactcccattgctgcagatttaggagttggaccactcattgtactcagagcactagaaggactaggagagggtgttacatttccagccatgcatgccatgtggtcttcttgggctccccctcttgaaagaagcaaacttcttagcatttcatatgcaggagcacagcttgggacagtaatttctcttcctctttctggaataatttgctactatatgaattggacttatgtcttctacttttttggtactattggaatattttggtttcttttgtggatctggttagttagtgacacaccacaaaaacacaagagaatttcccattatgaaaaggaatacattctttcatcattaagaaatcagctttcttcacagaagtcagtgccgtgggtacccattttaaaatccctgccactttgggctatcgtagttgcacacttttcttacaactggactttttatactttattgacattattgcctacttatatgaaggagatcctaaggttcaatgttcaagagaatgggtttttatcttcattgccttatttaggctcttggttatgtatgatcctgtctggtcaagctgctgacaatttaagggcaaaatggaatttttcaactttatgtgttcgcagaatttttagccttataggaatgattggacctgcagtattcctggtagctgctggcttcattggctgtgattattctttggccgttgctttcctaactatatcaacaacactgggaggcttttgctcttctggatttagcatcaaccatctggatattgctccttcgtatgctggtatcctcctgggcatcacaaatacatttgccactattccaggaatggttgggcccgtcattgctaaaagtctgacccctgataacactgttggagaatggcaaaccgtgttctatattgctgctgctattaatgtttttggtgccattttctttacactattcgccaaaggtgaagtacaaaactgggctctcaatgatcaccatggacacagacactgaaggaaccaataaataatcctgcctctattaatgtatttttatttatcatgtaacctcaaagtgccttctgtattgtgtaagcattctatgtctttttttaattgtacttgtattagatttttaaggcctataatcatgaaatatcactagttgccagaataataaaatgaactgtgtttaattatgaataatatgtaagctaggacttctactttaggttcacatacctgcctgctagtcgggcaacatgaagtaggacagttctgttgattttttagggccatactaaagggaatgagctgaaacagacctcctgatacctttgcttaattaaactagatgataattctcaggtactgataaacacctgttgttgttcactttcctcataaaaattgtcagctctctctgacacttagacctcaaactttagcatctctgtggagctgccatccactgtataatttcgcctggcaactggactgaggggagtgtgcccaggcagctgccaagcactccctccctggcttcagggtcagagtgcccagcgtttatcagaggcagcatccaagcccagagccagtgtcgactcttcggctggtgcctttcctctgaggggctatcaatgtgtagataaagccctgagtaggcaagagcagtgagatccactgctatggtcttgatacatcctcaaactttcccttcccagcacagaggaatattggctggcatgcaacctgcaaaagaaaaatgcgaagcggccgggcacggtggctcatgcctgtaatcccagcactttggggggctgaggtgggcgaatcatgagatcaggagttcgagaccagcctggccagcatggtgaaaccccatctctactaaaaatacaaaaaattagctgggcgtggtgacgggcgcctgtaatcccagatactcaggaggctgaggtaggagaatcacttgaacctgggaggtggaagttgcagtgaaccaagatcacgccactgcactccagcctgggcgatggagcgagactccaactcaaaaaaaaaaaaagaataaagaaagaaaagtgcgatgcccagtcaatcacaaataagatcatcctggtttaaatctactctcacatggatcacagtataaatttctatgtgctgtgttttgttcgtttgtattttgtagagatggggtctcgttttgtcgcccaggctggttttgaactcctggcttcaagcgatcctcctgtctcggcctcacaaagtgttgagactacaggcatgagccactgtgcccagcctgttctatgtttttaagctacacgagaattttttttttaattaattctcactgtttgttcagtctgtcttcatctaagtttgtgttgcagtttaaagttaaagtgacttttaaaggccacatcacctgagactagggtaatcatctttacttctggttcctgaaatcatatttttccagtggaccatcctccagtggctgtggttgttgagcatgctttcagaacacctatgtggcttaaaacttagtttatgttttgtgttcaacactacgtgtaatattttaaaactgtttaatgtgatgtgaatacatttatgtacatttatttttaaatttgtaaatagctttaaattgctatggcaatgtttcttttataaatcatcaaaataaacctttgtgaattga

SEQ ID NO: 28613 - DNA, 1129 bp, Homo sapiens
  source 1..1129: mol_type = unassigned DNA
cagccagctcggcccgggggcttcgggctgtcgggccggcgctcccttctctgccaggtggcgagtacacctgctcacgtaggcgtcatgaggtctccggttcgagacctggcccggaacgatggcgaggagagcacggaccgcacgcctcttctaccgggcgccccacgggccgaagccgctccagtgtgctgctctgctcgttacaacttagcaattttggccttttttggtttcttcattgtgtatgcattacgtgtgaatctgagtgttgcgttagtggatatggtagattcaaatacaactttagaagataatagaacttccaaggcgtgtccagagcattctgctcccataaaagttcatcataatcaaacgggtaagaagtaccaatgggatgcagaaactcaaggatggattctcggttcctttttttatggctacatcatcacacagattcctggaggatatgttgccagcaaaataggggggaaaatgctgctaggatttgggatccttggcactgctgtcctcaccctgttcactcccattgctgcagatttaggagttggaccactcattgtactcagagcactagaaggactaggagaggagcacagcttgggacagtaatttctcttcctctttctggaataatttgctactatatgaattggacttatgtcttctacttttttggtactattggaatattttggtttcttttgtggatctggttagttagtgacacaccacaaaaacacaagagaatttcccattatgaaaaggaatacattctttcatcattaagaaatcagctttcttcacagaagtcagtgccgtgggtacccattttaaaatccctgccactttgggctatcgtagttgcacacttttcttacaactggactttttatactttattgacattattgcctacttatatgaaggagatcctaaggttcaatgttcaagagaatgggtttttatcttcattgccttatttaggctcttggttatgtatgatcctgtctggtcaagctgctgacaatttaagggcaaaatggaatttttcaactttatgtgttcgcagaatttttagccttataggtatgctggtatcctcctg

SEQ ID NO: 28614 - DNA, 1844 bp, Homo sapiens
  source 1..1844: mol_type = unassigned DNA
attgtgtaaagttgagagaaaagtcttcacagcggaagaagaaatcacttttttgtcccgaatcagtgggtggaggcaaaacccttcagcaagaagagaagcaacttcagccgtgtatgcaaatggataaccggttgcctcccaaaaaagttccaggtttctgttcctttcgctatggattgtctttccttgtgcactgttgtaatgttataataacagcacagcgtgcgtgcctgaacctcacaatggtagtcatggtgaatagcacagatccacatggtttgcccaacacctccacaaagaagctcctggataatataaagaaccctatgtataattggagcccagatatccagggaatcatcttgagttccacctcctatggtgtcatcatcatccaagttcctgttggatacttctctggaatatattctacaaagaaaatgattggctttgcattatgcctcagctctgtgttaagcctgctcatcccaccagcagctggaattggagtagcttgggtcgttgtatgtcgagcagttcagggagcagcccaggggatagttgcaacagcccagtttgaaatatatgtcaaatgggctcctcccctggaacgaggccgacttacttctatgagtacatcagggtttttgctgggaccctttattgtcctacttgtgactggagttatctgtgaatctctgggctggcccatggtcttctatatttttggtgcttgtggctgtgccgtatgtcttctctggttcgttctgttttatgatgaccccaaagaccacccatgtataagcatcagtgaaaaggaatacatcacatcctccctggtccagcaggtcagttcaagtagacaatctctgcctatcaaggctatacttaagtcgcttccagtctgggctatttccactggtagttttacgtttttctggtcacataacatcatgacactatacactccaatgtttatcaactccatgcttcatgttaatataaaagagaatgggttcttgtcttcccttccctatttgtttgcctggatctgtggtaacctagcaggtcagttatcagacttcttcctgaccaggaatattctcagcgtaattgctgtccggaaactcttcacagcagcaggatttctccttcctgcaatctttggtgtctgcctgccttacctgagttccaccttctacagcattgtcattttcctaatacttgctggtgcaacaggcagcttttgcttgggtggagtgtttataaatggcttggatattgctcccagatattttggatttattaaagcatgttcaactttaactggaatgataggaggactaattgcttccactttgactggattgatccttaagcaggatccggaatccgcctggtttaaaaccttcatcctgatggcagccattaatgtgactggcctaattttctaccttatagttgctacagcagaaattcaggactgggctaaagaaaaacaacacacacgtctctgaagtgtgaaacagagcacttgcagagcctgggacaacctccttattgaagggaagagggaccagcacatgaggctgaggctgaggggcagtcaccagcaccaggaagaaggtggtaggaggagtcctaggggccagttttaccctcccacatatcctgtgtgcatcgttttttaacatgtgttgtttgtaacatgtaatatatctgaattttaaatgggggtggtgatttatctcagtcttcctctctgcatcagttgctttataaatgattgtcaaaccaataaatacacacaagataaaattttattctaaggcttcatgaaa

SEQ ID NO: 28615 - DNA, 1433 bp, Homo sapiens
  source 1..1433: mol_type = unassigned DNA
cagtgggtggaggcaaaacccttcagcaagaagagaagcaacttcagccgtgtatgcaaatggataaccggttgcctcccaaaaaagttccaggtttctgttcctttcgctatggattgtctttccttgtgcactgttgtaatgttataataacagcacagcgtgcgtgcctgaacctcacaatggtagtcatggtgaatagcacagatccacatggtttgcccaacacctccacaaagaagctcctggataatataaagaaccctatgtataattggagcccagatatccagggaatcatcttgagttccacctcctatggtgtcatcatcatccaagttcctgttggatacttctctggaatatattctacaaagaaaatgattggctttgcattatgcctcagctctgtgttaagcctgctcatcccaccagcagctggaattggagtagcttgggtcgttgtatgtcgagcagttcagggagcagcccaggggatagttgcaacagcccagtttgaaatatatgtcaaatgggctcctcccctggaacgaggccgacttacttctatgagtacatcagggtttttgctgggaccctttattgtcctacttgtgactggagttatctgtgaatctctgggctggcccatggtcttctatatttttggtcagttcaagtagacaatctctgcctatcaaggctatacttaagtcgcttccagtctgggctatttccactggtagttttacgtttttctggtcacataacatcatgacactatacactccaatgtttatcaactccatgcttcatgttaatataaaagagaatgggttcttgtcttcccttccctatttgtttgcctggatctgtggtaacctagcaggtcagttatcagacttcttcctgaccaggaatattctcagcgtaattgctgtccggaaactcttcacagcagcaggatttctccttcctgcaatctttggtgtctgcctgccttacctgagttccaccttctacagcattgtcattttcctaatacttgctggtgcaacaggcagcttttgcttgggtggagtgtttataaatggcttggatattgctcccagatattttggatttattaaagcatgttcaactttaactggaatgataggaggactaattgcttccactttgactggattgatccttaagcaggatccggaatccgcctggtttaaaaccttcatcctgatggcagccattaatgtgactggcctaattttctaccttatagttgctacagcagaaattcaggactgggctaaagaaaaacaacacacacgtctctgaagtgtgaaacagagcacttgcagagcctgggacaacctccttattgaagggaagagggaccagcacatgaggctgaggctgaggggcagtcacca

SEQ ID NO: 28616 - DNA, 1679 bp, Homo sapiens
  source 1..1679: mol_type = unassigned DNA
attgtgtaaagttgagagaaaagtcttcacagcggaagaagaaatcacttttttgtcccgaatcagtgggtggaggcaaaacccttcagcaagaagagaagcaacttcagccgtgtatgcaaatggataaccggttgcctcccaaaaaagttccaggtttctgttcctttcgctatggattgtctttccttgtgcactgttgtaatgttataataacagcacagcgtgcgtgcctgaacctcacaatggtagtcatggtgaatagcacagatccacatggtttgcccaacacctccacaaagaagctcctggataatataaagaaccctatgtataattggagcccagatatccagggaatcatcttgagttccacctcctatggtgtcatcatcatccaagttcctgttggatacttctctggaatatattctacaaagaaaatgattggctttgcattatgcctcagctctgtgttaagcctgctcatcccaccagcagctggaattggagtagcttgggtcgttgtatgtcgagcagttcagggagcagcccaggggatagttgcaacagcccagtttgaaatatatgtcaaatgggctcctcccctggaacgaggccgacttacttctatgagtacatcagggtttttgctgggaccctttattgtcctacttgtgactggagttatctgtgaatctctgggctggcccatggtcttctatatttttggtgcttgtggctgtgccgtatgtcttctctggttcgttctgttttatgatgaccccaaagaccacccatgtataagcatcagtgaaaaggaatacatcacatcctccctggtccagcagaatgggttcttgtcttcccttccctatttgtttgcctggatctgtggtaacctagcaggtcagttatcagacttcttcctgaccaggaatattctcagcgtaattgctgtccggaaactcttcacagcagcaggatttctccttcctgcaatctttggtgtctgcctgccttacctgagttccaccttctacagcattgtcattttcctaatacttgctggtgcaacaggcagcttttgcttgggtggagtgtttataaatggcttggatattgctcccagatattttggatttattaaagcatgttcaactttaactggaatgataggaggactaattgcttccactttgactggattgatccttaagcaggatccggaatccgcctggtttaaaaccttcatcctgatggcagccattaatgtgactggcctaattttctaccttatagttgctacagcagaaattcaggactgggctaaagaaaaacaacacacacgtctctgaagtgtgaaacagagcacttgcagagcctgggacaacctccttattgaagggaagagggaccagcacatgaggctgaggctgaggggcagtcaccagcaccaggaagaaggtggtaggaggagtcctaggggccagttttaccctcccacatatcctgtgtgcatcgttttttaacatgtgttgtttgtaacatgtaatatatctgaattttaaatgggggtggtgatttatctcagtcttcctctctgcatcagttgctttataaatgattgtcaaaccaataaatacacacaagataaaattttattctaaggcttcatg

SEQ ID NO: 28617 - DNA, 1242 bp, Homo sapiens
  source 1..1242: mol_type = unassigned DNA
atgcaaatggataaccggttgcctcccaaaaaagttccaggtttctgttcctttcgctatggattgtctttccttgtgcactgttgtaatgttataataacagcacagcgtgcgtgcctgaacctcacaatggtagtcatggtgaatagcacagatccacatggtttgcccaacacctccacaaagaagctcctggataatataaagaaccctatgtataattggagcccagatatccagggaatcatcttgagttccacctcctatggtgtcatcatcatccaagttcctgttggatacttctctggaatatattctacaaagaaaatgattggctttgcattatgcctcagctctgtgttaagcctgctcatcccaccagcagctggaattggagtagcttgggtcgttgtatgtcgagcagttcagggagcagcccaggggatagttgcaacagcccagtttgaaatatatgtcaaatgggctcctcccctggaacgaggccgacttacttctatgagtacatcagggtttttgctgggaccctttattgtcctacttgtgactggagttatctgtgaatctctgggctggcccatggtcttctatatttttggtgcttgtggctgtgccgtatgtcttctctggttcgttctgttttatgatgaccccaaagaccacccatgtataagcatcagtgaaaaggaatacatcacatcctccctggtccagcagaatgggttcttgtcttcccttccctatttgtttgcctggatctgtggtaacctagcaggtcagttatcagacttcttcctgaccaggaatattctcagcgtaattgctgtccggaaactcttcacagcagcaggatttctccttcctgcaatctttggtgtctgcctgccttacctgagttccaccttctacagcattgtcattttcctaatacttgctggtgcaacaggcagcttttgcttgggtggagtgtttataaatggcttggatattgctcccagatattttggatttattaaagcatgttcaactttaactggaatgataggaggactaattgcttccactttgactggattgatccttaagcaggatccggaatccgcctggtttaaaaccttcatcctgatggcagccattaatgtgactggcctaattttctaccttatagttgctacagcagaaattcaggactgggctaaagaaaaacaacacacacgtctctga

SEQ ID NO: 28618 - DNA, 1704 bp, Homo sapiens
  source 1..1704: mol_type = unassigned DNA
aaaagtcttcacagcggaagaagaaatcacttttttgtcccgaatcagtgggtggaggcaaaacccttcagcaagaagagaagcaacttcagccgtgtatgcaaatggataaccggttgcctcccaaaaaagttccaggtttctgttcctttcgctatggattgtctttccttgtgcactgttgtaatgttataataacagcacagcgtgcgtgcctgaacctcacaatggtagtcatggtgaatagcacagatccacatggtttgcccaacacctccacaaagaagctcctggataatataaagaaccctatgtataattggagcccagatatccagggaatcatcttgagttccacctcctatggtgtcatcatcatccaagttcctgttggatacttctctggaatatattctacaaagaaaatgattggctttgcattatgcctcagctctgtgttaagcctgctcatcccaccagcagctggaattggagtagcttgggtcgttgtatgtcgagcagttcagggagcagcccaggggatagttgcaacagcccagtttgaaatatatgtcaaatgggctcctcccctggaacgaggccgacttacttctatgagtacatcagggtttttgctgggaccctttattgtcctacttgtgactggagttatctgtgaatctctgggctggcccatggtcttctatatttttggtgcttgtggctgtgccgtatgtcttctctggttcgttctgttttatgatgaccccaaagaccacccatgtataagcatcagtgaaaaggaatacatcacatcctccctggtccagcaggtcagttcaagtagacaatctctgcctatcaaggctatacttaagtcgcttccagtctgggctatttccactggtagttttacgtttttctggtcacataacatcatgacactatacactccaatgtttatcaactccatgcttcatgttaatataaaagagaatgggttcttgtcttcccttccctatttgtttgcctggatctgtggtaacctagcaggtcagttatcagacttcttcctgaccaggaatattctcagcgtaattgctgtccggaaactcttcacagcagcaggatttctccttcctgcaatctttggtgtctgcctgccttacctgagttccaccttctacagcattgtcattttcctaatacttgctggtgcaacaggcagcttttgcttgggtggagtgtttataaatggcttggatattgctcccagatattttggatttattaaagcatgttcaactttaactggaatgataggaggactaattgcttccactttgactggattgatccttaagcaggatccggaatccgcctggtttaaaaccttcatcctgatggcagccattaatgtgactggcctaattttctaccttatagttgctacagcagaaattcaggactgggctaaagaaaaacaacacacacgtctctgaaggtgagaagtgatcagattaaggacaatttttgaaactgggaatgcaggagacagaggagataaggatgactcctcagacgagaaggaataacgggtgcaggtttggagaagaggagaccatgttaagcctgagaatattagacatcctgaaatggctgtgggactctgtggggatgctaaggctggagatataaatttgg

SEQ ID NO: 28619 - DNA, 1493 bp, Homo sapiens
  source 1..1493: mol_type = unassigned DNA
accatttcccacagaagctaaatggacgggaagcctgccaccaggaaaggtccagatttctgttcattacgctatgggctggctcttatcatgcacttctcaaacttcaccatgataacgcagcgtgtgagtctgagcattgcgatcatcgccatggtgaacaccactcagcagcaaggtctatctaatgcctccactgaggggcctgttgcagatgccttcaataactccagcatatccatcaaggaatttgatacaaaggcctctgtgtatcaatggagcccagaaactcagggtatcatctttagctccatcaactatgggataatactgactctgatcccaagtggatatttagcagggatatttggagcaaaaaaaatgcttggtgctggtttgctgatctcttcccttctcaccctctttacaccactggctgctgacttcggagtgattttggtcatcatggttcggacagtccagggcatggcccagggaatggcatggacaggtcagtttactatttgggcaaagtgggctcctccacttgaacgaagcaagctcaccaccattgcaggatcagggtcagcatttggatccttcatcatcctctgtgtggggggactaatctcacaggccttgagctggccttttatcttctacatctttggtagcactggctgtgtctgctgtctcctatggttcacagtgatttatgatgaccccatgcatcacccgtgcataagtgttagggaaaaggagcacatcctgtcctcactggctcaacagcccagttctcctggacgagctgtccccataaaggcgatggtcacatgcctaccactttgggccattttcctgggttttttcagccatttctggttgtgcaccatcatcctaacatacctaccaacgtatatcagtactctgctccatgttaacatcagagatagtggagttctgtcctccctgccttttattgctgctgcaagctgtacaattttaggaggtcagctggcagatttccttttgtccaggaatcttctcagattgatcactgtgcgaaagctcttttcatctcttgggctcctccttccatcaatatgtgctgtggccctgccctttgtggcctccagttacgtgataaccattattttgctgatacttattcctgggaccagtaacctatgtgactcagggtttatcatcaacaccttagatatcgcccccagatatgcaagtttcctcatgggaatctcaaggggatttgggctcatcgcaggaatcatctcttccactgccactggattcctcatcagtcaggttgggccagtttattgaacatcttcaagtggcaggattttgagtctggttggaggaatgtctttttcctgtctgctgcagtcaacatgtttggcctggtcttttacctcacgtttggacaagcagaacttcaagactgggccaaagagaggacccttacccgcctctga

SEQ ID NO: 28620 - DNA, 2270 bp, Homo sapiens
  source 1..2270: mol_type = unassigned DNA
ggacagaaaactccctccttttccaagttagccttatagtctagggcttaaaatactggtttaatggtgaaggtaagtgcttttcttctttttgggtagaaggattattactaacttaccaaaggtccattaaggggagggaacagttttaggagaagtcagagaaaagacattaacagcaacataaggatctccatctggtaatattgcctaattccaaaatgaagagactctctgaaaaagataactgattcaatgaagaccctagggcaaggcttgagaagccactggtaccaatggacactgtggacaatggtcatttctccaaggacgctataaaagactgtcgtagtaaaagagattcagggcacagggaaactccaccacaaagcgtggtaccatttcccacagaagctaaatggacgggaagcctgccaccaggaaaggtccagatttctgttcattacgctatgggctggctcttatcatgcacttctcaaacttcaccatgataacgcagcgtgtgagtctgagcattgcgatcatcgccatggtgaacaccactcagcagcaaggtctatctaatgcctccactgaggggcctgttgcagatgccttcaataactccagcatatccatcaaggaatttgatacaaaggcctctgtgtatcaatggagcccagaaactcagggtatcatctttagctccatcaactatgggataatactgactctgatcccaagtggatatttagcagggatatttggagcaaaaaaaatgcttggtgctggtttgctgatctcttcccttctcaccctctttacaccactggctgctgacttcggagtgattttggtcatcatggttcggacagtccagggcatggcccagggaatggcatggacaggtcagtttactatttgggcaaagtgggctcctccacttgaacgaagcaagctcaccaccattgcaggatcagggtcagcatttggatccttcatcatcctctgtgtggggggactaatctcacaggccttgagctggccttttatcttctacatctttggtagcactggctgtgtctgctgtctcctatggttcacagtgatttatgatgaccccatgcatcacccgtgcataagtgttagggaaaaggagcacatcctgtcctcactggctcaacagcccagttctcctggacgagctgtccccataaaggcgatggtcacatgcctaccactttgggccattttcctgggttttttcagccatttctggttgtgcaccatcatcctaacatacctaccaacgtatatcagtactctgctccatgttaacatcagagatagtggagttctgtcctccctgccttttattgctgctgcaagctgtacaattttaggaggtcagctggcagatttccttttgtccaggaatcttctcagattgatcactgtgcgaaagctcttttcatctcttgatatgcaagtttcctcatgggaatctcaaggggatttgggctcatcgcaggaatcatctcttccactgccactggattcctcatcagtcaggattttgagtctggttggaggaatgtctttttcctgtctgctgcagtcaacatgtttggcctggtcttttacctcacgtttggacaagcagaacttcaagactgggccaaagagaggacccttacccgcctctgaggacataaagttacaaacttaaatgtggtactgagcatgaactttttaaacattttttacttctctccatattcctgaccatagactcagcagttcttaactctggctgtgtgttagtcttccctggggagcctttataagacactgatacttgggacccactccagagattctgaatgaattggtctggggtggaacccagatactactaatttttagatactccttagaggtttctagcatgcgcccggggttgacaacagctggacaaacttgaaaagtcaattcatgtggcctttgaattttcctcattggaaagtactaaataaataaaaattcatgtgaaaatgatcactgataaatatcttcatggtggggcaggttattggatgcagagaagatctgctcggaattgtagccatatgttacagatctcagcaccgatcggaactgtaaagctataatccccagaattaaagtttttattattttttatacattgtaaaacatagacgtttatttatgtgattaaattctattaaaatttacatgctaaaataaaa

SEQ ID NO: 28621 - DNA, 2525 bp, Homo sapiens
  source 1..2525: mol_type = unassigned DNA
gccgaggctttctgagaaagtggggccaaacctgttgccgtctgactgccacgtggctcactatttatccctgtaaaaatctgcaaaagtatttgaaagggaagaagggacagaaaactccctccttttccaagttagccttatagtctagggcttaaaatactggtttaatggtgaaggtaagtgcttttcttctttttgggtagaaggattattactaacttaccaaaggtccattaaggggagggaacagttttaggagaagtcagagaaaagacattaacagcaacataaggatctccatctggtaatattgcctaattccaaaatgaagagactctctgaaaaagataactgattcaatgaagaccctagggcaaggcttgagaagccactggtaccaatggacactgtggacaatggtcatttctccaaggacgctataaaagactgtcgtagtaaaagagattcagggcacagggaaactccaccacaaagcgtggtaccatttcccacagaagctaaatggacgggaagcctgccaccaggaaaggtccagatttctgttcattacgctatgggctggctcttatcatgcacttctcaaacttcaccatgataacgcagcgtgtgagtctgagcattgcgatcatcgccatggtgaacaccactcagcagcaaggtctatctaatgcctccactgaggggcctgttgcagatgccttcaataactccagcatatccatcaaggaatttgatacaaaggcctctgtgtatcaatggagcccagaaactcagggtatcatctttagctccatcaactatgggataatactgactctgatcccaagtggatatttagcagggatatttggagcaaaaaaaatgcttggtgctggtttgctgatctcttcccttctcaccctctttacaccactggctgctgacttcggagtgattttggtcatcatggttcggacagtccagggcatggcccagggaatggcatggacaggtcagtttactatttgggcaaagtgggctcctccacttgaacgaagcaagctcaccaccattgcaggatcagggtcagcatttggatccttcatcatcctctgtgtggggggactaatctcacaggccttgagctggccttttatcttctacatctttggtagcactggctgtgtctgctgtctcctatggttcacagtgatttatgatgaccccatgcatcacccgtgcataagtgttagggaaaaggagcacatcctgtcctcactggctcaacagcccagttctcctggacgagctgtccccataaaggcgatggtcacatgcctaccactttgggccattttcctgggttttttcagccatttctggttgtgcaccatcatcctaacatacctaccaacgtatatcagtactctgctccatgttaacatcagagatagtggagttctgtcctccctgccttttattgctgctgcaagctgtacaattttaggaggtcagctggcagatttccttttgtccaggaatcttctcagattgatcactgtgcgaaagctcttttcatctcttgggctcctccttccatcaatatgtgctgtggccctgccctttgtggcctccagttacgtgataaccattattttgctgatacttattcctgggaccagtaacctatgtgactcagggtttatcatcaacaccttagatatcgcccccagatatgcaagtttcctcatgggaatctcaaggggatttgggctcatcgcaggaatcatctcttccactgccactggattcctcatcagtcaggattttgagtctggttggaggaatgtctttttcctgtctgctgcagtcaacatgtttggcctggtcttttacctcacgtttggacaagcagaacttcaagactgggccaaagagaggacccttacccgcctctgaggacataaagttacaaacttaaatgtggtactgagcatgaactttttaaacattttttacttctctccatattcctgaccatagactcagcagttcttaactctggctgtgtgttagtcttccctggggagcctttataagacactgatacttgggacccactccagagattctgaatgaattggtctggggtggaacccagatactactaatttttagatactccttagaggtttctagcatgcgcccggggttgacaacagctggacaaacttgaaaagtcaattcatgtggcctttgaattttcctcattggaaagtactaaataaataaaaattcatgtgaaaatgatcactgataaatatcttcatggtggggcaggttattggatgcagagaagatctgctcggaattgtagccatatgttacagatctcagcaccgatcggaactgtaaagctataatccccagaattaaagtttttattattttttatacattgtaaaacatagacgtttatttatgtgattaaattctattaaaatttacatgctaaaataaaa

SEQ ID NO: 28622 - DNA, 1750 bp, Homo sapiens
  source 1..1750: mol_type = unassigned DNA
gtcggggccagagcgcaggtgtacctggcggccgtgctggagcacctgaccgccgagatcctggagctggctggcaacccggcccgcgacaagaagacccgcatcatcctgcgccacctgtagctggccattcgcaacggcgaggagcttaacaagctgctgggcgaagtcaccatcgcgcagggcggtgtcctgcccaacattcagggcgtgcttctgccccagaagaccaagagccaccacaaggccaagggtgaaaaccattcactaggagaggagaaacacaatggccaccaagacagagttgagtcccacagcaagggagagcaagaacgcacaagatatgcaagtggatgagacactgatccccaggaaagttccaagtttatgttctgctcgctatggaatagccctcgtcttacatttctgcaatttcacaacgatagcacaaaatgtcatcatgaacatcaccatggtagccatggtcaacagcacaagccctcaatcccagctcaatgattcctctgaggtgctgcctgttgactcatttggtggcctaagtaaagccccaaagagtcttcctgcaaagtcctcaatacttgggggtcagtttgcaatttgggaaaagtggggccctccacaagaacgaagcagactctgcagcattgctttatcaggaatgttactgggatgctttactgccatcctcataggtggcttcattagtgaaacccttgggtggccctttgtcttctatatctttggaggtgttggctgtgtctgctgccttctctggtttgttgtgatttatgatgaccccgtttcctatccatggataagcacctcagaaaaagaatacatcatatcctccttgaaacaacaggtcgggtcttctaagcagcctcttcccatcaaagctatgctcagatctctacccatttggtccatatgtttaggctgtttcagccatcaatggttagttagcacaatggttgtatacataccaacttacatcagctctgtgtaccatgttaacatcagagacaatggacttctatctgcccttccttttattgttgcctgggtcataggcatggtgggaggctatctggcagatttccttctaaccaaaaagtttagactcatcactgtgaggaaaattgccacaattttaggaagtctcccctcttcagcactcattgtgtctctgccttacctcaattccggctatatcacagcaactgccttgctgacgctctcttgcggattaagcacattgtgtcagtcagggatttatatcaatgtcttagatattgctccaaggtattccagttttctcatgggagcatcaagaggattttcgagcatagcacctgtcattgtacccactgtcagtggatttcttcttagtcaggaccctgagtttgggtggaggaatgtcttcttcttgctgtttgccgttaacctgttaggactactcttctacctcatatttggagaagcagatgtccaagaatgggctaaagagagaaaactcactcgtttatgaagttatcccaccttggatggaaaagtcattaggcaccgtattgcataaaatagaaggcttccgtgatgaaaataccagtgaaaagattttttttttcctgtggctcttttcaattatgagatcagttcattattttattcagacttttttttgagagaaatgtaagatgaataaaaattcaaataaaatgataactaagaa

SEQ ID NO: 28623 - DNA, 1543 bp, Homo sapiens
  source 1..1543: mol_type = unassigned DNA
ggaaacgctgggttcaacttgaagcccttccacagacattaagtcggtgaaaaccattcactaggagaggagaaacacaatggccaccaagacagagttgagtcccacagcaagggagagcaagaacgcacaagatatgcaagtggatgagacactgatccccaggaaagttccaagtttatgttctgctcgctatggaatagccctcgtcttacatttctgcaatttcacaacgatagcacaaaatgtcatcatgaacatcaccatggtagccatggtcaacagcacaagccctcaatcccagctcaatgattcctctgaggtgctgcctgttgactcatttggtggcctaagtaaagccccaaagagtcttcctgcaaagtcctcaatacttgggggtcagtttgcaatttgggaaaagtggggccctccacaagaacgaagcagactctgcagcattgctttatcaggaatgttactgggatgctttactgccatcctcataggtggcttcattagtgaaacccttgggtggccctttgtcttctatatctttggaggtgttggctgtgtctgctgccttctctggtttgttgtgatttatgatgaccccgtttcctatccatggataagcacctcagaaaaagaatacatcatatcctccttgaaacaacaggtcgggtcttctaagcagcctcttcccatcaaagctatgctcagatctctacccatttggtccatatgtttaggctgtttcagccatcaatggttagttagcacaatggttgtatacataccaacttacatcagctctgtgtaccatgttaacatcagagacaatggacttctatctgcccttccttttattgttgcctgggtcataggcatggtgggaggctatctggcagatttccttctaaccaaaaagtttagactcatcactgtgaggaaaattgccacaattttaggaagtctcccctcttcagcactcattgtgtctctgccttacctcaattccggctatatcacagcaactgccttgctgacgctctcttgcggattaagcacattgtgtcagtcagggatttatatcaatgtcttagatattgctccaaggtattccagttttctcatgggagcatcaagaggattttcgagcatagcacctgtcattgtacccactgtcagtggatttcttcttagtcaggaccctgagtttgggtggaggaatgtcttcttcttgctgtttgccgttaacctgttaggactactcttctacctcatatttggagaagcagatgtccaagaatgggctaaagagagaaaactcactcgtttatgaagttatcccaccttggatggaaaagtcattaggcaccgtattgcataaaatagaaggcttccgtgatgaaaataccagtgaaaagattttttttttcctgtggctcttttcaattatgagatcagttcattattttattcagacttttttttgagagaaatgtaagatgaataaaaattcaaataaaatgataactaagaa

SEQ ID NO: 28624 - DNA, 2052 bp, Homo sapiens
  source 1..2052: mol_type = unassigned DNA
gctccaaaaagtccaagggagtaagcttggaggaaacgctgggttcaacttgaagcccttccacagacattaagtcggtgaaaaccattcactaggagaggagaaacacaatggccaccaagacagagttgagtcccacagcaagggagagcaagaacgcacaagatatgcaagtggatgagacactgatccccaggaaagttccaagtttatgttctgctcgctatggaatagccctcgtcttacatttctgcaatttcacaacgatagcacaaaatgtcatcatgaacatcaccatggtagccatggtcaacagcacaagccctcaatcccagctcaatgattcctctgaggtgctgcctgttgactcatttggtggcctaagtaaagccccaaagagtcttcctgcaaaggctcctgtgtatgactggtctcctcaaatccaaggcatcatctttggtgctgttggctatggtggcatactgacaatggctcccagtggatacctggctggaagagtaggaacaaagcgagtggttggcatttctttgtttgcaacttcatttctcactctatgcatccctctggccactgactttggaatagtcttgctcattgtaactcgaatagtccagggcctaagccagtcctcaatacttgggggtcagtttgcaatttgggaaaagtggggccctccacaagaacgaagcagactctgcagcattgctttatcaggaatgttactgggatgctttactgccatcctcataggtggcttcattagtgaaacccttgggtggccctttgtcttctatatctttggaggtgttggctgtgtctgctgccttctctggtttgttgtgatttatgatgaccccgtttcctatccatggataagcacctcagaaaaagaatacatcatatcctccttgaaacaacaggtcgggtcttctaagcagcctcttcccatcaaagctatgctcagatctctacccatttggtccatatgtttaggctgtttcagccatcaatggttagttagcacaatggttgtatacataccaacttacatcagctctgtgtaccatgttaacatcagagacaatggacttctatctgcccttccttttattgttgcctgggtcataggcatggtgggaggctatctggcagatttccttctaaccaaaaagtttagactcatcactgtgaggaaaattgccacaattttaggaagtctcccctcttcagcactcattgtgtctctgccttacctcaattccggctatatcacagcaactgccttgctgacgctctcttgcggattaagcacattgtgtcagtcagggatttatatcaatgtcttagatattgctccaaggtattccagttttctcatgggagcatcaagaggattttcgagcatagcacctgtcattgtacccactgtcagtggatttcttcttagtcaggaccctgagtttgggtggaggaatgtcttcttcttgctgtttgccgttaacctgttaggactactcttctacctcatatttggagaagcagatgtccaagaatgggctaaagagagaaaactcactcgtttatgaagttatcccaccttggatggaaaagtcattaggcaccgtattgcataaaatagaaggcttccgtgatgaaaataccagtgaaaagattttttttttcctgtggctcttttcaattatgagatcagttcattattttattcagacttttttttgagagaaatgtaagatgaataaaaattcaaataaaatgataactaagaatgcagttgtcatcttcatagaattaacaatggattaagagggcttgctgtgtgggacccagtatgttagattccattactggatacaagaaacaatgttttaaaacctttaatccggggtgacaaactcactagggcaatgatttttcctgtttgtgaaaattaatattactttctatttattgggttgagtattgtccatgtgttcttccctatatgtcctccatttatctccatcctgctca

SEQ ID NO: 28625 - DNA, 599 bp, Homo sapiens
  source 1..599: mol_type = unassigned DNA
tgacgctctcttgcggattaagcacattgtgtcagtcagggatttatatcaatgtcttagatattgctccaaggtattccagttttctcatgggagcatcaagaggattttcgagcatagcacctgtcattgtacccactgtcagtggatttcttcttagtcaggaccctgagtttgggtggaggaatgtcttcttcttgctgtttgccgttaacctgttaggactactcttctacctcatatttggagaagcagatgtccaagaatgggctaaagagagaaaactcactcgtttatgaagaaaatgccagaaattgcccagcatgaaacaggacagtacaaacattctgcaacacacagaagaggaccagcagaatctggacttttgaaaaagaaaaaatctaactgaataacaacatcaaagtctcctgggcaaaggggttaaagatttacaacatttctttagaggaaaaaaataactggttgaatttacagagcatctgctatgtgccaaacatttaatgagcactttaaaagcatgataaaaattaaaaaaaaacttgttaagcatgaaataaattacctataatgcaaaatca

SEQ ID NO: 28626 - DNA, 661 bp, Homo sapiens
  source 1..661: mol_type = unassigned DNA
agtggatttcttcttagtcaggaccctgagtttgggtggaggaatgtcttcttcttgctgtttgccgttaacctgttaggactactcttctacctcatatttggagaagcagatgtccaagaatgggctaaagagagaaaactcactcgtttatgaaggcagtaccaaccttggacagggatggggtaatgattcacatttatggggggaaaaattatctttgtgtgactccagtcacagtttgcttctatcaaatcttcagtctccaatgaagtttaaatattcctgggaatcctaatgaaggactgtttttatgagttttgtgttatcattgtaatgtcaagattgtgtgtcaagtcaatatgaagtttaaaaccatttccaatatgttcacttgatttactcttttccattatttggatatcccattacacaggcacagtggatgatttaagtattccaggaagctgtttctataccaaagtacctagcaataatgtaacaattccccttatcaacccaaaccacataaatgtatcccaaattttggtccaatgaaatgcattcccactgcagccttcccttcaccatatcaaaaaatgccaagagcaactccatagtactatggtacccaataggatggagatagtaactttaaaca

SEQ ID NO: 28627 - DNA, 3616 bp, Homo sapiens
  source 1..3616: mol_type = unassigned DNA
ttacctcccagaattagacaattgcaaagagcttagaatatttatttgaaaggaatgaggatcctgcactcttcctccctcagtaagtaaatgccagtccctaggaagagagaaccaaaatgtctaccggaccagatgtcaaggctacagtgggggacatttccagtgatggcaatttaaacgtggctcaagaggaatgctccaggaaaggtttttgttcagtccgacatgggctggccctcatcttgcagctctgtaatttttcaatttacacccaacaaatgaacttgagcattgccatcccagctatggtgaacaacacagccccacctagccagcccaatgcttccacagaacggccctccactgactcccagggctactggaatgaaactctaaaagaatttaaagcaatggcccctgcatatgactggagtcctgaaatccagggaatcatcctcagctccctcaactatggctcattcttggctccaatccccagtggctatgtggctggaatatttggagccaagtatgtggttggtgctggcttgtttatttcctcattcctgaccctcttcattccactggcagctaatgcgggagtggccttgctcattgtcctccggattgtacaaggcatagcccaggttatggtattaactggtcagtattcaatttgggtcaaatgggctcccccactggaaaggagtcaactcaccaccattgctggatcagggtcaatgctggggtccttcattgttctacttgctggtggtctcctctgccagaccataggatggccttacgtcttctatatctttggaggaattggctgtgcttgttgtcctctctggtttcctctcatttatgatgatcctgtgaatcatccctttatcagtgctggtgagaagagatacattgtgtgttcattggctcagcaggactgttcaccaggctggtctcttcccattagggctatgatcaaatccttaccactctgggccattttagtctcttatttctgtgaatactggcttttttataccattatggcgtacacaccaacgtacatcagctcggtacttcaagccaacctcagagatagtgggatcctgtctgccttgccgtttgttgttggatgtatctgcattatccttggaggtctactggcagactttcttctctccagaaaaatcctcagactcatcaccatcaggaaactcttcactgccattggggttctcttcccatccgtgatcctcgtgtccctgccctgggtcagatccagccacagcatgaccatgaccttcttggtgctgtcttctgccatcagcagcttctgtgaatcaggagcccttgttaacttcttggatattgctcctcggtacactggctttctcaaaggactattgcaagtctttgcacacatagctggagccatctctcctactgctgctggatttttcatcagtcaggattcagagtttggttggagaaatgtcttcttgctttcagctgctgttaacatatcgggcctggttttctacctcatctttggccgagcagatgtgcaggactgggctaaagagcagacattcacccacctctgagcaaaccgagagatgtgctagatcctggtgcttagttcatcattgttttccctcacagacatttctctttcatgcctgcttgactgataagccattagctagaccctgactatgtaacgctaaagattttaccatgcctggaaattttacaggggaagaaaacacgctagttatttaactgcaagctactaaaagcataggtgtgttgagatttctgtgttctccactcttccactgttatcctagtaaaagcatcaggggctggggacaatttctttccaaagcaaaagaggaagccagaccttgggaccgagaactgagaatcacaagggagttgcgcccaacatgcagaacatgaatcctctgagctgtcctcaaaagaaagccccaaacaacagaaagcatagtgttttccattgttggtgaaaaatgtcaaggaggaaagaacaataatgattccatcatgataagaggaatgaacgtgtctgcaactaatgggagcaagatagtacactttaactctttcagacaacttgcattctgtggatgccagctttggaatcagagccgcctctggaatacctgtgcttccagagttagcttttggacagttaccttctttctggccatcttgacttctgccccacatctgctttttggctttgtgcagatctttaacatgttagtgaacagacattgcccagtgtctcttctagcccctccaacagttcttcatgtagcactgcttttggacagtgacccatgatatctgccttcgtttgcccctctgactgttggaatcccacgcaccattcagtaggattcaattcaatgtggaaccattcaacattcacctcattaacctaaaatgtctcccaaagatgtatgtaagacacacactgccctaacctcactccaaatgtctggagaaatgtgtgtagtgcttttgttaaagcccctatatgggcagcatggaggatcataagatagcaaaaccatttcaacactaaatgaatattaatgtacacacaccttgtgtggatggcagaaatcaaatcatacacagtattaaggagttcagtgtctcgggagggcagataactttaatcaaagtatcacacaagtgaatatgtaataacaactgtagaaataatgagtggttacatgggttatgagagtggatgataagtgcactaatctgagtgtaaggaagggccacccctgcaaagtttcagctgagctgggatctgaaggataatagttaactgttgtgggagactgagaggagaatattttaggaagaaagaacagcataagcaaaagtttcatggcaggagggagaaattagctatggccagagtatagagaataagggaagtatgatttgtgaggagactgtagaagaattaaggtcaggagcacacaggatgatgtaggcccagtgaagtgcgttggtctttattttgaaatcagtaggaagtgtcctggttttcaaaggcactctgcatgagagattaggttggagtaggagcttacagtgtagtccaggagagaacaatggcccctggcatgaggcaatagacatggtgagaggtgaatggattatttgatttaggtggattatttgatttagggaataaacctgacgggtcctattactaagtgagagagtgaaagatgtccagagtaactcctgagttttggtttgctattatattaatggggatgcctctaacacagacagcaacacagatagcaattatatccaagtgtagacaacaagaaggaaaatggacacatgactctggatttctcttgtgagacctgggctccatttacaaacgtataaatcatcttgatataggtagtgattacaatttttgcatggatgagtcatccatgggtgaaagtggcataagaaaaggaagcttgggaataagccttaaagaattccagtatttaatggtcagctggaggatgattagcagaaagaaagaaagaaa

SEQ ID NO: 28628 - DNA, 2331 bp, Homo sapiens
  source 1..2331: mol_type = unassigned DNA
tcagtaagtaaatgccagtccctaggaagagagaaccaaaatgtctaccggaccagatgtcaaggctacagtgggggacatttccagtgatggcaatttaaacgtggctcaagaggaatgctccaggaaagggatagtggatgaattcttcccgctgttgtcaaactaatgtatatggactcaaccacagggatatccccagagctcctatggaacactagcaaattttgtgtttttgttcagtccgacatgggctggccctcatcttgcagctctgtaatttttcaatttacacccaacaaatgaacttgagcattgccatcccagctatggtgaacaacacagccccacctagccagcccaatgcttccacagaacggccctccactgactcccagggctactggaatgaaactctaaaagaatttaaagcaatggactgttcaccaggctggtctcttcccattagggctatgatcaaatccttaccactctgggccattttagtctcttatttctgtgaatactggcttttttataccattatggcgtacacaccaacgtacatcagctcggtacttcaagccaacctcagagatagtgggatcctgtctgccttgccgtttgttgttggatgtatctgcattatccttggaggtctactggcagactttcttctctccagaaaaatcctcagactcatcaccatcaggaaactcttcactgccattggtaagggagagactggacacaggggtgaacgtgggaagctcagagcagccttcagtttactctgtgtttgtcctcctaccccaggggttctcttcccatccgtgatcctcgtgtccctgccctgggtcagatccagccacagcatgaccatgaccttcttggtgctgtcttctgccatcagcagcttctgtgaatcaggagcccttgttaacttcttggatattgctcctcggtagggacctcttttgcctcatcctttcagacactcaattcaagtctagcagccctaaatctactctgatgtgaaagtaaaatgtggcaggtacaacaggttgcaggaaatgtcagcaccagctctacatcctacatctaaataattcctggaagagactcaaagctggtggaccattgtgaacttagtttttctgggcgtgaacaagaggagtcagtggccatgctcagagtcaactgagggagactcacacaaacctctctctgttgaggaatgcagcacttgcctaaggcggaatcactgaaagaaatcttgagattctatagggtatgctcatgaaaatctttaatgaaggcaaaggacacaggactgcaggagaaatatctgtctctgatacagtaaaaacagttgactgagacttccaaacatagctcccagggtgctgtcccagtcaacaggacatccttcatcttcagataatgaaccaccaagaaatgtgagagatgcccttgtcacaggggagccgacgtctcatctggtgaggggtcttttatacccacggagggtataaaagttacaagatcagactcaacagcagaagccaaaacaacaacaacaacaacaacaacaacaacaacaacaacaacaaaaaccttacaaaccaggtgcagaccatcaatctgaccatcttgcataaacaatgttgacaagttaatagaggttacccccttgggagtaccagtccctagcacaggattatactaatcattggtcagtacatttcattcaggtttcaccaaggcttacacaattccagtcatctccagaggtacactggctttctcaaaggactattgcaagtctttgcacacatagctggagccatctctcctactgctgctggatttttcatcagtcaggattcagagtttggttggagaaatgtcttcttgctttcagctgctgttaacatatcgggcctggttttctacctcatctttggccgagcagatgtgcaggactgggctaaagagcagacattcacccacctctgagcaaaccgagagatgtgctagatcctggtgcttagttcatcattgttttccctcacagacatttctctttcatgcctgcttgactgataagccattagctagaccctgactatgtaacgctaaagattttaccatgcctggaaattttacaggggaagaaaacacgctagttatttaactgcaagctactaaaagcataggtgtgttgagatttctgtgttctccactcttccactgttatcctagtaaaagcatcaggggctggggacaatttctttccaaagcaaaagaggaagccagaccttgggaccg

SEQ ID NO: 28629 - DNA, 1664 bp, Homo sapiens
  source 1..1664: mol_type = unassigned DNA
ttatttgaaaggaatgaggatcctgcactcttcctccctcagtaagtaaatgccagtccctaggaagagagaaccaaaatgtctaccggaccagatgtcaaggctacagtgggggacatttccagtgatggcaatttaaacgtggctcaagaggaatgctccaggaaaggtttttgttcagtccgacatgggctggccctcatcttgcagctctgtaatttttcaatttacacccaacaaatgaacttgagcattgccatcccagctatggtgaacaacacagccccacctagccagcccaatgcttccacagaacggccctccactgactcccagggctactggaatgaaactctaaaagaatttaaagcaatgagtgggatcctgtctgccttgccgtttgttgttggatgtatctgcattatccttggaggtctactggcagactttcttctctccagaaaaatcctcagactcatcaccatcaggaaactcttcactgccattggggttctcttcccatccgtgatcctcgtgtccctgccctgggtcagatccagccacagcatgaccatgaccttcttggtgctgtcttctgccatcagcagcttctgtgaatcaggagcccttgttaacttcttggatattgctcctcggtacactggctttctcaaaggactattgcaagtctttgcacacatagctggagccatctctcctactgctgctggatttttcatcagtcaggattcagagtttggttggagaaatgtcttcttgctttcagctgctgttaacatatcgggcctggttttctacctcatctttggccgagcagatgtgcaggactgggctaaagagcagacattcacccacctctgagcaaaccgagagatgtgctagatcctggtgcttagttcatcattgttttccctcacagacatttctctttcatgcctgcttgactgataagccattagctagaccctgactatgtaacgctaaagattttaccatgcctggaaattttacaggggaagaaaacacgctagttatttaactgcaagctactaaaagcataggtgtgttgagatttctgtgttctccactcttccactgttatcctagtaaaagcatcaggggctggggacaatttctttccaaagcaaaagaggaagccagaccttgggaccgagaactgagaatcacaagggagttgcgcccaacatgcagaacatgaatcctctgagctgtcctcaaaagaaagccccaaacaacagaaagcatagtgttttccattgttggtgaaaaatgtcaaggaggaaagaacaataatgattccatcatgataagaggaatgaacgtgtctgcaactaatgggagcaagatagtacactttaactctttcagacaacttgcattctgtggatgccagctttggaatcagagccgcctctggaatacctgtgcttccagagttagcttttggacagttaccttctttctggccatcttgacttctgccccacatctgctttttggctttgtgcagatctttaacatgttagtgaacagacattgcccagtgtctcttctagcccctccaacagttcttcatgtagcactgcttttggacagtgacccatgatatctgccttcgtttg

SEQ ID NO: 28630 - DNA, 3949 bp, Homo sapiens
  source 1..3949: mol_type = unassigned DNA
gcttctgtgatattccggcccctccgtttaaaagccatcagatttgagagcaataagtcttcaaaaccgggaatttacattgtttttcagctgaccgacttccaggaaaaggactcaaccgcatctacccaaataccgtggcactgcttgcgctctttgccaccggatcctccccttccaatgagactttctgattgtgtctaccaactctcctattaggaaacccgtgggttgcatgcagctattctgttgtattctcattctcactctccctcccttctctcactctcactcttgctggaggcgagccactaccattctgctgagaaggaaaagcccgcaactactttaagagattaagacaatatgcgcaatcctcgcctttcctagcaatcactatttaaatctggcaagaactgacaacagtctttgcaagaatggaatccgtaaaacaaaggattttggccccaggaaaagaggggctaaagaattttgctggaaaatcactcggccagatctacagggtgctggagaagaagcaagacaccggggagacaatcgagctgacggaggatgggaagcccctagaggtgcccgagaggaaggcgccgctgtgcgactgcacgtgcttcggcctgccccgccgctacattatcgccatcatgagcggcctgggcttctgcatctccttcggtatccgctgcaacctgggcgtggccattgtggacatggtcaacaacagcaccatccaccgcgggggcaaggtcatcaaggagaaagccaaattcaactgggacccggaaaccgtggggatgatccacggttccttcttttggggctacatcatcactcagattccgggaggctacatcgcgtctcggctggcagccaacagggttttcggagctgccatacttcttacctctaccctaaatatgctaattccatcagcagccagagtgcattatggatgtgtcatctttgtcagaatactgcagggacttgttgagggtgtgacctacccagcatgtcatgggatatggagcaaatgggccccacctctagagaggagtagactggcaaccacctccttttgtggttcctatgccggagctgtgattgcaatgcctttagctggcattcttgtgcagtacactggctggtcttcagtgttttatgtctacggaagctttggaatggtctggtacatgttttggcttttggtgtcttatgaaagtcctgcaaagcatcctactattacagatgaagaacgtaggtacatagaagaaagcattggagagagtgcaaatcttttaggtgcaatggaaaaattcaagactccatggaggaagttttttacatccatgccagtctatgcaataattgttgcaaacttctgcagaagctggactttttatttattgcttattagtcagccagcatattttgaggaagtctttggatttgaaattagcaaggttggtatgctatctgctgtgccacacttagtaatgacaattattgtgcctattgggggacaaattgcagattttctaagaagcaagcagattctttcaactacgacagtgagaaagatcatgaattgtggtggttttggcatggaagccacactgctcctggtcgttggctattctcatactagaggggtagcaatctcattcttggtacttgcagtgggattcagtggatttgctatatctggtttcaatgttaaccacttggatatcgctccaagatatgccagtatcttaatgggcatttcgaatggtgttggcacattgtcaggaatggtttgtcctatcattgttggtgcaatgacaaagaataagtcacgtgaagagtggcagtatgtcttcctgatcgctgccctagtccactatggtggagttatattttatgcaatatttgcctcaggagagaaacaaccctgggcagacccggaggaaacaagtgaagaaaaatgtggatttattcatgaagatgaactcgatgaagaaacaggggacattactcaaaattatataaattatggtaccaccaagtcttatggtgccacaacacaggccaatggaggttggcctagtggttgggaaaagaaagaggaatttgtacaaggagaagtacaagactcacatagctataaggaccgagttgattattcataacaaaactaattactggatttatttttagtgtttgtgattaaattcattgtgattgcacaaaaattttaaaaacacgtgatgtaaacttgcaagcatatcaaccaggcaagtcttgctgtaaaaatgaaaacaaaacaaacccatgaggttaccatcaagtgcaatctgtaaaattgtgaagttccatcatttccattcaagtcatccattcttgcatttgtgacttaaaggttgactggtcaaaattgtagaaacaagtagttacccattggattcatatgagctaaaactcatcactatttactaaagcacaacatctcatcctacaaaagttaagaagccaaagctacttgatcatgcaaaatgcacttatatatttgttacactgtattgcaagatagcacacagaagttggctgcgtcaagtagaggcgacatttattaagtgaaaatcatggagttgggatatctctcaattaaagaaatacattgtgaactatcagctacaaagttgtactgaataactattagaattgcataatgtgagatattttgttagtcctcaaaaggaatatcttgcagtgttttctatgaaatgcttgggcacaaacacttatttctgtgaaagagaacatgtaagttgaggggtatgcttcatgttcttccatccatttacctaatagtatgaaacagttcacatttcaataaaatcaaacttttcatgtagcgtatcacataacttttttgcaaaaaatataaaaagaaataaacttcaatgtattttttattacaactttgtactggttgtaacttgcattagaaaaaaaagagatatatacaccacaaagaatctaataagaaatttattatggagatatagcccttaaaatgcaatattaagaacaaagaaatagaaaatggtttagatatctttcttccttcataattaaatactatatgaaacttgtgccacagagctatatataatatgaaaagattaacttcatagagatattgtaagtaggtaattttattatttaaagtcctattaagaaatatttgtcttaaatatataggacaatacattatattaaaatggtctctctctatatatatctgtatatcttatacatgtccatacacagaaacataataaacaatcttcacacgaaaccaaaaatagcatacacctaatgttgggttagggaattgcaatttctactttcatagagtcatagaattttaggtggggaagaggcattttgcttgtcatttcttaatataactcaacaagaattgcaacatttgtgtaccaagcaataagtgcaatgcataaaatttcctgtctgtatattaccttcattttgcttgtagtagctgtttgggtggttggaataattttatttttcttttaaaaaagctaacatcagacccctttataatgtcctaaaattatgataatacatttcccaattcaactcaaaatattattggtgtattttgtctattctggatatttgatctgttcaatgtactgtgctagtgactggaggccctgctactgcaaatataaaacataaagtttgtttaaaaaaatgcaaatcattctttaccttaagaaaaaaaaaataccctttgctttgtgcctcaaagtgatgtaatgtgatcacagcttttgttgtgttgaatgaaaatatgtggactgtcattttgttgcagcaaaaaagtgttaataaaatgctctatttatcctttttttaaaaa

SEQ ID NO: 28631 - DNA, 1870 bp, Homo sapiens
  source 1..1870: mol_type = unassigned DNA
agaatttcccgatttaagtctccagggttggaagtcactacactactgtgtctgcattggccggattcgttaagtggacccctgacaggcgtctccacatctggctaacaaatctcttcatgaaagccaaattcaactgggacccggaaaccgtggggatgatccacggttccttcttttggggctacatcatcactcagattccgggaggctacatcgcgtctcggctggcagccaacagggttttcggagctgccatacttcttacctctaccctaaatatgctaattccatcagcagccagagtgcattatggatgtgtcatctttgtcagaatactgcagggacttgttgagggtgtgacctacccagcatgtcatgggatatggagcaaatgggccccacctctagagaggagtagactggcaaccacctccttttgtggttcctatgccggagctgtgattgcaatgcctttagctggcattcttgtgcagtacactggctggtcttcagtgttttatgtctacggaagctttggaatggtctggtacatgttttggcttttggtgtcttatgaaagtcctgcaaagcatcctactattacagatgaagaacgtaggtacatagaagaaagcattggagagagtgcaaatcttttaggtgcaatggaaaaattcaagactccatggaggaagttttttacatccatgccagtctatgcaataattgttgcaaacttctgcagaagctggactttttatttattgcttattagtcagccagcatattttgaggaagtctttggatttgaaattagcaaggttggtatgctatctgctgtgccacacttagtaatgacaattattgtgcctattgggggacaaattgcagattttctaagaagcaagcagattctttcaactacgacagtgagaaagatcatgaattgtggtggttttggcatggaagccacactgctcctggtcgttggctattctcatactagaggggtagcaatctcattcttggtacttgcagtgggattcagtggatttgctatatctggtttcaatgttaaccacttggatatcgctccaagatatgccagtatcttaatgggcatttcgaatggtgttggcacattgtcaggaatggtttgtcctatcattgttggtgcaatgacaaagaataagtcacgtgaagagtggcagtatgtcttcctgatcgctgccctagtccactatggtggagttatattttatgcaatatttgcctcaggagagaaacaaccctgggcagacccggaggaaacaagtgaagaaaaatgtggatttattcatgaagatgaactcgatgaagaaacaggggacattactcaaaattatataaattatggtaccaccaagtcttatggtgccacaacacaggccaatggaggttggcctagtggttgggaaaagaaagaggaatttgtacaaggagaagtacaagactcacatagctataaggaccgagttgattattcataacaaaactaattactggatttatttttagtgtttgtgattaaattcattgtgattgcacaaaaattttaaaaacacgtgatgtaaacttgcaagcatatcaaccaggcaagtcttgctgtaaaaatgaaaacaaaacaaacccatgaggttaccatcaagtgcaatctgtaaaattgtgaagttccatcatttccattcaagtcatccattcttgcatttgtgacttaaaggttgactggtcaaaattgtagaaacaagtagttacccattggattcatatgagctaaaactcatcactatttactaaagcacaacatctcatcctacaaaagttaaga

SEQ ID NO: 28632 - DNA, 2975 bp, Homo sapiens
  source 1..2975: mol_type = unassigned DNA
tgtgacagcccccgggccgcctgcacttgcagcctccttccccccgagcggagctgcggggccggccgggccggggctggaccccgggaacccggacgcggccgcccgggcccgcgggcggggggatcggcgggggggacccgcggggtgaccggcggcaggagccgccaccatggagttccgccaggaggagtttcggaagctagcgggtcgtgctctcgggaagctgcaccgccttctggagaagcggcaggaaggcgcggagacgctggagctgagtgcggatgggcgcccggtgaccacgcagacccgggacccgccggtggtggactgcacctgcttcggcctccctcgccgctacattatcgccatcatgagtggtctgggcttctgcatcagctttggcatccgctgcaacctgggcgtggccatcgtctccatggtcaataacagcacgacccaccgcgggggccacgtggtggtgcagaaagcccagttcagctgggatccagagactgtcggcctcatacacggctcctttttctggggctacattgtcactcagattccaggaggatttatctgtcaaaaatttgcagccaacagagttttcggctttgctattgtggcaacatccactctaaacatgctgatcccctcagctgcccgcgtccactatggctgtgtcatcttcgtgaggatcctgcaggggttggtagagggggtcacataccccgcctgccatgggatctggagcaaatgggccccacccttagaacggagtcgcctggcgacgacagccttttgtggttcctatgctggggcggtggtcgcgatgcccctcgccggggtccttgtgcagtactcaggatggagctctgttttctacgtctacggcagcttcgggatcttctggtacctgttctggctgctcgtctcctacgagtcccccgcgctgcaccccagcatctcggaggaggagcgcaagtacatcgaggacgccatcggagagagcgcgaaactcatgaaccccctcacgaagtttagcactccctggcggcgcttcttcacgtctatgccagtctatgccatcatcgtggccaacttctgccgcagctggacgttctacctgctgctcatctcccagcccgcctacttcgaagaagtgttcggcttcgagatcagcaaggtaggcctggtgtccgcgctgccccacctggtcatgaccatcatcgtgcccatcggcggccagatcgcggacttcctgcggagccgccgcatcatgtccaccaccaacgtgcgcaagttgatgaactgcggaggcttcggcatggaagccacgctgctgttggtggtcggctactcgcactccaagggcgtggccatctccttcctggtcctagccgtgggcttcagcggcttcgccatctctgggttcaacgtgaaccacctggacatagccccgcgctacgccagcatcctcatgggcatctccaacggcgtgggcacactgtcgggcatggtgtgccccatcatcgtgggggccatgactaagcacaagactcgggaggagtggcagtacgtgttcctaattgcctccctggtgcactatggaggtgtcatcttctacggggtctttgcttctggagagaagcagccgtgggcagagcctgaggagatgagcgaggagaagtgtggcttcgttggccatgaccagctggctggcagtgacgacagcgaaatggaggatgaggctgagcccccgggggcaccccctgcacccccgccctcctatggggccacacacagcacatttcagccccccaggcccccaccccctgtccgggactactgaccatgtgcctcccactgaatggcagtttccaggacctccattccactcatctctggcctgagtgacagtgtcaaggaaccctgctcctctctgtcctgcctcaggcctaagaagcactctcccttgttcccagtgctgtcaaatcctctttccttcccaattgcctctcaggggtagtgaagctgcagactgacagtttcaaggatacccaaattcccctaaaggttccctctccacccgttctgcctcagtggtttcaaatctctcctttcagggctttatttgaatggacagttcgacctcttactctctcttgtggttttgaggcacccacaccccccgctttcctttatctccagggactctcaggctaacctttgagatcactcagctcccatctcctttcagaaaaattcaaggtcctcctctagaagtttcaaatctctcccaactctgttctgcatcttccagattggtttaaccaattactcgtccccgccattccagggattgattctcaccagcgtttctgatggaaaatggcggtttcaagtccccgattccgtgcccacttcacatctcccctaccagcagattctgcgaaagcaccaaatttctcaagaccctcttctccctagcttagcataatgtctggggaaacaaccaaaatcgcaattttaacaatatgcctctctacccccgtgcactttttctgacatggttttcaggtctaaatagtggctgctccagtccatgaactcaaaggtttgaagctaccaccattgaactcccccatggtggtttcatgatgccccctccccaattcctcgcactttattctcctgggtggtttcgaactaccctgtttctcagtggccatttgttgtgtccctcaggggcttaatgactcaaaatctgggatccttcccctctcagacacccctctttcagcttagaatttggggaacctatagagaagtcacagaatcccatgaaagggaatggggcaggagccaggggtgttttttcccagtgcagggttgtgtctttgtgtctctgtctctgtgactgtaaatcctgccctgccccactcccaataaaagctttggtgtataggctc

SEQ ID NO: 28633 - DNA, 2237 bp, Homo sapiens
  source 1..2237: mol_type = unassigned DNA
gaactcagagcgcggacagatcccagaggagcagagaaataacacaatggggagactatggggtcgcagctggcactggcgggccttctggagaagcggcaggaaggcgcggagacgctggagctgagtgcggatgggcgcccggtgaccacgcagacccgggacccgccggtggtggactgcacctgcttcggcctccctcgccgctacattatcgccatcatgagtggtctgggcttctgcatcagctttggcatccgctgcaacctgggcgtggccatcgtctccatggtcaataacagcacgacccaccgcgggggccacgtggtggtgcagaaagcccagttcagctgggatccagagactgtcggcctcatacacggctcctttttctggggctacattgtcactcagattccaggaggatttatctgtcaaaaatttgcagccaacagagttttcggctttgctattgtggcaacatccactctaaacatgctgatcccctcagctgcccgcgtccactatggctgtgtcatcttcgtgaggatcctgcaggggttggtagagggggtcacataccccgcctgccatgggatctggagcaaatgggccccacccttagaacggagtcgcctggcgacgacagccttttgtggttcctatgctggggcggtggtcgcgatgcccctcgccggggtccttgtgcagtactcaggatggagctctgttttctacgtctacggcagcttcgggatcttctggtacctgttctggctgctcgtctcctacgagtcccccgcgctgcaccccagcatctcggaggaggagcgcaagtacatcgaggacgccatcggagagagcgcgaaactcatgaaccccctcacgaagtttagcactccctggcggcgcttcttcacgtctatgccagtctatgccatcatcgtggccaacttctgccgcagctggacgttctacctgctgctcatctcccagcccgcctacttcgaagaagtgttcggcttcgagatcagcaaggtaggcctggtgtccgcgctgccccacctggtcatgaccatcatcgtgcccatcggcggccagatcgcggacttcctgcggagccgccgcatcatgtccaccaccaacgtgcgcaagttgatgaactgcggaggcttcggcatggaagccacgctgctgttggtggtcggctactcgcactccaagggcgtggccatctccttcctggtcctagccgtgggcttcagcggcttcgccatctctgggttcaacgtgaaccacctggacatagccccgcgctacgccagcatcctcatgggcatctccaacggcgtgggcacactgtcgggcatggtgtgccccatcatcgtgggggccatgactaagcacaagactcgggaggagtggcagtacgtgttcctaattgcctccctggtgcactatggaggtgtcatcttctacggggtctttgcttctggagagaagcagccgtgggcagagcctgaggagatgagcgaggagaagtgtggcttcgttggccatgaccagctggctggcagtgacgacagcgaaatggaggatgaggctgagcccccgggggcaccccctgcacccccgccctcctatggggccacacacagcacatttcagccccccaggcccccaccccctgtccgggactactgaccatgtgcctcccactgaatggcagtttccaggacctccattccactcatctctggcctgagtgacagtgtcaaggaaccctgctcctctctgtcctgcctcaggcctaagaagcactctcccttgttcccagtgctgtcaaatcctctttccttcccaattgcctctcaggggtagtgaagctgcagactgacagtttcaaggatacccaaattcccctaaaggttccctctccacccgttctgcctcagtggtttcaaatctctcctttcagggctttatttgaatggacagttcgacctcttactctctcttgtggttttgaggcacccacaccccccgctttcctttatctccagggactctcaggctaacctttgagatcactcagctcccatctcctttcagaaaaattcaaggtcctcctctagaagtttcaaatctctcccaactctgttctgcatcttccagattggtttaaccaattactcgtccccgccattccagggattgattctcaccagcgtttctga

SEQ ID NO: 28634 - DNA, 3954 bp, Homo sapiens
  source 1..3954: mol_type = unassigned DNA
gagagtggctgcctgagacagctgccacaggctgctgcagagcgtgcagcttttgcaagggactgaattcccagccagacaccccttggactcttttttggaggggtggggagcagagagaggagggagttgtcttatcttggaagatccgagctgggtttcatctcctttttgattttgagtagttccctccacgagaactgacttccaggtgttcaccaagggaaacaaggtggttctcacactggaaatgaggaaggatgacagtttttgagactgactgttaacggctcagaggtgcccctcattcaaaatgccttttaaagcatttgataccttcaaagaaaaaattctgaaacctgggaaggaaggagtgaagaacgccgtgggagattctttgggaattttacaaagaaaaatcgatgggacaactgaggaagaagataacattgagctgaatgaagaaggaaggccggtgcagacgtccaggccaagccccccactctgcgactgccactgctgcggcctccccaagcgttacatcattgctatcatgagtgggctgggattctgcatttcctttgggatccggtgcaatcttggagttgccattgtggaaatggtcaacaatagcaccgtatatgttgatggaaaaccggaaattcagacagcacagtttaactgggatccagaaacagtgggccttatccatggatcttttttctggggctatattatgacacaaattccaggtggtttcatttcaaacaagtttgctgctaacagggtctttggagctgccatcttcttaacatcgactctgaacatgtttattccctctgcagccagagtgcattacggatgcgtcatgtgtgtcagaattctgcaaggtttagtggagggtgtgacctacccagcctgccatgggatgtggagtaagtgggcaccacctttggagagaagccgactggccacaacctctttttgtggttcctatgcaggggcagtggttgccatgcccctggctggggtgttggtgcagtacattggatggtcctctgtcttttatatttatggcatgtttgggattatttggtacatgttttggctgttgcaggcctatgagtgcccagcagctcatccaacaatatccaatgaggagaagacctatatagagacaagcataggagagggggccaacgtggttagtctaagtaaatttagtaccccatggaaaagatttttcacatctttgccggtttatgcaatcattgtggcaaatttttgcagaagctggaccttttatttgctcctcataagtcagcctgcttattttgaagaggtctttggatttgcaataagtaaggtgggtctcttgtcagcagtcccacacatggttatgacaatcgttgtacctattggaggacaattggctgattatttaagaagcagacaaattttaaccacaactgctgtcagaaaaatcatgaactgtggaggttttggcatggaggcaaccttactcctggtggttggcttttcgcataccaaaggggtggctatctcctttctggtacttgctgtaggatttagtggcttcgctatttcaggttttaatgtcaaccacctggacattgccccacgctatgccagcattctcatggggatctcaaacggagtgggaaccctctctggaatggtctgtcccctcattgtcggtgcaatgaccaggcacaagacccgtgaagaatggcagaatgtgttcctcatagctgccctggtgcattacagtggtgtgatcttctatggggtctttgcttctggggagaaacaggagtgggctgacccagagaatctctctgaggagaaatgtggaatcattgaccaggacgaattagctgaggagatagaactcaaccatgagagttttgcgagtcccaaaaagaagatgtcttatggagccacctcccagaattgtgaagtccagaagaaggaatggaaaggacagagaggagcgacccttgatgaggaagagctgacatcctaccagaatgaagagagaaacttctcaactatatcctaatgtctgagaggcacttctgtcttctccttactttagaaacagaaagtatccatacctattgcctttcttgtagcccagcttgccagaggtccaaatattgggaggggagaagatctaaccagcaacagggaaaagagaaatattatctttcaatgacatgtataggtaaggagctgcgctcagttgataacatagttgataatacatattttttgaattgacagttgacccttctctcaaagagctaaacttattcagaaaggaatgactagaagaaaaaggagacaataccatgttgttcaaagaaacattgaaggaaattgggatgtttggccagaaggaatgtaaacagtagtagtagctgccaccacatctctagggtagccatgcagaggagggcttcatattcccaataaaccccacgttgtggcaggtgctttataaacactcttatttaatctccacacctttatgacacacatttcttatccccattttacaaccaaggcatctaaagcaacaagaaatgaacttgcccaaggtcatctgccagggtcagtgctgagactgttgaagctctcaataggtggcagttttagggaagatttccattcagtgtagggaagacatttgtaataatgaaaactgaaaatggagtaattgtgagtaactcaccactttagcaggtgttggggaagggaaacatttgggttgatgaggcagaggggattcaaatgtgtgagaggctagattcaaagaccctcagtgttctatgttatctgaagagtcaaatggttttgtgactccatagtttttaaagtaataagggtcaaagactacatcagagattcaaataggtttttaaagaaaagctaagcaagagagccaaatttttagaaatctgatggtcaaaatagctgaaagcagtaaacaagagattggctattaaatttcaactttccataatattaagaatgtagctaaatgatgtcccaaactacttacaaacttttaagacatttaataatttaagaagtaggttcatgtgttttcttaggtaaagttcttctgaaagaattttctatttttaaaaaatgtatctctttagccttttctgctggagattatattaggaagtttcatcagattgtataaaattatgattttgtatcaaaagtattcatgatgactctatttggaatgatattcagggaaatcacaataatatagcagtagttatacagagaaatactacaatgaaaacatttggggcaattagacctacagttactgttgaaaaattcacctttgattgcataaggcaattacatggatacttttagatatatttaaaattttaacattggcatctaaagtgttatttgaaaataaaattattttcctgttcattgattttaaacattttattcctactttcagaagaaaaatataatacggaaaaaattatagatttacttgtagcttattattgtaaagtgttttttttttttttttttttttctaatttctcccacatgtatttctggtccccagtgatactagctgagttgtagtgtattttataaatggaataatcttggggaaaaattgcgattcttcattaaataatattctttatgtcactagcatacaatttatgttagtagacatctttaaatctctttaatgagtgaatccatgcaagccccataaaacagttcctagcatgcagaaaatgcccacgtaaatagctgtcatcatcattatcttttaacattttgggggactttccagttgaaaagaaaacatgctatgtcatttttatccattatccctggaacttattgtgaaagttgtgctgttttctaagt

SEQ ID NO: 28635 - DNA, 1737 bp, Homo sapiens
  source 1..1737: mol_type = unassigned DNA
gctcagaggtgcccctcattcaaaatgccttttaaagcatttgataccttcaaagaaaaaattctgaaacctgggaaggaaggagtgaagaacgccgtgggagattctttgggaattttacaaagaaaaatcgatgggacaactgaggaagaagataacattgagctgaatgaagaaggaaggccggtgcagacgtccaggccaagccccccactctgcgactgccactgctgcggcctccccaagcgttacatcattgctatcatgagtgggctgggattctgcatttcctttgggatccggtgcaatcttggagttgccattgtggaaatggtcaacaatagcaccgtatatgttgatggaaaaccggaaattcagacagcacagtttaactgggatccagaaacagtgggccttatccatggatcttttttctggggctatattatgacacaaattccaggtggtttcatttcaaacaagtttgctgctaacagggtctttggagctgccatcttcttaacatcgactctgaacatgtttattccctctgcagccagagtgcattacggatgcgtcatgtgtgtcagaattctgcaaggtttagtggagggtgtgacctacccagcctgccatgggatgtggagtaagtgggcaccacctttggagagaagccgactggccacaacctctttttgtggttcctatgcaggggcagtggttgccatgcccctggctggggtgttggtgcagtacattggatggtcctctgtcttttatatttatggcatgtttgggattatttggtacatgttttggctgttgcaggcctatgagtgcccagcagctcatccaacaatatccaatgaggagaagacctatatagagacaagcataggagagggggccaacgtggttagtctaagtgtgggtctcttgtcagcagtcccacacatggttatgacaatcgttgtacctattggaggacaattggctgattatttaagaagcagacaaattttaaccacaactgctgtcagaaaaatcatgaactgtggaggttttggcatggaggcaaccttactcctggtggttggcttttcgcataccaaaggggtggctatctcctttctggtacttgctgtaggatttagtggcttcgctatttcaggttttaatgtcaaccacctggacattgccccacgctatgccagcattctcatggggatctcaaacggagtgggaaccctctctggaatggtctgtcccctcattgtcggtgcaatgaccaggcacaagacccgtgaagaatggcagaatgtgttcctcatagctgccctggtgcattacagtggtgtgatcttctatggggtctttgcttctggggagaaacaggagtgggctgacccagagaatctctctgaggagaaatgtggaatcattgaccaggacgaattagctgaggagatagaactcaaccatgagagttttgcgagtcccaaaaagaagatgtcttatggagccacctcccagaattgtgaagtccagaagaaggaatggaaaggacagagaggagcgacccttgatgaggaagagctgacatcctaccagaatgaagagagaaacttctcaactatatcctaatgtctgagaggcacttctgtcttctccttactttagaaacagaaagtatccatacctattgcctttcttgtagcccagcttgccagaggtcca

SEQ ID NO: 28636 - DNA, 2594 bp, Homo sapiens
  source 1..2594: mol_type = unassigned DNA
ccagacggaagcgcgctgggactgacacgtggacttgggcggtgctgcccgggtgggtcagcctgggctgggaggcagccccgggacacagctgtgcccacgccgtctgagcaccccaagcccgatgcagccacccccagacgaggcccgcagggacatggccggggacacccagtggtccaggtggaaccaccctgtgtatgcatgaccctgacaagcaggcgccaggacagtcaggaggccaggcccgagtgccaggcatggacggggacgctgctgctgggcacatgccttctgtactgcgcccgctccagcatgcccatctgcaccgtctccatgagccaggacttcggctggaacaagaaggaggccggcatcgtgctcagcagcttcttctggggctactgcctgacacaggttgtgggcggccacctcggggatcggattgggggtgagaaggtcatcctgctgtcagcctctgcctggggctccatcacggccgtcaccccactgctcgcccacctgagcagtgcccacctggccttcatgaccttctcacgcatcctcatgggcttgctccaaggggtttacttccctgccctgaccagcctgctgtcgcagaaggtgcgggagagtgagcgagccttcacctacagcatcgtgggcgccggctcccagtttgggacgctgctgaccggggcggtgggctccctgctcctggaatggtacggctggcagagcatcttctatttctccggcggcctcaccttgctttgggtgtggtacgtgtacaggtacctgctgagtgaaaaagatctcatcctggccttgggtgtcctggcccaaagccggccggtgtccaggcacaacagagtcccctggagacggctcttccggaagcctgctgtctgggcagccgtcgtctcccagctctctgcagcctgctccttcttcatcctcctctcctggctgcccaccttcttcgaggagaccttccccgacgccaagggctggatcttcaacgtggttccttggttggtggcgattccggccagtctattcagcgggtttctctctgatcatctcatcaatcagggttacagagccatcacggtgcggaagctcatgcagggcatgggccttggcctctccagcgtctttgctctgtgcctgggccacacctccagcttctgtgagtctgtggtctttgcatcagcctccatcggcctccagaccttcaaccacagtggcatttctgttaacatccaggacttggccccgtcctgcgccggctttctgtttggtgtggccaacacagccggggccttggcaggtgtcgtgggtgtgtgtctaggcggctacttgatggagaccacgggctcctggacttgcctgttcaaccttgtggccatcatcagcaacctggggctgtgcaccttcctggtgtttggacaggctcagagggtggacctgagctctacccatgaggacctctagctcccaaccccacagcctctccaaggacccaggcgccagcagccccaggacacaggggactcagtgtgtgggacttggtcactccatgtcagacacacgagcagagaggaacacaaaccactgtggagcctgaagctccttaagaagagtccacaacagctggtgggagggtggggtgggcctgggtccagaccaggctcgctgctctctgggcctcagtttccccacctgccagcgggctcggccctgtcctcctcacaggctggtgtggccgtcagggtgggtggggttattgttagtaggcgcagcctcattcccaccacgatctgttccgcgtggttcccgccaaacctccctcggtcgccgtgttctccgcaagcctcctgcagcgcccgcctgccaatgtgaggctggcaccaggctgcagcctccccaatcccagcccactttgctgtgtctctggcgggctgtcctccttggtgggagctgtcctgcacactgtaggatgcttaaaggtatccctggcctccacccacccctagccagcagctcccagtcagacaacagccagaaatgtctccagactctgcccagcctccccaggtagccaccctcgagacacgacctcagagtctctgtgtctcctagaagcctgacagagacccccagggcagtgggtgggtggcgggctagagacccttgcctgtgtccgggaccctggcgccgctctcccctcctgtggatccctccgcactaacagtgttctcagtgggcagacgcctgggcaccccttgggccctgcccagcatggccatggcgcaggctctcgaacccgcatggctttcccaggcctggtgattctgctctccagggacggttggcaccttcctcgggggcgggccccacgcaccccagaacacacagacccacctttctggcgttctttctacctcccttttcgttgcctgaggagctggtggtttcatgagttaatgatacatcttgcaaggtgtacacatagagaaaaaaacctaaaaatgtggaaaagcacgccaaagccttatttaaataataactattaaactattcaaaaagaa

SEQ ID NO: 28637 - DNA, 2539 bp, Homo sapiens
  source 1..2539: mol_type = unassigned DNA
gagagaaccagacggaagcgcgctgggactgacacgtggacttgggcggtgctgcccgggtgggtcagcctgggctgggaggcagccccgggacacagctgtgcccacgccgtctgagcaccccaagcccgatgcagccacccccagacgaggcccgcagggacatggccggggacacccagtggtccaggcccgagtgccaggcatggacggggacgctgctgctgggcacatgccttctgtactgcgcccgctccagcatgcccatctgcaccgtctccatgagccaggacttcggctggaacaagaaggaggccggcatcgtgctcagcagcttcttctggggctactgcctgacacaggttgtgggcggccacctcggggatcggattgggggtgagaaggtcatcctgctgtcagcctctgcctggggctccatcacggccgtcaccccactgctcgcccacctgagcagtgcccacctggccttcatgaccttctcacgcatcctcatgggcttgctccaaggggtttacttccctgccctgaccagcctgctgtcgcagaaggtgcgggagagtgagcgagccttcacctacagcatcgtgggcgccggctcccagtttgggacgctgctgaccggggcggtgggctccctgctcctggaatggtacggctggcagagcatcttctatttctccggcggcctcaccttgctttgggtgtggtacgtgtacaggtacctgctgagtgaaaaagatctcatcctggccttgggtgtcctggcccaaagccggccggtgtccaggcacaacagagtcccctggagacggctcttccggaagcctgctgtctgggcagccgtcgtctcccagctctctgcagcctgctccttcttcatcctcctctcctggctgcccaccttcttcgaggagaccttccccgacgccaagggctggatcttcaacgtggttccttggttggtggcgattccggccagtctattcagcgggtttctctctgatcatctcatcaatcagggttacagagccatcacggtgcggaagctcatgcagggcatgggccttggcctctccagcgtctttgctctgtgcctgggccacacctccagcttctgtgagtctgtggtctttgcatcagcctccatcggcctccagaccttcaaccacagtggcatttctgttaacatccaggacttggccccgtcctgcgccggctttctgtttggtgtggccaacacagccggggccttggcaggtgtcgtgggtgtgtgtctaggcggctacttgatggagaccacgggctcctggacttgcctgttcaaccttgtggccatcatcagcaacctggggctgtgcaccttcctggtgtttggacaggctcagagggtggacctgagctctacccatgaggacctctagctcccaaccccacagcctctccaaggacccaggcgccagcagccccaggacacaggggactcagtgtgtgggacttggtcactccatgtcagacacacgagcagagaggaacacaaaccactgtggagcctgaagctccttaagaagagtccacaacagctggtgggagggtggggtgggcctgggtccagaccaggctcgctgctctctgggcctcagtttccccacctgccagcgggctcggccctgtcctcctcacaggctggtgtggccgtcagggtgggtggggttattgttagtaggcgcagcctcattcccaccacgatctgttccgcgtggttcccgccaaacctccctcggtcgccgtgttctccgcaagcctcctgcagcgcccgcctgccaatgtgaggctggcaccaggctgcagcctccccaatcccagcccactttgctgtgtctctggcgggctgtcctccttggtgggagctgtcctgcacactgtaggatgcttaaaggtatccctggcctccacccacccctagccagcagctcccagtcagacaacagccagaaatgtctccagactctgcccagcctccccaggtagccaccctcgagacacgacctcagagtctctgtgtctcctagaagcctgacagagacccccagggcagtgggtgggtggcgggctagagacccttgcctgtgtccgggaccctggcgccgctctcccctcctgtggatccctccgcactaacagtgttctcagtgggcagacgcctgggcaccccttgggccctgcccagcatggccatggcgcaggctctcgaacccgcatggctttcccaggcctggtgattctgctctccagggacggttggcaccttcctcgggggcgggccccacgcaccccagaacacacagacccacctttctggcgttctttctacctcccttttcgttgcctgaggagctggtggtttcatgagttaatgatacatcttgcaaggtgtacacatagagaaaaaaacctaaaaatgtggaaaagcacgccaaagccttatttaaataataactattaaactattcaaaaagaa

SEQ ID NO: 28638 - DNA, 565 bp, Homo sapiens
  source 1..565: mol_type = unassigned DNA
ggaaggaagtgagtgccctgtccttcctccctgccatgagattccaggaccggacctggcaagtgccctatcccagccagtgttcctggggctcttccaggcagggctatgttccccaggccaggggcattgtcctggacagtcaggaggcatacccctcgccaggtggaaccaccctgtgtatgcatgaccctgacaagcaggcgccaggacagtcaggaggccaggcccgagtgccaggcatggacggggacgctgctgctgggcacatgccttctgtactgcgcccgctccagcatgcccatctgcaccgtctccatgagccaggacttcggctggaacaagaaggaggccggcatcgtgctcagcagcttcttctggggctactgcctgacacaggttgtgggcggccacctcggggatcggattgggggtgagaaggtcatcctgctgtcagcctctgcctggggctccatcacggccgtcaccccactgctcgcccacctgagcagtgcccacctggccttcatgaccttctcacgcatcctcatgggcttgctccaag

SEQ ID NO: 28639 - DNA, 2419 bp, Homo sapiens
  source 1..2419: mol_type = unassigned DNA
ggaggaggcaagagccgacgcgaggggaggggagcgcagcggcggggctaacgggcgggcaagcgggcgggcggcaacagcatgtccctcggccagcgcgggcggcctcttagcgcggcgggggctgctctgggcgcgccccgggcgaagtgcgcccagtctccggccccggcccctcggcgcgcccgacttcccggccgcccctgagcccagcagccgcgggtcccgggatcggctaagagtagctgcaacgcctcgccggacggagtcctttcctttcccgggacgctgggccatgagctccgcggccacctgaggcacaggggagtctgctcggccaggacagcctccccgaagtcccgtgccctcgcctctgcactgcgggacgccagcgctcggccctggcggaggcgtcctcggaagagcatcggggtgggggcatggaatccgcggaacctgcgggccaggcccgggcggcggccaccaagctgtcggaggctgtgggcgcggcgctgcaggagccccggcggcagaggcgcctggtgcttgttatcgtgtgcgtggcgctgttactggacaacatgctgtacatggtcatcgtgcccatagtgcccgactacatcgcccacatgcgcgggggcggcgagggccccacccggactcccgaggtgtgggagcccaccctgccgctgcccactccggccaatgccagcgcctacacggccaacacctcggcgtccccgacagctgcgtggccagcgggctcagcccttcggccccgctaccctacggagagcgaagacgtgaagatcggggtgctgtttgcttccaaggctatcctgcagctgctagtgaaccccttgagcgggcccttcatcgaccgcatgagctacgacgtgccgctgctgatcggcctgggcgtcatgttcgcctctacagtcctgttcgccttcgccgaggactacgccacgctgttcgcggcgcgcagcctgcagggcctgggctcagccttcgccgacacgtctggcatagccatgatcgccgataagtacccggaggagccggagcgcagtcgtgcactgggcgtggcgctggccttcattagcttcggaagcctagtggccccgcccttcgggggcatcctctatgagttcgccggcaagcgcgtgcccttcttggtgctagctgccgtgtcgctctttgacgcgctgttgctgctggcagtggccaaacccttctcggcggctgcacgggctcgggccaacctgccagtgggcactcccatccaccgcctcatgctagacccctacattgccgtggtggccggcgcgctcaccacctgtaacattcccctcgccttcctcgaacccaccattgccacgtggatgaagcatacgatggcggcttccgagtgggagatgggcatggcctggctgccggccttcgtgcctcatgtgctgggcgtctacctcaccgtgcgcctggcggcgcgctacccacacctgcagtggctgtacggcgcgcttgggctggctgtgatcggcgccagctcgtgcatcgtgcccgcctgccgctccttcgcgccgctagtggtctcactatgcggcctctgttttggcatagccctagtcgacacagcactgctgcccacgctcgccttcctggtggacgtgcgccatgtctcagtctatggcagcgtctacgccatcgccgacatctcctattcggtggcctacgcgctcgggcccatagtggcaggccacattgtgcactcgctgggctttgagcagctcagccttggcatgggactggccaacctgctctatgctcccgtcttgctgctgctccgcaacgtgggcctcctgacgcgctcccgttccgagcgcgatgtgctgcttgatgagccaccgcaaggtctgtacgatgcggtgcgcctgcgtgagcgtcctgtgtctggccaggacggcgagcctcgcagcccgcctggcccttttgatgcgtgcgaggacgactacaactactactacacccgcagctagcatccccactcctcctccagcccacccaaccgccttgggtcaagggggctgctctgcaagcccactggccagctctggctcagggcccacctcctccagcgagtaccccagccactcctcaaccttgacttctgcccaaatcccctccctgtgacccgttccatatccctttctctcttgtccaatggggcttggagcaccgaggccagcgaagccatcgcgctccttgcggaggtgaagaggaccctgagtccccacctgcggctcccctgtgtagagcctgcatctgtctgtccttccttccattgctcccagtgccaaacttgggccgctgcaccgcggcgcctccgcccaaatcaataaactgtgtctgtcccagg

SEQ ID NO: 28640 - DNA, 2770 bp, Homo sapiens
  source 1..2770: mol_type = unassigned DNA
gctaacagctgccaatacctcactgagtgcctcacaccaacatgggctccaagatgaaggcatctttctgatcaggggtttgtagctcaaacaaaagaatgagcgtgcttctagaaccacagagcaagggaacatggtagaggataagctggcaagttgaaaagcgtgggatttcatcccagtttgacactaactgtgcaaccccaaacaaatctcctaaccttcagaggctcggatttcttgtctatgagatgaagtgagtttccttcgtctgggcagactccctcccctcttccataaaggctgcaggagacctgtagctgtcacaggaccttccctaagagcccgcaggggaagactgccccagtccggccatcaccatgctccggaccattctggatgctccccagcggttgctgaaggaggggagagcgtcccggcagctggtgctggtggtggtattcgtcgctttgctcctggacaacatgctgtttactgtggtggtgccaattgtgcccaccttcctatatgacatggagttcaaagaagtcaactcttctctgcacctcggccatgccggaagttccccacatgccctcgcctctcctgccttttccaccatcttctccttcttcaacaacaacaccgtggctgttgaagaaagcgtacctagtggaatagcatggatgaatgacactgccagcaccatcccacctccagccactgaagccatctcagctcataaaaacaactgcttgcaaggcacaggtttcttggaggaagagattacccgggtcggggttctgtttgcttcaaaggctgtgatgcaacttctggtcaacccattcgtgggccctctcaccaacaggattggatatcatatccccatgtttgctggctttgttatcatgtttctctccacagttatgtttgctttttctgggacctatactctactctttgtggcccgaacccttcaaggcattggatcttcattttcatctgttgcaggtcttggaatgctggccagtgtctacactgatgaccatgagagaggacgagccatgggaactgctctggggggcctggccttggggttgctggtgggagctccctttggaagtgtaatgtacgagtttgttgggaagtctgcacccttcctcatcctggccttcctggcactactggatggagcactccagctttgcatcctacagccttccaaagtctctcctgagagtgccaaggggactcccctctttatgcttctcaaagacccttacatcctggtggctgcaggtctagctttcttgcctgccagtgtgtcctacctcattggcaccaacctctttggtgtgttggccaacaagatgggtcggtggctgtgttccctaatcgggatgctggtagtaggtaccagcttgctctgtgttcctctggctcacaatatttttggtctcattggccccaatgcagggcttggccttgccataggcatggtggattcttctatgatgcccatcatggggcacctggtggatctacgccacacctcggtgtatgggagtgtctacgccatcgctgatgtggctttttgcatgggctttgctataggtccatccaccggtggtgccattgtaaaggccatcggttttccctggctcatggtcatcactggggtcatcaacatcgtctatgctccactctgctactacctgcggagccccccggcaaaggaagagaagcttgctattctgagtcaggactgccccatggagacccggatgtatgcaacccagaagcccacgaaggaatttcctctgggggaggacagtgatgaggagcctgaccatgaggagtagcagcagaaggtgctccttgaattcatgatgcctcagtgaccacctctttccctgggaccagatcaccatggctgagcccacggctcagtgggcttcacatacctctgcctgggaatcttctttcctcccctcccatggacactgtccctgatactcttctcacctgtgtaacttgtagctcttcctctatgccttggtgccgcagtggcccatcttttatgggaagacagagtgatgcaccttcccgctgctgtgaggttgattaaacttgagctgtgacgggttctgcaaggggtgactcattgcatagaggtggtagtgagtaatgtgcccctgaaaccagtggggtgactgacaagcctctttaatctgttgcctgattttctctggcatagtcccaacagatcggaagagtgttaccctcttttcctcaacgtgttctttcccgggttttcccagccgagttgagaaaatgttctcagcattgtcttgctgccaaatgccagcttgaagagttttgttttgttttttttcatttatttttttttttaataaagtgagtgatttttctgtggctaaatctagagctgctaaaagggctttaccctcagtgaaaagtgtcttctattttcattatctttcagaaacaggagcccatttctcttctgctggagttattgacattctcctgacctcccctgtgtgttcctaccttttctgaacctcttagactcttagaaataaaagtagaagaaagacagaaaaaataactgattagacccaagatttcatgggaagaagttaaaagaaactgccttgaaatccctcctgattgtagatttcctaacaggaggggtgtaatgtgacattgttcatacttgctaataaatacattattgcctaattca

SEQ ID NO: 28641 - DNA, 2753 bp, Homo sapiens
  source 1..2753: mol_type = unassigned DNA
cacacacacacatacacagaatcctcagataacaggaggcaataaatccaacagcacatccacgttcagagaacagtgtccctgctgtcttgctaacagctgccaatacctcactgagtgcctcacaccaacatgggctccaagtgagtttccttcgtctgggcagactccctcccctcttccataaaggctgcaggagacctgtagctgtcacaggaccttccctaagagcccgcaggggaagactgccccagtccggccatcaccatgctccggaccattctggatgctccccagcggttgctgaaggaggggagagcgtcccggcagctggtgctggtggtggtattcgtcgctttgctcctggacaacatgctgtttactgtggtggtgccaattgtgcccaccttcctatatgacatggagttcaaagaagtcaactcttctctgcacctcggccatgccggaagttccccacatgccctcgcctctcctgccttttccaccatcttctccttcttcaacaacaacaccgtggctgttgaagaaagcgtacctagtggaatagcatggatgaatgacactgccagcaccatcccacctccagccactgaagccatctcagctcataaaaacaactgcttgcaaggcacaggtttcttggaggaagagattacccgggtcggggttctgtttgcttcaaaggctgtgatgcaacttctggtcaacccattcgtgggccctctcaccaacaggattggatatcatatccccatgtttgctggctttgttatcatgtttctctccacagttatgtttgctttttctgggacctatactctactctttgtggcccgaacccttcaaggcattggatcttcattttcatctgttgcaggtcttggaatgctggccagtgtctacactgatgaccatgagagaggacgagccatgggaactgctctggggggcctggccttggggttgctggtgggagctccctttggaagtgtaatgtacgagtttgttgggaagtctgcacccttcctcatcctggccttcctggcactactggatggagcactccagctttgcatcctacagccttccaaagtctctcctgagagtgccaaggggactcccctctttatgcttctcaaagacccttacatcctggtggctgcagggtccatctgctttgccaacatgggggtggccatcctggagcccacactgcccatctggatgatgcagaccatgtgctcccccaagtggcagctgggtctagctttcttgcctgccagtgtgtcctacctcattggcaccaacctctttggtgtgttggccaacaagatgggtcggtggctgtgttccctaatcgggatgctggtagtaggtaccagcttgctctgtgttcctctggctcacaatatttttggtctcattggccccaatgcagggcttggccttgccataggcatggtggattcttctatgatgcccatcatggggcacctggtggatctacgccacacctcggtgtatgggagtgtctacgccatcgctgatgtggctttttgcatgggctttgctataggtccatccaccggtggtgccattgtaaaggccatcggttttccctggctcatggtcatcactggggtcatcaacatcgtctatgctccactctgctactacctgcggagccccccggcaaaggaagagaagcttgctattctgagtcaggactgccccatggagacccggatgtatgcaacccagaagcccacgaaggaatttcctctgggggaggacagtgatgaggagcctgaccatgaggagtagcagcagaaggtgctccttgaattcatgatgcctcagtgaccacctctttccctgggaccagatcaccatggctgagcccacggctcagtgggcttcacatacctctgcctgggaatcttctttcctcccctcccatggacactgtccctgatactcttctcacctgtgtaacttgtagctcttcctctatgccttggtgccgcagtggcccatcttttatgggaagacagagtgatgcaccttcccgctgctgtgaggttgattaaacttgagctgtgacgggttctgcaaggggtgactcattgcatagaggtggtagtgagtaatgtgcccctgaaaccagtggggtgactgacaagcctctttaatctgttgcctgattttctctggcatagtcccaacagatcggaagagtgttaccctcttttcctcaacgtgttctttcccgggttttcccagccgagttgagaaaatgttctcagcattgtcttgctgccaaatgccagcttgaagagttttgttttgttttttttcatttatttttttttttaataaagtgagtgatttttctgtggctaaatctagagctgctaaaagggctttaccctcagtgaaaagtgtcttctattttcattatctttcagaaacaggagcccatttctcttctgctggagttattgacattctcctgacctcccctgtgtgttcctaccttttctgaacctcttagactcttagaaataaaagtagaagaaagacagaaaaaataactgattagacccaagatttcatgggaagaagttaaaagaaactgccttgaaatccctcctgattgtagatttcctaacaggaggggtgtaatgtgacattgttcatacttgctaataaatacattattgcctaattca

SEQ ID NO: 28642 - DNA, 2822 bp, Homo sapiens
  source 1..2822: mol_type = unassigned DNA
cacacacacacatacacagaatcctcagataacaggaggcaataaatccaacagcacatccacgttcagagaacagtgtccctgctgtcttgctaacagctgccaatacctcactgagtgcctcacaccaacatgggctccaagatgaaggcatctttctgatcaggggtttgtagctcaaacaaaagaatgagcgtgcttctagaaccacagagcaagggaacatggtagaggataagctggcaagttgaaaagcgtgggatttcatcccagtttgacactaactgtgcaaccccaaacaaatctcctaaccttcagaggctcggatttcttgtctatgagatgaagtgagtttccttcgtctgggcagactccctcccctcttccataaaggctgcaggagacctgtagctgtcacaggaccttccctaagagcccgcaggggaagactgccccagtccggccatcaccatgctccggaccattctggatgctccccagcggttgctgaaggaggggagagcgtcccggcagctggtgctggtggtggtattcgtcgctttgctcctggacaacatgctgtttactgtggtggtgccaattgtgcccaccttcctatatgacatggagttcaaagaagtcaactcttctctgcacctcggccatgccggaagttccccacatgccctcgcctctcctgccttttccaccatcttctccttcttcaacaacaacaccgtggctgttgaagaaagcgtacctagtggaatagcatggatgaatgacactgccagcaccatcccacctccagccactgaagccatctcagctcataaaaacaactgcttgcaaggcacaggtttcttggaggaagagattacccgggtcggggttctgtttgcttcaaaggctgtgatgcaacttctggtcaacccattcgtgggccctctcaccaacaggattggatatcatatccccatgtttgctggctttgttatcatgtttctctccacagttatgtttgctttttctgggacctatactctactctttgtggcccgaacccttcaaggcattggatcttcattttcatctgttgcaggtcttggaatgctggccagtgtctacactgatgaccatgagagaggacgagccatgggaactgctctggggggcctggccttggggttgctggtgggagctccctttggaagtgtaatgtacgagtttgttgggaagtctgcacccttcctcatcctggccttcctggcactactggatggagcactccagctttgcatcctacagccttccaaagtctctcctgagagtgccaaggggactcccctctttatgcttctcaaagacccttacatcctggtggctgcagggtccatctgctttgccaacatgggggtggccatcctggagcccacactgcccatctggatgatgcagaccatgtgctcccccaagtggcagctgggtctagctttcttgcctgccagtgtgtcctacctcattggcaccaacctctttggtgtgttggccaacaagatgggtcggtggctgtgttccctaatcgggatgctggtagtaggtaccagcttgctctgtgttcctctggctcacaatatttttggtctcattggccccaatgcagggcttggccttgccataggcatggtggattcttctatgatgcccatcatggggcacctggtggatctacgccacacctcggtgtatgggagtgtctacgccatcgctgatgtggctttttgcatgggctttgctataggctattctgagtcaggactgccccatggagacccggatgtatgcaacccagaagcccacgaaggaatttcctctgggggaggacagtgatgaggagcctgaccatgaggagtagcagcagaaggtgctccttgaattcatgatgcctcagtgaccacctctttccctgggaccagatcaccatggctgagcccacggctcagtgggcttcacatacctctgcctgggaatcttctttcctcccctcccatggacactgtccctgatactcttctcacctgtgtaacttgtagctcttcctctatgccttggtgccgcagtggcccatcttttatgggaagacagagtgatgcaccttcccgctgctgtgaggttgattaaacttgagctgtgacgggttctgcaaggggtgactcattgcatagaggtggtagtgagtaatgtgcccctgaaaccagtggggtgactgacaagcctctttaatctgttgcctgattttctctggcatagtcccaacagatcggaagagtgttaccctcttttcctcaacgtgttctttcccgggttttcccagccgagttgagaaaatgttctcagcattgtcttgctgccaaatgccagcttgaagagttttgttttgttttttttcatttatttttttttttaataaagtgagtgatttttctgtggctaaatctagagctgctaaaagggctttaccctcagtgaaaagtgtcttctattttcattatctttcagaaacaggagcccatttctcttctgctggagttattgacattctcctgacctcccctgtgtgttcctaccttttctgaacctcttagactcttagaaataaaagtagaagaaagacagaaaaaataactgattagacccaagatttcatgggaagaagttaaaagaaactgccttgaaatccctcctgattgtagatttcctaacaggaggggtgtaatgtgacattgttcatacttgctaataaatacattattgcctaattc

SEQ ID NO: 28643 - DNA, 2956 bp, Homo sapiens
  source 1..2956: mol_type = unassigned DNA
cacacacacacatacacagaatcctcagataacaggaggcaataaatccaacagcacatccacgttcagagaacagtgtccctgctgtcttgctaacagctgccaatacctcactgagtgcctcacaccaacatgggctccaagatgaaggcatctttctgatcaggggtttgtagctcaaacaaaagaatgagcgtgcttctagaaccacagagcaagggaacatggtagaggataagctggcaagttgaaaagcgtgggatttcatcccagtttgacactaactgtgcaaccccaaacaaatctcctaaccttcagaggctcggatttcttgtctatgagatgaagtgagtttccttcgtctgggcagactccctcccctcttccataaaggctgcaggagacctgtagctgtcacaggaccttccctaagagcccgcaggggaagactgccccagtccggccatcaccatgctccggaccattctggatgctccccagcggttgctgaaggaggggagagcgtcccggcagctggtgctggtggtggtattcgtcgctttgctcctggacaacatgctgtttactgtggtggtgccaattgtgcccaccttcctatatgacatggagttcaaagaagtcaactcttctctgcacctcggccatgccggaagttccccacatgccctcgcctctcctgccttttccaccatcttctccttcttcaacaacaacaccgtggctgttgaagaaagcgtacctagtggaatagcatggatgaatgacactgccagcaccatcccacctccagccactgaagccatctcagctcataaaaacaactgcttgcaaggcacaggtttcttggaggaagagattacccgggtcggggttctgtttgcttcaaaggctgtgatgcaacttctggtcaacccattcgtgggccctctcaccaacaggattggatatcatatccccatgtttgctggctttgttatcatgtttctctccacagttatgtttgctttttctgggacctatactctactctttgtggcccgaacccttcaaggcattggatcttcattttcatctgttgcaggtcttggaatgctggccagtgtctacactgatgaccatgagagaggacgagccatgggaactgctctggggggcctggccttggggttgctggtgggagctccctttggaagtgtaatgtacgagtttgttgggaagtctgcacccttcctcatcctggccttcctggcactactggatggagcactccagctttgcatcctacagccttccaaagtctctcctgagagtgccaaggggactcccctctttatgcttctcaaagacccttacatcctggtggctgcagggtccatctgctttgccaacatgggggtggccatcctggagcccacactgcccatctggatgatgcagaccatgtgctcccccaagtggcagctgggtctagctttcttgcctgccagtgtgtcctacctcattggcaccaacctctttggtgtgttggccaacaagatgggtcggtggctgtgttccctaatcgggatgctggtagtaggtaccagcttgctctgtgttcctctggctcacaatatttttggtctcattggccccaatgcagggcttggccttgccataggcatggtggattcttctatgatgcccatcatggggcacctggtggatctacgccacacctcggtgtatgggagtgtctacgccatcgctgatgtggctttttgcatgggctttgctataggtccatccaccggtggtgccattgtaaaggccatcggttttccctggctcatggtcatcactggggtcatcaacatcgtctatgctccactctgctactacctgcggagccccccggcaaaggaagagaagcttgctattctgagtcaggactgccccatggagacccggatgtatgcaacccagaagcccacgaaggaatttcctctgggggaggacagtgatgaggagcctgaccatgaggagtagcagcagaaggtgctccttgaattcatgatgcctcagtgaccacctctttccctgggaccagatcaccatggctgagcccacggctcagtgggcttcacatacctctgcctgggaatcttctttcctcccctcccatggacactgtccctgatactcttctcacctgtgtaacttgtagctcttcctctatgccttggtgccgcagtggcccatcttttatgggaagacagagtgatgcaccttcccgctgctgtgaggttgattaaacttgagctgtgacgggttctgcaaggggtgactcattgcatagaggtggtagtgagtaatgtgcccctgaaaccagtggggtgactgacaagcctctttaatctgttgcctgattttctctggcatagtcccaacagatcggaagagtgttaccctcttttcctcaacgtgttctttcccgggttttcccagccgagttgagaaaatgttctcagcattgtcttgctgccaaatgccagcttgaagagttttgttttgttttttttcatttatttttttttttaataaagtgagtgatttttctgtggctaaatctagagctgctaaaagggctttaccctcagtgaaaagtgtcttctattttcattatctttcagaaacaggagcccatttctcttctgctggagttattgacattctcctgacctcccctgtgtgttcctaccttttctgaacctcttagactcttagaaataaaagtagaagaaagacagaaaaaataactgattagacccaagatttcatgggaagaagttaaaagaaactgccttgaaatccctcctgattgtagatttcctaacaggaggggtgtaatgtgacattgttcatacttgctaataaatacattattgcctaattc

SEQ ID NO: 28644 - DNA, 2770 bp, Homo sapiens
  source 1..2770: mol_type = unassigned DNA
ctgctgtcttgctaacagctgccaatacctcactgagtgcctcacaccaacatgggctccaagtgagtttccttcgtctgggcagactccctcccctcttccataaaggctgcaggagacctgtagctgtcacaggaccttccctaagagcccgcaggggaagactgccccagtccggccatcaccatgctccggaccattctggatgctccccagcggttgctgaaggaggggagagcgtcccggcagctggtgctggtggtggtattcgtcgctttgctcctggacaacatgctgtttactgtggtggtgccaattgtgcccaccttcctatatgacatggagttcaaagaagtcaactcttctctgcacctcggccatgccggaagttccccacatgccctcgcctctcctgccttttccaccatcttctccttcttcaacaacaacaccgtggctgttgaagaaagcgtacctagtggaatagcatggatgaatgacactgccagcaccatcccacctccagccactgaagccatctcagctcataaaaacaactgcttgcaaggcacaggtttcttggaggaagagattacccgggtcggggttctgtttgcttcaaaggctgtgatgcaacttctggtcaacccattcgtgggccctctcaccaacaggattggatatcatatccccatgtttgctggctttgttatcatgtttctctccacagttatgtttgctttttctgggacctatactctactctttgtggcccgaacccttcaaggcattggatcttcattttcatctgttgcaggtcttggaatgctggccagtgtctacactgatgaccatgagagaggacgagccatgggaactgctctggggggcctggccttggggttgctggtgggagctccctttggaagtgtaatgtacgagtttgttgggaagtctgcacccttcctcatcctggccttcctggcactactggatggagcactccagctttgcatcctacagccttccaaagtctctcctgagagtgccaaggggactcccctctttatgcttctcaaagacccttacatcctggtggctgcagggtccatctgctttgccaacatgggggtggccatcctggagcccacactgcccatctggatgatgcagaccatgtgctcccccaagtggcagctgggtctagctttcttgcctgccagtgtgtcctacctcattggcaccaacctctttggtgtgttggccaacaagatgggtcggtggctgtgttccctaatcgggatgctggtagtaggtaccagcttgctctgtctaccaagttagaagtctaaatgaaacctttcagtgatgtccataatggaaaacagaggcaactttattccatgaagaatgagaccaggagtgtatgtttaggttcctctggctcacaatatttttggtctcattggccccaatgcagggcttggccttgccataggcatggtggattcttctatgatgcccatcatggggcacctggtggatctacgccacacctcggtgtatgggagtgtctacgccatcgctgatgtggctttttgcatgggctttgctataggtccatccaccggtggtgccattgtaaaggccatcggttttccctggctcatggtcatcactggggtcatcaacatcgtctatgctccactctgctactacctgcggagccccccggcaaaggaagagaagcttgctattctgagtcaggactgccccatggagacccggatgtatgcaacccagaagcccacgaaggaatttcctctgggggaggacagtgatgaggagcctgaccatgaggagtagcagcagaaggtgctccttgaattcatgatgcctcagtgaccacctctttccctgggaccagatcaccatggctgagcccacggctcagtgggcttcacatacctctgcctgggaatcttctttcctcccctcccatggacactgtccctgatactcttctcacctgtgtaacttgtagctcttcctctatgccttggtgccgcagtggcccatcttttatgggaagacagagtgatgcaccttcccgctgctgtgaggttgattaaacttgagctgtgacgggttctgcaaggggtgactcattgcatagaggtggtagtgagtaatgtgcccctgaaaccagtggggtgactgacaagcctctttaatctgttgcctgattttctctggcatagtcccaacagatcggaagagtgttaccctcttttcctcaacgtgttctttcccgggttttcccagccgagttgagaaaatgttctcagcattgtcttgctgccaaatgccagcttgaagagttttgttttgttttttttcatttatttttttttttaataaagtgagtgatttttctgtggctaaatctagagctgctaaaagggctttaccctcagtgaaaagtgtcttctattttcattatctttcagaaacaggagcccatttctcttctgctggagttattgacattctcctgacctcccctgtgtgttcctaccttttctgaacctcttagactcttagaaataaaagtagaagaaagacagaaaaaataactgattagacccaagatttcatgggaagaagttaaaagaaactgccttgaaatccctcctgattgtagatttcctaacaggaggggtgtaatgtgacattgttcatacttgctaataaatacattattgcctaa

SEQ ID NO: 28645 - DNA, 1980 bp, Homo sapiens
  source 1..1980: mol_type = unassigned DNA
ggaggcaataaatccaacagcacatccacgttcagagaacagtgtccctgctgtcttgctaacagctgccaatacctcactgagtgcctcacaccaacatgggctccaagtgagtttccttcgtctgggcagactccctcccctcttccataaaggctgcaggagacctgtagctgtcacaggaccttccctaagagcccgcaggggaagactgccccagtccggccatcaccatgctccggaccattctggatgctccccagcggttgctgaaggaggggagagcgtcccggcagctggtgctggtggtggtattcgtcgctttgctcctggacaacatgctgtttactgtggtggtgccaattgtgcccaccttcctatatgacatggagttcaaagaagtcaactcttctctgcacctcggccatgccggaagttccccacatgccctcgcctctcctgccttttccaccatcttctccttcttcaacaacaacaccgtggctgttgaagaaagcgtacctagtggaatagcatggatgaatgacactgccagcaccatcccacctccagccactgaagccatctcagctcataaaaacaactgcttgcaaggcacaggtttcttggaggaagagattacccgggtcggggttctgtttgcttcaaaggctgtgatgcaacttctggtcaacccattcgtgggccctctcaccaacaggattggatatcatatccccatgtttgctggctttgttatcatgtttctctccacagttatgtttgctttttctgggacctatactctactctttgtggcccgaacccttcaaggcattggatcttcattttcatctgttgcaggtcttggaatgctggccagtgtctacactgatgaccatgagagaggacgagccatgggaactgctctggggggcctggccttggggttgctggtgggagctccctttggaagtgtaatgtacgagtttgttgggaagtctgcacccttcctcatcctggccttcctggcactactggatggagcactccagctttgcatcctacagccttccaaagtctctcctgagagtgccaaggggactcccctctttatgcttctcaaagacccttacatcctggtggctgcaggtctagctttcttgcctgccagtgtgtcctacctcattggcaccaacctctttggtgtgttggccaacaagatgggtcggtggctgtgttccctaatcgggatgctggtagtaggtaccagcttgctctgtgttcctctggctcacaatatttttggtctcattggccccaatgcagggcttggccttgccataggcatggtggattcttctatgatgcccatcatggggcacctggtggatctacgccacacctcggtgtatgggagtgtctacgccatcgctgatgtggctttttgcatgggctttgctataggtccatccaccggtggtgccattgtaaaggccatcggttttccctggctcatggtcatcactggggtcatcaacatcgtctatgctccactctgctactacctgcggagccccccggcaaaggaagagaagcttgctattctgagtcaggactgccccatggagacccggatgtatgcaacccagaagcccacgaaggaatttcctctgggggaggacagtgatgaggagcctgaccatgaggagtagcagcagaaggtgctccttgaattcatgatgcctcagtgaccacctctttccctgggaccagatcaccatggctgagcccacggctcagtgggcttcacatacctctgcctgggaatcttctttcctcccctcccatggacactgtccctgatactcttctcacctgtgtaacttgtagctcttcctctatgccttggtgccgcagtggcccatcttttatgggaagacagagtgatgcaccttcccgctgctgtgaggttgatta

SEQ ID NO: 28646 - DNA, 3852 bp, Homo sapiens
  source 1..3852: mol_type = unassigned DNA
gagcggcggcggcggggcgctggggcggagactgcgacccggagccgcccggactgacggagcccactgcggtgcgggcgttggcgcgggcacggaggacccgggcaggcatcgcaagcgaccccgagcggagccccggagccatggccctgagcgagctggcgctggtccgctggctgcaggagagccgccgctcgcggaagctcatcctgttcatcgtgttcctggcgctgctgctggacaacatgctgctcactgtcgtggtccccatcatcccaagttatctgtacagcattaagcatgagaagaatgctacagaaatccagacggccaggccagtgcacactgcctccatctcagacagcttccagagcatcttctcctattatgataactcgactatggtcaccgggaatgctaccagagacctgacacttcatcagaccgccacacagcacatggtgaccaacgcgtccgctgttccttccgactgtcccagtgaagacaaagacctcctgaatgaaaacgtgcaagttggtctgttgtttgcctcgaaagccaccgtccagctcatcaccaaccctttcataggactactgaccaacagaattggctatccaattcccatatttgcgggattctgcatcatgtttgtctcaacaattatgtttgccttctccagcagctatgccttcctgctgattgccaggtcgctgcagggcatcggctcgtcctgctcctctgtggctgggatgggcatgcttgccagtgtctacacagatgatgaagagagaggcaacgtcatgggaatcgccttgggaggcctggccatgggggtcttagtgggcccccccttcgggagtgtgctctatgagtttgtggggaagacggctccgttcctggtgctggccgccctggtactcttggatggagctattcagctctttgtgctccagccgtcccgggtgcagccagagagtcagaaggggacacccctaaccacgctgctgaaggacccgtacatcctcattgctgcaggctccatctgctttgcaaacatgggcatcgccatgctggagccagccctgcccatctggatgatggagaccatgtgttcccgaaagtggcagctgggcgttgccttcttgccagctagtatctcttatctcattggaaccaatatttttgggatacttgcacacaaaatggggaggtggctttgtgctcttctgggaatgataattgttggagtcagcattttatgtattccatttgcaaaaaacatttatggactcatagctccgaactttggagttggttttgcaattggaatggtggattcgtcaatgatgcctatcatgggctacctcgtagacctgcggcacgtgtccgtctatgggagtgtgtacgccattgcggatgtggcattttgtatggggtatgctataggtccttctgctggtggtgctattgcaaaggcaattggatttccatggctcatgacaattattgggataattgatattctttttgcccctctctgcttttttcttcgaagtccacctgccaaagaagaaaaaatggctattctcatggatcacaactgccctattaaaacaaaaatgtacactcagaataatatccagtcatatccgataggtgaagatgaagaatctgaaagtgactgagatgagatcctcaaaaatcatcaaagtgtttaattgtataaaacagtgtttccagtgacacaactcatccagaactgtcttagtcataccatccatccctggtgaaagagtaaaaccaaaggttattatttcctttccatggttatggtcgattgccaacagccttataaagaaaaagaagcttttctaggggtttgtataaatagtgttgaaactttattttatgtatttaattttattaaatatcatacaatatattttgatgaaataggtattgtgtaaatctataaatatttgaatccaaaccaaatataattttttaacttacattaacaaacatttgggcaaaaatcatattggtaatgagtgtttaaaattaaagcacacattatctctgagactcttccaacaaagagaaactagaatgaagtctgaaaaacagaatcaagtaagacagcatgttatatagtgacactgaatgttatttaacttgtagttactatcaatatatttatgcgttaaacagctagttctctcaagtgtagaggacaagaacttgtgtcagttatcttttgaatccataaatcttagctggcattagttttctatgtaatcacctacctagagagagttgtaaattatatgttaacatgttatctggttggcagcaaacactaaagccaataaaggaaaaacagtaaatgttccgaaagcagagaaaagcaaccaaacatattgttatgaactaaaagctttccctttaagatgcatacttgtcttactggatgaagaaaattgagggtacatgtaccttatactgtcaaggttgtttaaacatgataaggttaatcgccatctacttcaagttttagaaaaggaaacaagaagctgaaaacagctgctctgactttaatatctgactatatctttgatctgtttgcaggtcatccaagtgttttctaggaatatatttattttaggttgtctgaaactactattttttagactcctgaaagttgttcacatcaatgtgaagacaaattttaaatgaaaatgaagaatgaaattatgtcttgaatcatatattaagaagtaaaaataatagtgatcaggcagaaaagaaaaatggaacatctaaaaatgtatgtgctaactatatcatccagtgtgcagtgttgtgtatttttctaagcatgacaacattgatgtgccttttcagtgtaacagcaaatactgttagtgaacattgtcaatttatgtcattttgttaagagatatgactggagtgtgcagtgtggaatgtctctaatactacttgtgaatcctgcagttctataatcataaacaaaaattacttagtttcgttaagctaagattgtgtttgtgttaacttcgacatcaaggagcaaagaactttagaacagactcctcaatcttgtgactttcttattctctaggaaagtaacacttcgtttcatgaagcttttctgtggggcttcgattatttcaagtctggtttctaagtgcagtgtgtttgaagcaaacgaacttccaactcacttatttggcattgggcaacttggccaagtctgccactttggaagatggctctggaggaaactctcatatggctaaaaaggcaggctagtttcttacttctacaggggtagagccttaaaaaagaacgtgctacaaattggttctctttgagggtttctggttctccctgcccccaataccatatactttattgcaattttatttttgcctttacggctctgtgtctttctgcaagaaggcctggcaaaggtatgcctgctgttggtccctcgggataagataaaatataaataaaaccttcagaactgttttggagcaaaagatagcttgtacttggggaaaaaaattctaagttcttttatatgactaatattcttggttagcaagactggaaagaggtgtttttttaaaatgtacataccagaacaaagaacatacagctctctgaacatttattttttgaacagaggtggtttttatgtttggacctggtaatacagatacaaaaactttaatgaggtagcaatgaatattcaactgtttgactgctaagtgtatctgtccatattttagcaagtttacttaataaatcttctgaaccatg

SEQ ID NO: 28647 - DNA, 3671 bp, Homo sapiens
  source 1..3671: mol_type = unassigned DNA
ggcagagggtgggccttaggacgggtctcccttaaactgggcgatcaggcagcgaccctagaggcgtctgtagggtaaagctgggggttctgtagccggaggcggcggcgagtccagaacgtcctggccttacagggagaaggcgtcactcgcggttacaagtgcctgaccctcactccagttggcggaggaggagaaggaaggggccgggccgggtcccctcccctcgcgccccggatggatgtgcccggcccggtgtctcggcgggcggcggcggcggcggccactgtgctcctgcggaccgctcgggtccgtcgcgaatgctggttcttgccgaccgcgctgctctgcgcctacggcttcttcgccagcctcaggccgtccgagcccttcctgaccccgtacctgctggggccggacaagaacctgaccgagagggaggtcttcaatgaaatttatccagtatggacttactcttacctggtgctactgtttcctgtgttccttgccacagactacctccgttataaacctgttgttctactgcaggggctcagccttattgttacatggtttatgctgctctatgcccagggactgctggccattcaatttctagaatttttttatggcatcgccacagccactgaaattgcctattactcttatatctacagtgtggtggacctgggcatgtaccagaaagtcacaagttactgtcgaagtgccactttggtgggctttacagtgggctctgtcctagggcaaatccttgtctcagtggcaggctggtcgctgttcagcctgaatgtcatctctcttacctgtgtttcagtggcttttgctgtggcctggtttttacctatgccacagaagagcctcttctttcaccacattccttctacctgccagagagtgaatggcatcaaggtacaaaatggtggcattgttactgacaccccagcttctaaccaccttcctggctgggaggacattgagtcaaaaatccctctaaatatggaggagcctcccgtggaggaaccggaacccaagccagaccgtctccttgtattgaaagtactatggaatgatttcctgatgtgctactcctctcgccctcttctctgctggtctgtgtggtgggccctctctacctgtggctattttcaagttgtgaactacacacagggcctgtgggagaaagtgatgccttctcgctatgctgctatctataatggtggcgtggaggccgtttcaaccttactgggtgctgttgctgtgtttgcagttggttatataaaaatatcctggtcaacttggggagaaatgacattatctctcttttctctcctgattgctgctgcagtgtatatcatggacactgtgggtaacatttgggtgtgctatgcatcctatgttgtcttcagaatcatctacatgttactcatcacgatagcaacttttcaaattgctgcaaacctcagcatggaacgctatgccctagtatttggtgtaaataccttcattgccctggcactgcagacgctgctcactctaattgtggtagatgccagtggccttggattagaaattaccactcagtttttgatctatgccagttattttgcactcatcgctgtggttttcctggccagtggtgcagtcagtgttatgaagaaatgtagaaagctggaagatccacaatcaagttctcaagtaaccacttcataatatactgctgaagggcttcttcttatagcaagaactctgcacagcaactgcctggatgtgtttgattttttaaagcgtagacatatatttatgaatgtgcatttcttgacttcacagcagccacttgactaataccttgtgttccgggaataacatgatactattcagaggagccagaagtaaagtttatttcatggattatttatgagagctaatttaaggatgactttttttctgattcaaaagtgaacttgattttaaaaaccagtcaagagcaatcaaagcagcacatggtgttgtatacttcattagcaagtgagtttggtgttttataggtcacatatgtctgtatctacttagccagatgcttggcctggtgggaccagggctccacagaggccacaaaatgttgcaagtcatgatggatggaaatatgttctaacagcatctgcctctattcaatttaattcttatttctgtgttactcatgtacattggtctttctacatagttattctatcactggcaatatttgttctggtttagtgttctgtattttaaggtgtacgtatcatttctaattttaagttattttaaaaaaattcatcatatgaatgttcttggttcccattgtgacgattatttatttctgtaaaatttgtttagaagtacgtttttgcattattcatatgcttcccagagaagctcatttagttagaaaataaggcaagttttgaagcctgctaaatgaagagacttaagaaagcttaaggtacgcttgcttgtctttaaatcttcaatatgaaggactattaattccaagattaaaagttcatatataggctaaagatgtaactaggccatttgtatttgtattcccttttatttccaaaataaaatgaaaaatctttttttaataatttcatccctatttatagtttttatattaatttgtttttcttatccaagtaaagatgtcaataggaattgcattagtccaaggcctttttcataaactgagcctcttttcaattatttcaatgggacaggaactaggatagatgtgattcctgcatttttttaccttaaatctgcctttgtttctaaaggtagatcatcttgaatatttgcttaaaattgctagtgatttcattaccaagttacttgaaaaaatgttctatatgcatttaattctgaaatcagtctaccaaggggctgctagtatatgtcagacatgaaaactattttaaagctgactttgttgccttatcttgaaaagaatctagataggtgcttttaactggggtattaacttttttagaatgacacagctgaacagtgttaataatagtgtgtcaagattgcaaagtcgacatactcatttggtttaagcaggaatcctagaagcaaatggatggggataagaataggtcattttctattcaccatcctttactattaagggaaaggaaaagaacactagctaaggaagggaaagggaagtgatatcataaaagtagcaaccttcattttacattctgtctgtttttctttttttgctttgttttgtttgtgctaatttgggaattgtgtactccgaaacaagtagaaaagtgctgtttgagggattttattaaatctttttttaatggaatgtggtacaaattgttcatgttaccaaagcaatatttccctggaatttaattcaaagtttgtggcatacaacctgagccttttcttatataagacaagaatatgttcacatcttggtatgtggccatatttatagaatgctgaactcaatgtgcaagttgtactgtatgcagttttgtaaataagtgaaaataatttgttgtactttttattcaattctgtatagattataaaattatttttattaaataaatattttacagtatattttctctttttaatcaaaa

SEQ ID NO: 28648 - DNA, 3462 bp, Homo sapiens
  source 1..3462: mol_type = unassigned DNA
ccggaggcggcggcgagtccagaacgtcctggccttacagggagaaggcgtcactcgcggttacaagtgcctgaccctcactccagttggcggaggaggagaaggaaggggccgggccgggtcccctcccctcgcgccccggatggatgtgcccggcccggtgtctcggcgggcggcggcggcggcggccactgtgctcctgcggaccgctcgggtccgtcgcgaatgctggttcttgccgaccgcgctgctctgcgcctacggcttcttcgccagcctcaggccgtccgagcccttcctgaccccgtacctgctggggccggacaagaacctgaccgagagggaggtcttcaatgaaatttatccagtatggacttactcttacctggtgctactgtttcctgtgttccttgccacagactacctccgttataaacctgttgttctactgcaggggctcagccttattgttacatggtttatgctgctctatgcccagggactgctggccattcaatttctagaatttttttatggcatcgccacagccactgaaattgcctattactcttatatctacagtgtggtggacctgggcatgtaccagaaagtcacaagttactgtcgaagtgccactttggtgggctttacagtgggctctgtcctagggcaaatccttgtctcagtggcaggctggtcgctgttcagcctgaatgtcatctctcttacctgtgtttcagtggcttttgctgtggcctggtttttacctatgccacagaagagcctcttctttcaccacattccttctacctgccagagagtgaatggcatcaaggaacccaagccagaccgtctccttgtattgaaagtactatggaatgatttcctgatgtgctactcctctcgccctcttctctgctggtctgtgtggtgggccctctctacctgtggctattttcaagttgtgaactacacacagggcctgtgggagaaagtgatgccttctcgctatgctgctatctataatggtggcgtggaggccgtttcaaccttactgggtgctgttgctgtgtttgcagttggttatataaaaatatcctggtcaacttggggagaaatgacattatctctcttttctctcctgattgctgctgcagtgtatatcatggacactgtgggtaacatttgggtgtgctatgcatcctatgttgtcttcagaatcatctacatgttactcatcacgatagcaacttttcaaattgctgcaaacctcagcatggaacgctatgccctagtatttggtgtaaataccttcattgccctggcactgcagacgctgctcactctaattgtggtagatgccagtggccttggattagaaattaccactcagtttttgatctatgccagttattttgcactcatcgctgtggttttcctggccagtggtgcagtcagtgttatgaagaaatgtagaaagctggaagatccacaatcaagttctcaagtaaccacttcataatatactgctgaagggcttcttcttatagcaagaactctgcacagcaactgcctggatgtgtttgattttttaaagcgtagacatatatttatgaatgtgcatttcttgacttcacagcagccacttgactaataccttgtgttccgggaataacatgatactattcagaggagccagaagtaaagtttatttcatggattatttatgagagctaatttaaggatgactttttttctgattcaaaagtgaacttgattttaaaaaccagtcaagagcaatcaaagcagcacatggtgttgtatacttcattagcaagtgagtttggtgttttataggtcacatatgtctgtatctacttagccagatgcttggcctggtgggaccagggctccacagaggccacaaaatgttgcaagtcatgatggatggaaatatgttctaacagcatctgcctctattcaatttaattcttatttctgtgttactcatgtacattggtctttctacatagttattctatcactggcaatatttgttctggtttagtgttctgtattttaaggtgtacgtatcatttctaattttaagttattttaaaaaaattcatcatatgaatgttcttggttcccattgtgacgattatttatttctgtaaaatttgtttagaagtacgtttttgcattattcatatgcttcccagagaagctcatttagttagaaaataaggcaagttttgaagcctgctaaatgaagagacttaagaaagcttaaggtacgcttgcttgtctttaaatcttcaatatgaaggactattaattccaagattaaaagttcatatataggctaaagatgtaactaggccatttgtatttgtattcccttttatttccaaaataaaatgaaaaatctttttttaataatttcatccctatttatagtttttatattaatttgtttttcttatccaagtaaagatgtcaataggaattgcattagtccaaggcctttttcataaactgagcctcttttcaattatttcaatgggacaggaactaggatagatgtgattcctgcatttttttaccttaaatctgcctttgtttctaaaggtagatcatcttgaatatttgcttaaaattgctagtgatttcattaccaagttacttgaaaaaatgttctatatgcatttaattctgaaatcagtctaccaaggggctgctagtatatgtcagacatgaaaactattttaaagctgactttgttgccttatcttgaaaagaatctagataggtgcttttaactggggtattaacttttttagaatgacacagctgaacagtgttaataatagtgtgtcaagattgcaaagtcgacatactcatttggtttaagcaggaatcctagaagcaaatggatggggataagaataggtcattttctattcaccatcctttactattaagggaaaggaaaagaacactagctaaggaagggaaagggaagtgatatcataaaagtagcaaccttcattttacattctgtctgtttttctttttttgctttgttttgtttgtgctaatttgggaattgtgtactccgaaacaagtagaaaagtgctgtttgagggattttattaaatctttttttaatggaatgtggtacaaattgttcatgttaccaaagcaatatttccctggaatttaattcaaagtttgtggcatacaacctgagccttttcttatataagacaagaatatgttcacatcttggtatgtggccatatttatagaatgctgaactcaatgtgcaagttgtactgtatgcagttttgtaaataagtgaaaataatttgttgtactttttattcaattctgtatagattataaaattatttttattaaataaatattttacagtatattttctctttttaatcaaaa

SEQ ID NO: 28649 - DNA, 3068 bp, Homo sapiens
  source 1..3068: mol_type = unassigned DNA
ggcagagggtgggccttaggacgggtctcccttaaactgggcgatcaggcagcgaccctagaggcgtctgtagggtaaagctgggggttctgtagccggaggcggcggcgagtccagaacgtcctggccttacagggagaaggcgtcactcgcggttacaagtgcctgaccctcactccagttggcggaggaggagaaggaaggggccgggccgggtcccctcccctcgcgccccggatggatgtgcccggcccggtgtctcggcgggcggcggcggcggcggccactgtgctcctgcggaccgctcgggtccgtcgcgaatgctggttcttgccgaccgcgctgctctgcgcctacggcttcttcgccagcctcaggccgtccgagcccttcctgaccccgtacctgctggggccggacaagaacctgaccgagagggaggaacccaagccagaccgtctccttgtattgaaagtactatggaatgatttcctgatgtgctactcctctcgccctcttctctgctggtctgtgtggtgggccctctctacctgtggctattttcaagttgtgaactacacacagggcctgtgggagaaagtgatgccttctcgctatgctgctatctataatggtggcgtggaggccgtttcaaccttactgggtgctgttgctgtgtttgcagttggttatataaaaatatcctggtcaacttggggagaaatgacattatctctcttttctctcctgattgctgctgcagtgtatatcatggacactgtgggtaacatttgggtgtgctatgcatcctatgttgtcttcagaatcatctacatgttactcatcacgatagcaacttttcaaattgctgcaaacctcagcatggaacgctatgccctagtatttggtgtaaataccttcattgccctggcactgcagacgctgctcactctaattgtggtagatgccagtggccttggattagaaattaccactcagtttttgatctatgccagttattttgcactcatcgctgtggttttcctggccagtggtgcagtcagtgttatgaagaaatgtagaaagctggaagatccacaatcaagttctcaagtaaccacttcataatatactgctgaagggcttcttcttatagcaagaactctgcacagcaactgcctggatgtgtttgattttttaaagcgtagacatatatttatgaatgtgcatttcttgacttcacagcagccacttgactaataccttgtgttccgggaataacatgatactattcagaggagccagaagtaaagtttatttcatggattatttatgagagctaatttaaggatgactttttttctgattcaaaagtgaacttgattttaaaaaccagtcaagagcaatcaaagcagcacatggtgttgtatacttcattagcaagtgagtttggtgttttataggtcacatatgtctgtatctacttagccagatgcttggcctggtgggaccagggctccacagaggccacaaaatgttgcaagtcatgatggatggaaatatgttctaacagcatctgcctctattcaatttaattcttatttctgtgttactcatgtacattggtctttctacatagttattctatcactggcaatatttgttctggtttagtgttctgtattttaaggtgtacgtatcatttctaattttaagttattttaaaaaaattcatcatatgaatgttcttggttcccattgtgacgattatttatttctgtaaaatttgtttagaagtacgtttttgcattattcatatgcttcccagagaagctcatttagttagaaaataaggcaagttttgaagcctgctaaatgaagagacttaagaaagcttaaggtacgcttgcttgtctttaaatcttcaatatgaaggactattaattccaagattaaaagttcatatataggctaaagatgtaactaggccatttgtatttgtattcccttttatttccaaaataaaatgaaaaatctttttttaataatttcatccctatttatagtttttatattaatttgtttttcttatccaagtaaagatgtcaataggaattgcattagtccaaggcctttttcataaactgagcctcttttcaattatttcaatgggacaggaactaggatagatgtgattcctgcatttttttaccttaaatctgcctttgtttctaaaggtagatcatcttgaatatttgcttaaaattgctagtgatttcattaccaagttacttgaaaaaatgttctatatgcatttaattctgaaatcagtctaccaaggggctgctagtatatgtcagacatgaaaactattttaaagctgactttgttgccttatcttgaaaagaatctagataggtgcttttaactggggtattaacttttttagaatgacacagctgaacagtgttaataatagtgtgtcaagattgcaaagtcgacatactcatttggtttaagcaggaatcctagaagcaaatggatggggataagaataggtcattttctattcaccatcctttactattaagggaaaggaaaagaacactagctaaggaagggaaagggaagtgatatcataaaagtagcaaccttcattttacattctgtctgtttttctttttttgctttgttttgtttgtgctaatttgggaattgtgtactccgaaacaagtagaaaagtgctgtttgagggattttattaaatctttttttaatggaatgtggtacaaattgttcatgttaccaaagcaatatttccctggaatttaattcaaagtttgtggcatacaacctgagccttttcttatataagacaagaatatgttcacatcttggtatgtggccatatttatagaatgctgaactcaatgtgcaagttgtactgtatgcagttttgtaaataagtgaaaataatttgttgtactttttattcaattctgtatagattataaaattatttttattaaataaatattttacagtatattttctctttttaatcaaaa

SEQ ID NO: 28650 - DNA, 3105 bp, Homo sapiens
  source 1..3105: mol_type = unassigned DNA
atccgacagccgcgggtgcgtggtcgtgcggcaagtgagcgatttggtgaacagacactcccttctgtagccatggattgttacagaacttcactaagcagttcctggatttaccccactgtgatcctctgcttatttggttttttctccatgatgagaccctcagaaccattccttatcccatatttatctggaccagataaaaacctgaccagtgcagagataacaaatgagatcttccccgtttggacatactcctacctggtgctgctgctgcctgtgtttgtcctcaccgattatgtccgctacaagccagtcatcatcttgcaaggtatcagtttcatcattacctggctgctgctgttgtttggccaaggagtgaagaccatgcaggttgtagagttcttctatgggatggtcaccgccgccgaggtggcctactacgcctacatatacagcgtggtcagccccgagcactaccagagagtgagcggctactgcaggagcgtcacgctggccgcctacacagcagggtcggtgctggctcaactcttggtatccctggcgaacatgtcgtacttttacctcaacgtcatatccttggcctctgtctccgtggctttccttttctcacttttcctaccaatgcccaagaaaagcatgttttttcatgcaaaacccagcagagaaataaagaagtcatcaagcgtgaatccagtattagaggaaactcacgaaggtgaagcaccaggctgtgaagagcagaaacccacatcagaaatactcagcacttcagggaagctgaataagggccagctgaacagcctgaaaccaagcaatgtgactgtggacgtttttgtgcagtggttccaagatttgaaggagtgctactcctcaaaacgtcttttctactggtctctatggtgggctttcgccacagcaggttttaaccaggttttgaactatgttcaaatcctgtgggattacaaggcgccatcccaagattcttccatctataatggggccgtagaagctattgcaacctttggaggggctgtggctgcctttgcagtgggttatgtgaaagtcaactgggaccttctgggagagctggctctggtggtcttctcagttgtcaatgccggttctttatttctcatgcattacacagccaatatctgggcgtgctatgctggctatttgatattcaagtccagctatatgcttcttataaccatagcagtatttcagattgcagttaatctgaatgtggaacgctatgccttggtatttggaatcaacacctttattgccttggtgattcagaccatcatgactgtgattgtagtagatcagagagggctcaacttgccagtcagcattcagtttttagtttatgggagctattttgcagtaattgctggaattttcctaatgagaagcatgtatattacctactcaaccaaatcccagaaggatgtacagagccctgctccaagtgagaatccagatgtgtctcacccagaggaagagagtaatatcatcatgtcaacaaaactctaacctcatcgcaacaaacgcaacagtggctttcaaagttatgcaataataaggaaagattttgagatgggtggcatatgttttgccataacttgacatgctttgcaaatctggattccaatggacctttcaaaaccacaacaaaacctcagttttagatgagttctctatgtgaccaattttactggatgcaattgacaggacccgtcatcataattaaacaacccatattggggaccccctgtgactagtagcagctggaaaattctggtttttatcacttgtaaagacatgcagatggcgtggaaccaaaccatgagaaaactccagccatcctggagttgatattcaccatttgtgaggagaaatactaactggactgaccctattgctaggcttaaatacttatttgatcttaccaaagaagtcaacacatgggacctttgtgtcacatgaaccattttctttcctcttctattaagtgtatttctgtttaagttacagttctctaagagaattacaatgtttgtcccatttctaagggcttctcttcaactctaataacagcattattcacgttatgatttgatagtattattatttaatttttttatgattattttccattttgtgctctgagttttgctgttgaaagtctccctcaagaatagcttcagatcctcttgtgtatttgcagaatacacaaggtcatttcccagtggcctgggagaggcagtgagccttctctccaccaccatagacaggtgttaatgcatctatgggccaggtgcagtggctcactcctgtaatccgagcaatttgggaggccaaggtgggagttttgcttgaggccagaggttcaagaccagcctgggcaacacagtgacacctgactctactaaaaaattaaaaaattagctgggcagcgtggtgtgtgcctgtagtctcagctacttgggaggccatggtgggaggatgggttgagcacaggagtcagaggctacagtgagctatgattgcaccattgcactccagcctgggcaacagagtaagactctcatccccctcctcccaaaaaagagcacctgtgtggtgtctgtctaaaataggaaaacttaaaggaggtttctagaagtattagaaataagaaaacactgatggggggagtggaataaaacacctgattttgttttgttttggtttttgagacagtctcgctctctcacccaggctggaatgcaatggcgtgatcttggctcactgcaaacttcacctcctgagttcaagccattctcctacctcagcctcccaagtagctgggactatgggtgcacaccaccacgcctggctaatttttgtatttttagtggagatggggtttcacaatgttggccaggctggtctcaaactcctgacttcaggtgatctgtctgcctcggcctcccaaagagctgagattacaggcgtgagccaccatgcctggccaaaacacctgatttttaaatggtagcaattgtgctaaataaaatgtgtaaaaattttaaa

SEQ ID NO: 28651 - DNA, 594 bp, Homo sapiens
  source 1..594: mol_type = unassigned DNA
gcgggtgcgtggtcgtgcggcaagtgagcgatttggtgaacagacactcccttctgtagtgacaaatgagatcctctattgggctttatgtctaaagcttgcatttcaagcaatttcctcactcgaggtcaggagttcaagaccagcctggccaacatggtgaaaccccatctctactaaaaatacaaaattatccagtcatggtggcaggcacctgtaatcccagctacttgggaggctgaggcaggagaatggcttgagcccgggaggcacaggttgcaatgggctgagatcatgccactgcacttcagcctggacaacagagcgaccctccatctcaaaaaaaaaaaaaaaatcaggttttcatcgcatcaaggatgctaaaaagaataagcatcacttaattttctctttgtttccatttgatcagccatggattgttacagaacttcactaagcagttcctggatttaccccactgtgatcctctgcttatttggttttttctccatgatgagaccctcagaaccattccttatcccatatttatctggaccagataaaaacctgaccagtgcagagataacaaatgag

SEQ ID NO: 28652 - DNA, 852 bp, Homo sapiens
  source 1..852: mol_type = unassigned DNA
aaatgatatctgtcttacagttattatgtagatttaaggagatagtatgcagaaaagcatcatacaacaaattagtttccttcctataaatgtatctcagagaacttagccacatgcaggaccatcaaaaatctataaacattacaataaggcaaagcttgagctaaaatgtggaggaattagtgaattttcctgtgcacatgataattcacatgagatagcaagatgttttcaaatatagctgccatacaatgattgttttttgttttttgtttcttctgtgcagtgacaaatgagatcctctattgggctttatgtctaaagcttgcatttcaagcaatttcctcactcgaggtcaggagttcaagaccagcctggccaacatggtgaaaccccatctctactaaaaatacaaaattatccagtcatggtggcaggcacctgtaatcccagctacttgggaggctgaggcaggagaatggcttgagcccgggaggcacaggttgcaatgggctgagatcatgccactgcacttcagcctggacaacagagcgaccctccatctcaaaaaaaaaaaaaaaatcaggttttcatcgcatcaaggatgctaaaaagaataagcatcacttaattttctctttgtttccatttgatcagccatggattgttacagaacttcactaagcagttcctggatttaccccactgtgatcctctgcttatttggttttttctccatgatgagaccctcagaaccattccttatcccatatttatctggaccagataaaaacctgaccagtgcagagataacaaatgagatcttccccgtttggacatactcctacctgg

SEQ ID NO: 28653 - DNA, 3517 bp, Homo sapiens
  source 1..3517: mol_type = unassigned DNA
ccgacagccgcgggtgcgtggtcgtgcggcaagtgagcgatttggtgaacagacactcccttctgtagccatggattgttacagaacttcactaagcagttcctggatttaccccactgtgatcctctgcttatttggttttttctccatgatgagaccctcagaaccattccttatcccatatttatctggaccagataaaaacctgaccagtgcagagataacaaatgagatcttccccgtttggacatactcctacctggtgctgctgctgcctgtgtttgtcctcaccgattatgtccgctacaagccagtcatcatcttgcaaggtatcagtttcatcattacctggctgctgctgttgtttggccaaggagtgaagaccatgcaggttgtagagttcttctatgggatggtcaccgccgccgaggtggcctactacgcctacatatacagcgtggtcagccccgagcactaccagagagtgagcggctactgcaggagcgtcacgctggccgcctacacagcagggtcggtgctggctcaactcttggtatccctggcgaacatgtcgtacttttacctcaacgtcatatccttggcctctgtctccgtggctttccttttctcacttttcctaccaatgcccaagaaaagcatgttttttcatgcaaaacccagcagagaaataaagaagtcatcaagcgtgaatccagtattagaggaaactcacgaaggtgaagcaccaggctgtgaagagcagaaacccacatcagaaatactcagcacttcagggaagctgaataagggccagctgaacagcctgaaaccaagcaatgtgactgtggacgtttttgtgcagtggttccaagatttgaaggagtgctactcctcaaaacgtcttttctactggtctctatggtgggctttcgccacagcaggttttaaccaggttttgaactatgttcaaatcctgtgggattacaaggcgccatcccaagattcttccatctataatggggccgtagaagctattgcaacctttggaggggctgtggctgcctttgcagtgggttatgtgaaagtcaactgggaccttctgggagagctggctctggtggtcttctcagttgtcaatgccggttctttatttctcatgcattacacagccaatatctgggcgtgctatgctggctatttgatattcaagtccagctatatgcttcttataaccatagcagtatttcagattgcagttaatctgaatgtggaacgctatgccttggtatttggaatcaacacctttattgccttggtgattcagaccatcatgactgtgattgtagtagatcagagagggctcaacttgccagtcagcattcagtttttagtttatgggagctattttgcagtaattgctggaattttcctaatgagaagcatgtatattacctactcaaccaaatcccagaaggatgtacagagccctgctccaagtgagaatccagatgtgtctcacccagaggaagagagtaatatcatcatgtcaacaaaactctaacctcatcgcaacaaacgcaacagtggctttcaaagttatgcaataataaggaaagattttgagatgggtggcatatgttttgccataacttgacatgctttgcaaatctggattccaatggacctttcaaaaccacaacaaaacctcagttttagatgagttctctatgtgaccaattttactggatgcaattgacaggacccgtcatcataattaaacaacccatattggggaccccctgtgactagtagcagctggaaaattctggtttttatcacttgtaaagacatgcagatggcgtggaaccaaaccatgagaaaactccagccatcctggagttgatattcaccatttgtgaggagaaatactaactggactgaccctattgctaggcttaaatacttatttgatcttaccaaagaagtcaacacatgggacctttgtgtcacatgaaccattttctttcctcttctattaagtgtatttctgtttaagttacagttctctaagagaattacaatgtttgtcccatttctaagggcttctcttcaactctaataacagcattattcacgttatgatttgatagtattattatttaatttttttatgattattttccattttgtgctctgagttttgctgttgaaagtctccctcaagaatagcttcagatcctcttgtgtatttgcagaatacacaaggtcatttcccagtggcctgggagaggcagtgagccttctctccaccaccatagacaggtgttaatgcatctatgggccaggtgcagtggctcactcctgtaatccgagcaatttgggaggccaaggtgggagttttgcttgaggccagaggttcaagaccagcctgggcaacacagtgacacctgactctactaaaaaattaaaaaattagctgggcagcgtggtgtgtgcctgtagtctcagctacttgggaggccatggtgggaggatgggttgagcacaggagtcagaggctggaatgcaatggcgtgatcttggctcactgcaaacttcacctcctgagttcaagccattctcctacctcagcctcccaagtagctgggactatgggtgcacaccaccacgcctggctaatttttgtatttttagtggagatggggtttcacaatgttggccaggctggtctcaaactcctgacttcaggtgatctgtctgcctcggcctcccaaagagctgagattacaggcgtgagccaccatgcctggccaaaacacctgatttttaaatggtagcaattgtgctaaataaaatgtgtaaaaattttaaagagttgttaacattttttgatgaattctgctgaaaattatctgaacatacctgtttttcgaaacttcaagaaacttcaataagggatgcattgagcagtctgacagtgagaataaagaatgctgagtcaagatttatattaaggctggaagctgtggctcacacctgtaatcccagcattttgggaggctgaagtgagaggttaatttgagggtaggggtatgagaccatcttggccaatatagcaagaccctgtgtctaaaacaaacaaaaaaatttttaattggattttgatatggtttggatctgtgtccccaccaaatctcacgttgaagtgtaatccccaatgttagaggtggggccggctgggaggcgactggatcatgggtgtgaagccttcatgaatggtttggcaccgtcccctcagtgctggtctcatgacagtgagttatcgtgagatctggtagtttaaaagtgtgtagcacctccccactctctctttctcctgctttggccacgtgaagatgcctgctcccactttgccttctgccatgagtaaaaattccccgaggactccctagaagcagatgttgccacgcttcctatatagcctgtgagctaattaaaccccttttcttacaaacta

SEQ ID NO: 28654 - DNA, 563 bp, Homo sapiens
  source 1..563: mol_type = unassigned DNA
attgctcttggcagctctgtctgaaggaggaggacaagagactccagggtatggaaagggattttcatagtggcgggcagcaggaaggagcagaagttggacctgaaggcaggaagccagcttggttctagaaagaaagaaactgggggcacagaaaaaaacagccatggattgttacagaacttcactaagcagttcctggatttaccccactgtgatcctctgcttatttggttttttctccatgatgagaccctcagaaccattccttatcccatatttatctggaccagataaaaacctgaccagtgcagagataacaaatgagatcttccccgtttggacatactcctacctggtgctgctgctgcctgtgtttgtcctcaccgattatgtccgctacaagccagtcatcatcttgcaaggtatcagtttcatcattacctggctgctgctgttgtttggccaaggagtgaagaccatgcaggttgtagagttcttctatgggatggtcaccgccgccgaggtggcctactacgcctacatatacagcgtggtcagcc

SEQ ID NO: 28655 - DNA, 1954 bp, Homo sapiens
  source 1..1954: mol_type = unassigned DNA
gggtgcgtggtcgtgcggcaagtgagcgatttggtgaacagacactcccttctgtagccatggattgttacagaacttcactaagcagttcctggatttaccccactgtgatcctctgcttatttggttttttctccatgatgagaccctcagaaccattccttatcccatatttatctggaccagataaaaacctgaccagtgcagaggttgaagcatgccacaattaagacaacaaaggacagatgcagggtcagaagcaactcaatgaatccactgggttctgcttctcgagccactgtggaccagttaacagaccttccctccaaggagcagctcagttgtgtggtctttgctctgtggcctcctgctttctccagcaacctcagtgatccaggtgtcaagataacaaatgagatcttccccgtttggacatactcctacctggtgctgctgctgcctgtgtttgtcctcaccgattatgtccgctacaagccagtcatcatcttgcaaggtatcagtttcatcattacctggctgctgctgttgtttggccaaggagtgaagaccatgcaggttgtagagttcttctatgggatggtcaccgccgccgaggtggcctactacgcctacatatacagcgtggtcagccccgagcactaccagagagtgagcggctactgcaggagcgtcacgctggccgcctacacagcagggtcggtgctggctcaactcttggtatccctggcgaacatgtcgtacttttacctcaacgtcatatccttggcctctgtctccgtggctttccttttctcacttttcctaccaatgcccaagaaaagcatgttttttcatgcaaaacccagcagagaaataaagaagtcatcaagcgtgaatccagtattagaggaaactcacgaaggtgaagcaccaggctgtgaagagcagaaacccacatcagaaatactcagcacttcagggaagctgaataagggccagctgaacagcctgaaaccaagcaatgtgactgtggacgtttttgtgcagtggttccaagatttgaaggagtgctactcctcaaaacgtcttttctactggtctctatggtgggctttcgccacagcaggttttaaccaggttttgaactatgttcaaatcctgtgggattacaaggcgccatcccaagattcttccatctataatggggccgtagaagctattgcaacctttggaggggctgtggctgcctttgcagtgggttatgtgaaagtcaactgggaccttctgggagagctggctctggtggtcttctcagttgtcaatgccggttctttatttctcatgcattacacagccaatatctgggcgtgctatgctggctatttgatattcaagtccagctatatgcttcttataaccatagcagtatttcagattgcagttaatctgaatgtggaacgctatgccttggtatttggaatcaacacctttattgccttggtgattcagaccatcatgactgtgattgtagtagatcagagagggctcaacttgccagtcagcattcagtttttagtttatgggagctattttgcagtaattgctggaattttcctaatgagaagcatgtatattacctactcaaccaaatcccagaaggatgtacagagccctgctccaagtgagaatccagatgtgtctcacccagaggaagagagtaatatcatcatgtcaacaaaactctaacctcatcgcaacaaacgcaacagtggctttcaaagttatgcaataataaggaaagattttgagatgggtggcatatgttttgccataacttgacatgctttgcaaatctggattccaatggacctttcaaaaccacaacaaaacctcagttttagatgagttctctatgtgaccaattttactggatgcaattgacaggacccgtcat

SEQ ID NO: 28656 - DNA, 4368 bp, Homo sapiens
  source 1..4368: mol_type = unassigned DNA
ggagggggtccttgccaggcctggggcggccgggggcggtcctgggctcccctccgtcccgcctccaggcctcggggcctggctggccgacgtggcgttggcggcgctgcgcgcgggagggcagggcaggagggacagaggcgggggcgggccggaaagtttgtccggcggcagcggcgttggggactccggcgggggatgcgcgcccggcccctcagcgcccccagcacgccgccgagtcccgctcgccatgggccactccccacctgtcctgcctttgtgtgcctctgtgtctttgctgggtggcctgacctttggttatgaactggcagtcatatcaggtgccctgctgccactgcagcttgactttgggctaagctgcttggagcaggagttcctggtgggcagcctgctcctgggggctctcctcgcctccctggttggtggcttcctcattgactgctatggcaggaagcaagccatcctcgggagcaacttggtgctgctggcaggcagcctgaccctgggcctggctggttccctggcctggctggtcctgggccgcgctgtggttggcttcgccatttccctctcctccatggcttgctgtatctacgtgtcagagctggtggggccacggcagcggggagtgctggtgtccctctatgaggcaggcatcaccgtgggcatcctgctctcctatgccctcaactatgcactggctggtaccccctggggatggaggcacatgttcggctgggccactgcacctgctgtcctgcaatccctcagcctcctcttcctccctgctggtacagatgagactgcaacacacaaggacctcatcccactccagggaggtgaggcccccaagctgggcccggggaggccacggtactcctttctggacctcttcagggcacgcgataacatgcgaggccggaccacagtgggcctggggctggtgctcttccagcaactaacagggcagcccaacgtgctgtgctatgcctccaccatcttcagctccgttggtttccatgggggatcctcagccgtgctggcctctgtggggcttggcgcagtgaaggtggcagctaccctgaccgccatggggctggtggaccgtgcaggccgcagggctctgttgctagctggctgtgccctcatggccctgtccgtcagtggcataggcctcgtcagctttgccgtgcccatggactcaggcccaagctgtctggctgtgcccaatgccaccgggcagacaggcctccctggagactctggcctgctgcaggactcctctctacctcccattccaaggaccaatgaggaccaaagggagccaatcttgtccactgctaagaaaaccaagccccatcccagatctggagacccctcagcccctcctcggctggccctgagctctgccctccctgggccccctctgcccgctcgggggcatgcactgctgcgctggaccgcactgctgtgcctgatggtctttgtcagtgccttctcctttgggtttgggccagtgacctggcttgtcctcagcgagatctaccctgtggagatacgaggaagagccttcgccttctgcaacagcttcaactgggcggccaacctcttcatcagcctctccttcctcgatctcattggcaccatcggcttgtcctggaccttcctgctctacggactgaccgctgtcctcggcctgggcttcatctatttatttgttcctgaaacaaaaggccagtcgttggcagagatagaccagcagttccagaagagacggttcaccctgagctttggccacaggcagaactccactggcatcccgtacagccgcatcgagatctctgcggcctcctgaggaatccgtctgcctggaaattctggaactgtggctttggcagaccatctccagcatcctgcttcctaggccccagagcacaagttccagctggtcttttgggagtggcccctgcccccaaaggtggtctgcttttgctggggtaaaaaggatgaaagtctgagaatgcccaactcttcattttgagtctcaggccctgaaggttcctgaggatctagcttcatgcctcagtttccccattgacttgcacatctctgcagtatttataagaagaatattctatgaagtctttgttgcaccatggacttttctcaaagaatctcaagggtaccaatcctggcaggaagtctctcccgatatcacccctaaatccaaatgaggatatcatcttttctaatctcttttttcaactggctgggacattttcggaagggggaagtctctttttttactcttatcattttttttttttgaggtggagtctcattctgttgcccaggctggcctgatcttggctcactgcaacctccacctcctgagttcaagcgattcttgtgcctcagcctcctaagcagctgggactacaggcgcatgcaaccatacccagctaatttatttttagcagagatggggtttcactgtgttggccaggctggtcgtgaactcctgagctcaagtgatccacccacctcagcctcccagagtgctaggattacaggccttttgactcttttatctgagttttattgacccctctaattctcttacccagaatatttatccttcaccagcaactctgactctttgacgggaggcctcagttctagtccttggtctgctggtgtcattgctgtaggaatgaccacgggcctcagtttccccatttgtataatgggaagcctgtaccaggtcattcttaagatttctcctgactccagtgagctggaattctaaatgctggtctaggagctgtctccaggatggtgcaggatggctttgcggaaaggagatgggtttggaggccaacaaacctgcttgtcaatattgcctttgcctcttggcagcccttgaacttgagtaaataacaactccctgaacctcagtttcctcatctgcagaatggggataattatgtcccaggggtatatttagaccctgtttcctttcaggagggtccccagctggtccagggcctgggaaatttctacttatcctcattacccaggtccctcctttggaccctgtaaagggtcagggtgaatcagatgggggactgagcaagtagctatgactgcagatcatgtaaggaagggactgacaagaagctcccagatgctggggagaatgaagagctaaaatagatcctaggtgctggatgctttgtcatccatgcgtgcacatatgggtgctggcagagcccccaaggactctggcctctcgagttctcctatcttctccattctagatgcttcccttgtatccagtgatgtgctggagctggctttgccaagcttgtgagagctggttgctacattttcaggatttttacaagttggtaaacacagccattataaaaaattaaatgatttaaatttataattaagtaaattacattaaaacaaaaaaattatactcaaaattcattacttaattttactacctgttactattatctgtgcttttgaggctatttctacatagtaactcttatggagacctaggggagacaccgcgcatctcttcctgattccccactcaatgacatcatgttagtctttggttgcttaactggctgtggggagtgtttttgtatcacaaagattagagaggactacacatcagggcttgatttattgtttgttgattttctagacttcagaacatgctggataaaatgtcagtaatgcaaattaaactttaaagtatgtcttgtttgtagccaatacatggtgtatagcaccaaaaaatggagggattattcttccagtagttgaacactgtcatccgtttcagctgacagctgctcaaatcatttaagaaggagttctgacattcattttcattgttttacttttgtcttcctcactagtgtaaacaaaaatttcaaccagcattcatgccgaacctatacccattcttcagtgcctagctgtacagttatcagggatttttatttgtagtctaattttgtcaaatcatggccaaatcgcagtgatagttgactttggatacaaggtttggcaaaaaaaaaaatattaacaaaatattctgtaagaatcaattgtctatatggaatttaggataaagaatatttacaataaagaatatttacaataaagagtttattattatttgtaagttgtgtgcaacaaacataccctttatctctgtaaaatttatacacacaaaaattaacaaaagattctgtaagaattaattggctatatggaatttaggatagaatatttacaataaagagtatttacaataaa

SEQ ID NO: 28657 - DNA, 7003 bp, Homo sapiens
  source 1..7003: mol_type = unassigned DNA
ctgccggcccgcggagccgcgtccccccgggcagccccgggcccctgccctatgtcccgcaaggcaagcgagaatgtggagtacacgctgcggagcctgagcagcctgatgggcgagcggcgcaggaagcagccggagccggacgcggcgagcgcggccggggagtgcagcctcctggctgccgccgaatcgagcaccagcctgcagagcgcgggcgcgggcggcggcggcgtcggggacctggagcgcgcggcgcggcggcagttccagcaggacgagacccccgccttcgtgtacgtggtggccgtcttctccgcgctgggcggcttcctgtttggctatgacaccggggtggtgtcaggggccatgctgctgctcaagcggcagctcagtctggacgcgctgtggcaggagctgctggtgtccagcacggtgggggcggctgccgtctcggcgctggccggaggcgccctcaacggcgtcttcggccgccgcgctgccatcctcctggccagtgccctcttcaccgccggctccgcggtgctggctgcggccaacaacaaggagacactgctcgccggccgcctggtcgtgggactcggcatcggcattgcttctatgacagtgccagtgtacattgcggaggtctcaccacccaatttaagaggccgattagtcaccattaataccctcttcatcacaggagggcagttctttgcaagtgttgttgatggagccttcagttatctccagaaggatggatggaggtacatgttgggacttgcagcagttccggcggttatacagttttttggctttctctttttgcctgaaagccctcgatggcttattcagaaaggacagactcagaaggcccgtagaattttatctcagatgcgtggtaaccagaccattgatgaggaatatgatagcatcaaaaacaacattgaagaggaggaaaaagaggttggctcagctggacctgtgatctgcagaatgctgagttatcccccaactcgccgagctttaattgtgggttgtggcctacaaatgttccagcagctctcaggcattaacaccatcatgtactacagtgcaaccattctgcagatgtctggtgttgaagatgatagacttgcaatatggctggcttcagttacagccttcacaaatttcattttcacacttgtgggagtctggcttgttgagaaggtgggccgcagaaagcttacctttggtagtttagcaggtaccaccgtagcactcattattcttgccttgggatttgtgctatcagcccaagtttccccacgcatcacttttaagccaatagctccgtcaggtcagaacgccacttgcacaagatacagttactgtaatgaatgtatgttggatccagactgcggtttctgctacaagatgaacaaatcaactgtcattgactcctcctgtgttccagttaataaagcatctacaaatgaggcagcctggggcaggtgtgaaaatgaaaccaagttcaaaacagaagatatattttgggcttacaatttctgccctactccatactcctggactgcacttctgggccttattttatatcttgtcttctttgcacctggaatgggaccaatgccttggactgtgaattctgaaatatatcccctttgggcaagaagtacaggaaatgcatgttcatctggaataaactggattttcaatgtcctggtttcactaacatttttacacacagcagagtatcttacatactatggagctttcttcctctatgctggatttgctgctgtgggactccttttcatctatggctgtcttcctgagaccaaaggcaaaaaattagaggaaattgaatcactctttgacaacaggctatgtacatgtggcacttcagattctgatgaagggagatatattgaatatattcgggtaaagggaagtaactatcatctttctgacaatgatgcttctgatgtggaataattttcagctgctcatatatttagttatttaaacaaactggggggagaagaacagcaattggtgacttcactgccctgcttctaatctggttctttccacagcctagttttgattgacttcatattctagaatacttgattaggaggaagatacaaccatgatgactttttttttccacaaggaacaatattttaaaaaatatttacagagattttaatctaataattcttaagcaaatgtgtgtaatgccttcctgaaatagtctaaaatgaatattgtacccagtgacttcagtggtatccttttttcctaagaccatttataattattagtggcaacagagtcagtgctaatctagccaaattacatatgtataatatatttataaaggattctgggagatggtccaagggtgttctgtgtcaaaagatggcctattggccctcagttttcctacagagtagtggcttatctctgatcagctgttacaaactaaattccatgtaagctttcatcaacaaattccaaagtgcctcctacaagggcacagctgtccgtatctcctttggattccatatttttgtttctctccaattcagatattgggagttcttcagatactgactctgcacactatcttttgaacattatgaaaatataatctgtcgggttgttttcatacttcttttttttgcatcagtgataaggcatacatttgcgcagatgagctaggaagttttgagaagtaccttttatgttcagaaagtaacagattaaaggtttttatgggttccaaattggttagtcacttaggtatgcaattataaatgcaaaatagtgccagatctttaactgtatatcagggtcagtttttgttcatgcccaaatcactacaccttcctcattggccttggagtcctactatttcgtgccttcatttgtgttacatacatagctgcaagcaaaccatttttcccctttcttttattcaaacaataatttttgaaacaaaaaagaggaaggaaatcagtggcagaaataatcctgctgttattggtgtttgtttaataaaaataatgggacttttttcttaactttttattagctcttcctaagggaaatgtcacatattattatttaattgtacttgtctttttttactttaagagcataaactcgtttttattttgcacacttttctcattttcctgagaatttaccagaaaaaaaaaagatacatagatttgtctctgtgtttttcttattcttggcttagtttttccttcttgtgtaaaaattgagattgcctattggaacagataattggttctaatatagcacgtctataagaaatgcaggcttaattatatttccacaatgtctttccaaggtattcattggtttttatggtaattcatcactgaactcttaatttttgcttttctattaagaactatatagtatgtacaaaattacttgatcacaaaattacttgctagttccaggaaaaatatgaatgaatcttctgtggccagttaggaatacatcagtttgatgcatttttaaatggctctaaacatctaataaggtactgtatttggagagaaaaggtggctatctccatattcaaaatatttcttccagtctccaagatactctattcttttaatgtctggcttgttcctatcacagttatcaagctgagaatacagctgaggaagttcattctctaagtcaccagaggtataatatgtgcttaaactgtcaatttagtgccctaaaaatccattaaccaaaaacaaaaacgttttctccctttggtcatttcatataataaaaaaaattaatattttatagaggttttttccttgaattaggtgctttaacaattgatttccaagggaatattagtattgattttttcctcagaaaagcagatatgatttaatagggaaaattattattctattgatatttcttatctcataagaaatttcttatctaatattttacacaggtaaattgaagtgaaaaataagctactatatggtacaatcaaaatataataaggagaaaaagtagaccaataaagtgctctctaaaaatttattttttggacttaatcaaaataattgcctcaatccttctctttattgtatatgtagccttaactaactatatacttataaactcagctgggctgatgcacagtaactttattaaaggagaaactggactcttgttatttcctaaagcagaacatggcctgttctccctgatataagaaaacaatgttttcaactttataaccataaatgcacataataacagggaaaattagccacagttctcctcccctactcccctgagcccctactttaaaggactatttgttatttatatagtgttaaagataatattccatatctttgaagtataagacagagaggcacagtataagaattatttataactttttagaaacaattacttgaaaaggaaccttatacaattagggtattatttttagatttggtgaacatttatagtatattaaaaattaaatgtttaaattttgcaggtttttttatattaggcaccttttaagttcccagcatatttggctaccactatcaacttggaaacattccatttgtagtatcatcaaatatatattttgtaggacaatttatatatgatgtgatttgacctaccatattaaagcagacacagattacgtatcatgctttcaaccaaaattacagacttcctttgaaacatgctgcagatttgatagaggtatattatgtcttaggaaaatacaatgaagaaggtccaaatccctattgaggctggatgtctgatctgcactagacttaagaggatatatcatttcatctgcatataaacacatagggctgaatgtgatgtcaaaagggtttgccgttaataattttcttcaatgtaaacattcctaataattttgattgttgctccttagtcaatcatttcccaaaacatgattatttttaatatatgtaaaatatttaaataataaataataaaaggtaatgtgtccattttaaattttgttcccagccatacacagtagttccctgatacaaaatgctatgagaataccgactattttttcataatttaattttaccactgaacctgattttagtacataagagtctaaatattaagttattcactctaaaaggggaaatcagtaaaagcaaggaatttatgaaatttttgctgtaatttcagtatctgttatacaggggaagaatgatcaggaaaaatataagctgacaacttacccttttgctttttaacaacaaaataatattgaaaatatattagaataactcacagatccagaagttggtggaaatggaagaatgttttagaaaataccatccatatgtttatctaagaaagtctcagaatttagtgacactaatacagttcataaatactgtaatacagtggagagagttggaatgttattttggttttatttcatcagcacaattattaaaaacaacaaaattaatgagacgttttgttataatcagatttttttttaccatattgcaagttataaaatgtcaacttatactaagtacctaacaactgacttttattcacttgttgtgacaagtttttaattaccaaattaagaccttttcagtatctatgagtaaaagaaatagatgattatatcagaccaggagcagagaatttataatatgtgctttatagcaaaatgtattaaattgtggttaaaatttatagctcatatgtagctgctgccaataagaaggctcagaattgttctgtggattaatttttacatcctgttttctgtcacttttaccaatcttcttggcctcatgtacaataatgtaaagccaatttgatgaaatggttcaggttgtagcagtctataaattgtcggtacattcagctcttctaggtgagcaatactgctgctatttttctagaaatagcaatcatttaaaaatgccaaatagctaactgctaccaactctttcttgtatcttgtctctttagagaaggaaatttttgtgtgccagtaatcatcaaagaggtgttttataagagtgttgatgttcagaagttcatgaaagtattttatccgtataatttgctagtgagctaaaacaatataatttatgtaaatctttatatgtacaaaatatatagtctgttgtacttgagtaatttggtctatggaattttaaatgccttcatttagcagtaatattcacatttttattttagacagttaagttcatgtgtttgattttgtcatgtcagcataaatgagaaaaagaagtggatcatgcagctaatgagtaaccaacattttgtaaagttttaaagttttagcaaacaacattattccatctcatttaaaggttaaaaaagaagagacaactctagccaaagtagaaatttatattctacacgtccaaactgtctcctagcagcttttggactatatatcacttgatgttaaagtatcttttatttgtaataaatattcaaatttctatttagaagctctaatgtatacctagattaaatcaaatcacagttttatgcttttaaaatatatgtatttcaaactgtatattttaatttctgagtgcatgttatatagtatttaatacttcagatgtcttggcaaattcaatataagtatttattcccacaagcgatatatgggatatctcttaaaaattatgaatatgtaccatttccttcaaagtcatcctagcctatgctgtatcaaaagtattgtatattttatggagatttagtgatatacatgtaaatgttttttaagttattttattgaagttcaatctttacataaaattaaaatctttttttaaaaaaagtgtcagtgccagaactgtaaatgaaaataatcaaataaaagttaaaataattcattactcattaa

SEQ ID NO: 28658 - DNA, 3082 bp, Homo sapiens
  source 1..3082: mol_type = unassigned DNA
cgcctcccgcccgctccgcagcgccagctcggcaggcgcggggcgtgagtgtggagtgagacccgccgggctccaactccgcagcgtcggagcgcggcgggcagcaactttctccccggagcggccgtggcggcggctgctgccgtggcagccggagcggaagccgggaggaagaaagcggcggcagcggcggttgctcccgccggctcgggctgtctagctcgccgagactgccggcccgcggagccgcgtccccccgggcagccccgggcccctgccctatgtcccgcaaggcaagcgagaatgtggagtacacgctgcggagcctgagcagcctgatgggcgagcggcgcaggaagcagccggagccggacgcggcgagcgcggccggggagtgcagcctcctggctgccgccgaatcgagcaccagcctgcagagcgcgggcgcgggcggcggcggcgtcggggacctggagcgcgcggcgcggcggcagttccagcaggacgagacccccgccttcgtgtacgtggtggccgtcttctccgcgctgggcggcttcctgtttggctatgacaccggggtggtgtcaggggccatgctgctgctcaagcggcagctcagtctggacgcgctgtggcaggagctgctggtgtccagcacggtgggggcggctgccgtctcggcgctggccggaggcgccctcaacggcgtcttcggccgccgcgctgccatcctcctggccagtgccctcttcaccgccggctccgcggtgctggctgcggccaacaacaaggagacactgctcgccggccgcctggtcgtgggactcggcatcggcattgcttctatgacagtgccagtgtacattgcggaggtctcaccacccaatttaagaggccgattagtcaccattaataccctcttcatcacaggagggcagttctttgcaagtgttgttgatggagccttcagttatctccagaaggatggatggaggtacatgttgggacttgcagcagttccggcggttatacagttttttggctttctctttttgcctgaaagccctcgatggcttattcagaaaggacagactcagaaggcccgtagaattttatctcagatgcgtggtaaccagaccattgatgaggaatatgatagcatcaaaaacaacattgaagaggaggaaaaagaggttggctcagctggacctgtgatctgcagaatgctgagttatcccccaactcgccgagctttaattgtgggttgtggcctacaaatgttccagcagctctcaggcattaacaccatcatgtatgtatttctttctggctttttactgaaaagattgtgaaaggattattttatgtgaaatagtgaaaagtatttcatgtaaatactagactcagtgatttgttctgattaaatgtatgaattctccttttgggagatactgactttacaattttttaattccagtaatttgttactagataaaggtgatttattttgtttgttatatgattggctttatttgattccataaaatttctcttttacgccatccaatacctccttgtattctgagcttaaatgtgtcattttttctaagccatttcttgatgctggttggaaagcaaaatagaaggaaatcacctggcattgccagagattatgggcacacagataactaattcatttctttttggtgcagtctactacagtgcaatgtgataaggacattagtagaagtacgtttattataaccagagtatggtagaggggagattgagtgggaaggagagtgaggaatacagaaaaattccctgttctctaattttaagagtaattcccaaagctgtatgtgtgctgagggtgggaaggactaaatattaagggctctactaggtttccctcattcagtattaaacccatttttgagggcctctgttgcactagacctacagcagtaactaaaatagacctgggtcttgtcctcatggatgtacaggctggtagaggaagcacacattaaataaactcacagttaaatataagatttcaaactatgataagggccatacaggactctctcaattctctacagagtagacttttaagatcctaaatcataaaatacagtttagagaaggttatgtgctttcccagggcacatattgttagattaaaagctgccacatcttagaagtcctccccactccctgcctattgattgaatttttttcattaagaaaatacaaattatgtaaaattaaattttctttggtaaaccatttgtatttgagactcttgattttttttaattacttgagatatgatgagttatttagtgactgtttgagaagagtgaattgattaaaatatttttaaaaaagaaggattaggacccaatgagccagtatattaaatcaagatttgttgagaaactccattttctatacattcacacactttgtggatttgactttaatcataatccctgttgaacttcaactttcgagactacatgttcaatattttgttctctcctgcttctctctgacattaactttcattttttctcacctttaccagctctattaaggcccatctgttggtctagtgccaggcacgtttgattgcttgttctctgaatttggcacatcatgacttgttctgagatgtgtccaccttctgcagtctggtggaagtatagaattgcagctaggctaggaccaagcatcaaataattaaatccattaataatcctatgtgaattcgttagttgaccaacctaatatttgttctggttttgaaaatatgttttgtttgttatgctttttttcctaagcatttaaacttgacaagtataaaagcatagaaagtgaaggatttttcttgtactttttttgttttcacttaaaactggtatcacaaacagagccaactctagtttatgggtagtgactggggccagtgtattcctagtttgaaatgactgtcataatccattagcagtagctagtgtaaattgagctgattgatgctgtcaaattttaataaaacattcatttctccaaa

SEQ ID NO: 28659 - DNA, 3699 bp, Homo sapiens
  source 1..3699: mol_type = unassigned DNA
gttgagcgaagccgcggggcccaaccgcagtcgcggggtctgggagccctctattggagattctgcctcccctgggacagatggcttcttgagcacactcccacgatgggtggctgctctgggtattcatccatggggttcttccgcggtgaagccagcttgtcgtgctgtcccccttgtcattgaagccatcatggttctggtcaatcatgttgaaagcctccttaaactcctggatgtggaactggtcgaacatcacgaagacattggatgtggccccttgtgctgtggtcgcttcttggtggtcttggctttggtccacttgctgaacattttggcttcaggaagcagtaccttgaagagaaattggagagggagtcaattcctaggatagcagagagatggacaacagacagaatgtcaccccagctctgatctttgccatcacagttgctacaatcggctctttccagtttggctacaacactggggtcatcaatgctcctgagacgatcataaaggaatttatcaataaaactttgacggacaaggcaaatgcccctccctctgaggtgctgctcacgaatctctggtccttgtctgtggccatattttccgtcgggggtatgatcggctccttttccgtcggactctttgttaaccgctttggcaggcgcaattcaatgctgattgtcaacctgttggctgccactggtggctgccttatgggactgtgtaaaatagctgagtcagttgaaatgctgatcctgggccgcttggttattggcctcttctgcggactctgcacaggttttgtgcccatgtacattggagagatctcgcctactgccctgaggggtgcctttggcactctcaaccagctgggcatagttattggaattctggtggcccagatctttggtctggaactcatccttgggtctgaagagctatggccggtgctattaggctttaccatccttccagctatcctgcaaagtgcagcccttccatgttgccctgaaagtcccagatttttgctcattaacagaaaaaaagaggagaatgctacgcggatcctccagcggttgtggggcacccaggatgtatcccaagacatccaggagatgaaagatgagagtgcaaggatgtcacaagaaaagcaagtcaccgtgctggagctctttagagtgtccagctaccgacagcccatcatcatttccattgtgctccagctctctcagcagctctctgggatcaatgctgtgttctattactcaacaggaatcttcaaggatgcaggtgttcaacagcccatctatgccaccatcagcgcgggtgtggttaatactatcttcactttactttctctatttctggtggaaagggcaggaagaaggactctgcatatgataggccttggagggatggctttttgttccacgctcatgactgtttctttgttattaaagaatcactataatgggatgagctttgtctgtattggggctatcttggtctttgtggcctgttttgaaattggaccaggccccattccctggtttattgtggccgaactcttcagccagggcccccgcccagctgcgatggcagtggccggctgctccaactggacctccaacttcctagtcggattgctcttcccctctgctgcttactatttaggagcctacgtttttattatcttcaccggcttcctcattaccttcttggcctttaccttcttcaaagtccctgagacccgtggcaggacttttgaggatatcacacgggcctttgaagggcaggcacacggtgcagatagatctgggaaggacggcgtcatggggatgaacagcatcgagcctgctaaggagaccaccaccaatgtctaagtcatgcctccttccacctccctcccggcatgggaaagccacctctccctcaacaagggagagactttatcaggatgaacccaggactgcttctgaatgctgctacttgatttctttctcatcccacgcactccatgagcaccccaaggctgcagtttgttggatcttcaatggctttttaaattttatttcctggacatcctcttctgcttaggagagaccgagtgaacctaccttcatttcaggagggattggccgcttggcacatgacaactttgccagcttttcctcccttgggttctgatattgccgcactagaggatataggagaggaaaagtaaggtgcagttgccccaacctcagacttaccaggaagcagatacatatgagtgtggaagccggagggtgtttatgtaagagcaccttcctcacttccatacagctctacgcggcaaattaacttgagttttatttatcttatcctctggtttaattacataaatatttattttttaagtgtaattttgccaaataataaaaacagaaggaaattgagattagagggaggtgtttaaagagaggttatagagtaaaagatttgatgctggagaggttaaggtgcaataagaattcagggagaaatgttgttcattattggagggtaaatgatgtggtgcctgaggtctgtacattacctcttaacaatttctgtccttcagatggaaactctttgatttctcagaaaagttgtatgcctatttaataaagctactcatttcctttggaactttatctttaagataatagtttacatgtagtagtacttgaaatctaggattattaactaatatgggcattgtagttaatggcggttgatgggttctaattttggatggagtccagggaagagaaagtgatttctagaaagcctgttcccctcactggacgaaataactccttgtagtagtctcattacttttgaagtaatcccgccacctatctagtgggagagccatccaaatgagaaacctaaaataattggttcttggtagagattcattatttctccactttgttctttaggagattttaggtgttgattttctgttttattttaactcatacctttaaaggaattccccaaagaatgtttacagcaaacttggaatttgtaacctcagctctgggagaggatttttttctgagcgattattatctaaagtgtgttgttgctttaggctcacggcacgcttgcgtatgtctgttaccatgtcactgtggtcctatgccgaatgccctcaggggacttgaatctttccaataaaccaggtttagacagtatgagtcaatgtgcagtgcagcccacacttgagaggatgaatgtatgtgcactgtcactttgctctgggtggaagtatgttattgttgacttattttctctgtgtttgttcctacagcccctttttcatatgttgctcagtctccctttcccttcttggtgcttacacatctcagaccctttagccaaacccttgccagtgacagtattttggttctcagttctcactgttccctctgctcctggagcctttgaataaaaatgcacgtagctatggagtggggtttagctggaaaggtggccttccaacttcacgtcaacttctggctcctcagtttggcagtaaggcagggaagttgttttcctatttctcactgagaagattgtgaatatttccatatggattttccattattgtttgtttgattctttgttttaaaataaaaattctgaatgtacatgaca

SEQ ID NO: 28660 - DNA, 2335 bp, Homo sapiens
  source 1..2335: mol_type = unassigned DNA
ggacccctgctctgaccgcaggtgggtgcttgtcttgcttacggagggctcccgatgaaccgagtcacgttttgtaaccacattaacggaccattcaaagtcgaatcctaggcttttcgaggcagttagtgggtcccaacggctgcaggcggggccggcgggggcgcagcggcccgggaggaagcagtaccttgaagagaaattggagagggagtcaattcctaggatagcagagagatggacaacagacagaatagatggagtttcacaatggtggccatgtgtctggaattggtgggttcttggtctcactgacttcaagaatgaagccgcacaccctcgcagtcaccccagctctgatctttgccatcacagttgctacaatcggctctttccagtttggctacaacactggggtcatcaatgctcctgagacgatcataaaggaatttatcaataaaactttgacggacaaggcaaatgcccctccctctgaggtgctgctcacgaatctctggtccttgtctgtggccatattttccgtcgggggtatgatcggctccttttccgtcggactctttgttaaccgctttggcaggcgcaattcaatgctgattgtcaacctgttggctgccactggtggctgccttatgggactgtgtaaaatagctgagtcagttgaaatgctgatcctgggccgcttggttattggcctcttctgcggactctgcacaggttttgtgcccatgtacattggagagatctcgcctactgccctgaggggtgcctttggcactctcaaccagctgggcatagttattggaattctggtggcccagatctttggtctggaactcatccttgggtctgaagagctatggccggtgctattaggctttaccatccttccagctatcctgcaaagtgcagcccttccatgttgccctgaaagtcccagatttttgctcattaacagaaaaaaagaggagaatgctacgcggatcctccagcggttgtggggcacccaggatgtatcccaagacatccaggagatgaaagatgagagtgcaaggatgtcacaagaaaagcaagtcaccgtgctggagctctttagagtgtccagctaccgacagcccatcatcatttccattgtgctccagctctctcagcagctctctgggatcaatgctgtgttctattactcaacaggaatcttcaaggatgcaggtgttcaacagcccatctatgccaccatcagcgcgggtgtggttaatactatcttcactttactttctctatttctggtggaaagggcaggaagaaggactctgcatatgataggccttggagggatggctttttgttccacgctcatgactgtttctttgttattaaagaatcactataatgggatgagctttgtctgtattggggctatcttggtctttgtggcctgttttgaaattggaccaggccccattccctggtttattgtggccgaactcttcagccagggcccccgcccagctgcgatggcagtggccggctgctccaactggacctccaacttcctagtcggattgctcttcccctctgctgcttactatttaggagcctacgtttttattatcttcaccggcttcctcattaccttcttggcctttaccttcttcaaagtccctgagacccgtggcaggacttttgaggatatcacacgggcctttgaagggcaggcacacggtgcagatagatctgggaaggacggcgtcatggggatgaacagcatcgagcctgctaaggagaccaccaccaatgtctaagtcatgcctccttccacctccctcccggcatgggaaagccacctctccctcaacaagggagagactttatcaggatgaacccaggactgcttctgaatgctgctacttgatttctttctcatcccacgcactccatgagcaccccaaggctgcagtttgttggatcttcaatggctttttaaattttatttcctggacatcctcttctgcttaggagagaccgagtgaacctaccttcatttcaggagggattggccgcttggcacatgacaactttgccagcttttcctcccttgggttctgatattgccgcactagaggatataggagaggaaaagtaaggtgcagttgccccaacctcagacttaccaggaagcagatacatatgagtgtggaagccggagggtgtttatgtaagagcaccttcctcacttccatacagctctacgcggcaaattaacttgagttttatttatcttatcctctggtttaattacataaatatttatttttta

SEQ ID NO: 28661 - DNA, 3458 bp, Homo sapiens
  source 1..3458: mol_type = unassigned DNA
agttagtgggtcccaacggctgcaggcggggccggcgggggcgcagcggcccgggaggtgcgtggttgagcgaagccgcggggcccaaccgcagtcgcggggtctgggaggaagcagtaccttgaagagaaattggagagggagtcaattcctaggatagcagagagatggacaacagacagaatgtcaccccagctctgatctttgccatcacagttgctacaatcggctctttccagtttggctacaacactggggtcatcaatgctcctgagacgatcataaaggaatttatcaataaaactttgacggacaaggcaaatgcccctccctctgaggtgctgctcacgaatctctggtccttgtctgtggccatattttccgtcgggggtatgatcggctccttttccgtcggactctttgttaaccgctttggcaggcgcaattcaatgctgattgtcaacctgttggctgccactggtggctgccttatgggactgtgtaaaatagctgagtcagttgaaatgctgatcctgggccgcttggttattggcctcttctgcggactctgcacaggttttgtgcccatgtacattggagagatctcgcctactgccctgaggggtgcctttggcactctcaaccagctgggcatagttattggaattctggtggcccagatctttggtctggaactcatccttgggtctgaagagctatggccggtgctattaggctttaccatccttccagctatcctgcaaagtgcagcccttccatgttgccctgaaagtcccagatttttgctcattaacagaaaaaaagaggagaatgctacgcggatcctccagcggttgtggggcacccaggatgtatcccaagacatccaggagatgaaagatgagagtgcaaggatgtcacaagaaaagcaagtcaccgtgctggagctctttagagtgtccagctaccgacagcccatcatcatttccattgtgctccagctctctcagcagctctctgggatcaatgctgtgttctattactcaacaggaatcttcaaggatgcaggtgttcaacagcccatctatgccaccatcagcgcgggtgtggttaatactatcttcactttactttctctatttctggtggaaagggcaggaagaaggactctgcatatgataggccttggagggatggctttttgttccacgctcatgactgtttctttgttattaaagaatcactataatgggatgagctttgtctgtattggggctatcttggtctttgtggcctgttttgaaattggaccaggccccattccctggtttattgtggccgaactcttcagccagggcccccgcccagctgcgatggcagtggccggctgctccaactggacctccaacttcctagtcggattgctcttcccctctgctgcttactatttaggagcctacgtttttattatcttcaccggcttcctcattaccttcttggcctttaccttcttcaaagtccctgagacccgtggcaggacttttgaggatatcacacgggcctttgaagggcaggcacacggtgcagatagatctgggaaggacggcgtcatggggatgaacagcatcgagcctgctaaggagaccaccaccaatgtctaagtcatgcctccttccacctccctcccggcatgggaaagccacctctccctcaacaagggagagactttatcaggatgaacccaggactgcttctgaatgctgctacttgatttctttctcatcccacgcactccatgagcaccccaaggctgcagtttgttggatcttcaatggctttttaaattttatttcctggacatcctcttctgcttaggagagaccgagtgaacctaccttcatttcaggagggattggccgcttggcacatgacaactttgccagcttttcctcccttgggttctgatattgccgcactagaggatataggagaggaaaagtaaggtgcagttgccccaacctcagacttaccaggaagcagatacatatgagtgtggaagccggagggtgtttatgtaagagcaccttcctcacttccatacagctctacgcggcaaattaacttgagttttatttatcttatcctctggtttaattacataaatatttattttttaagtgtaattttgccaaataataaaaacagaaggaaattgagattagagggaggtgtttaaagagaggttatagagtaaaagatttgatgctggagaggttaaggtgcaataagaattcagggagaaatgttgttcattattggagggtaaatgatgtggtgcctgaggtctgtacattacctcttaacaatttctgtccttcagatggaaactctttgatttctcagaaaagttgtatgcctatttaataaagctactcatttcctttggaactttatctttaagataatagtttacatgtagtagtacttgaaatctaggattattaactaatatgggcattgtagttaatggcggttgatgggttctaattttggatggagtccagggaagagaaagtgatttctagaaagcctgttcccctcactggacgaaataactccttgtagtagtctcattacttttgaagtaatcccgccacctatctagtgggagagccatccaaatgagaaacctaaaataattggttcttggtagagattcattatttctccactttgttctttaggagattttaggtgttgattttctgttttattttaactcatacctttaaaggaattccccaaagaatgtttacagcaaacttggaatttgtaacctcagctctgggagaggatttttttctgagcgattattatctaaagtgtgttgttgctttaggctcacggcacgcttgcgtatgtctgttaccatgtcactgtggtcctatgccgaatgccctcaggggacttgaatctttccaataaaccaggtttagacagtatgagtcaatgtgcagtgcagcccacacttgagaggatgaatgtatgtgcactgtcactttgctctgggtggaagtatgttattgttgacttattttctctgtgtttgttcctacagcccctttttcatatgttgctcagtctccctttcccttcttggtgcttacacatctcagaccctttagccaaacccttgccagtgacagtattttggttctcagttctcactgttccctctgctcctggagcctttgaataaaaatgcacgtagctatggagtggggtttagctggaaaggtggccttccaacttcacgtcaacttctggctcctcagtttggcagtaaggcagggaagttgttttcctatttctcactgagaagattgtgaatatttccatatggattttccattattgtttgtttgattctttgttttaaaataaaaattctgaatgta

SEQ ID NO: 28662 - DNA, 533 bp, Homo sapiens
  source 1..533: mol_type = unassigned DNA
agcagccgccggggctggaccgtgcggtgcgcaggtgagaagccgggaggggccggacaaccccgaccgcgagccggacccctgctctgaccgcaggaagcagtaccttgaagagaaattggagagggagtcaattcctaggatagcagagagatggacaacagacagaatagatggagtttcacaatggtggccatgtgtctggaattggtgggttcttggtctcactgacttcaagaatgaagccgcacaccctcgcagtcaccccagctctgatctttgccatcacagttgctacaatcggctctttccagtttggctacaacactggggtcatcaatgctcctgagacgatcataaaggaatttatcaataaaactttgacggacaaggcaaatgcccctccctctgaggtgctgctcacgaatctctggtccttgtctgtggccatattttccgtcgggggtatgatcggctccttttccgtcggactctttgttaaccgctttggcaggcgcaattcaatgctgatt

SEQ ID NO: 28663 - DNA, 1732 bp, Homo sapiens
  source 1..1732: mol_type = unassigned DNA
gttgagcgaagccgcggggcccaaccgcagtcgcggggtctgggaggaagcagtaccttgaagagaaattggagagggagtcaattcctaggatagcagagagatggacaacagacagaatgtcaccccagctctgatctttgccatcacagttgctacaatcggctctttccagtttggctacaacactggggtcatcaatgctcctgagacggcgcaattcaatgctgattgtcaacctgttggctgccactggtggctgccttatgggactgtgtaaaatagctgagtcagttgaaatgctgatcctgggccgcttggttattggcctcttctgcggactctgcacaggttttgtgcccatgtacattggagagatctcgcctactgccctgaggggtgcctttggcactctcaaccagctgggcatagttattggaattctggtggcccagatctttggtctggaactcatccttgggtctgaagagctatggccggtgctattaggctttaccatccttccagctatcctgcaaagtgcagcccttccatgttgccctgaaagtcccagatttttgctcattaacagaaaaaaagaggagaatgctacgcggatcctccagcggttgtggggcacccaggatgtatcccaagacatccaggagatgaaagatgagagtgcaaggatgtcacaagaaaagcaagtcaccgtgctggagctctttagagtgtccagctaccgacagcccatcatcatttccattgtgctccagctctctcagcagctctctgggatcaatgctgtgttctattactcaacaggaatcttcaaggatgcaggtgttcaacagcccatctatgccaccatcagcgcgggtgtggttaatactatcttcactttactttctctatttctggtggaaagggcaggaagaaggactctgcatatgataggccttggagggatggctttttgttccacgctcatgactgtttctttgttattaaagaatcactataatgggatgagctttgtctgtattggggctatcttggtctttgtggcctgttttgaaattggaccaggccccattccctggtttattgtggccgaactcttcagccagggcccccgcccagctgcgatggcagtggccggctgctccaactggacctccaacttcctagtcggattgctcttcccctctgctgcttactatttaggagcctacgtttttattatcttcaccggcttcctcattaccttcttggcctttaccttcttcaaagtccctgagacccgtggcaggacttttgaggatatcacacgggcctttgaagggcaggcacacggtgcagatagatctgggaaggacggcgtcatggggatgaacagcatcgagcctgctaaggagaccaccaccaatgtctaagtcatgcctccttccacctccctcccggcatgggaaagccacctctccctcaacaagggagagactttatcaggatgaacccaggactgcttctgaatgctgctacttgatttctttctcatcccacgcactccatgagcaccccaaggctgcagtttgttggatcttcaatggctttttaaattttatttcctggacatcctcttctgcttaggagagaccgagtgaacctaccttcatttcaggagggattggccgcttggcacatgacaactttgccagcttttcctcccttg

SEQ ID NO: 28664 - DNA, 561 bp, Homo sapiens
  source 1..561: mol_type = unassigned DNA
gtgcgccgcgccgtccctgcggccggggggtgcgggaatgaggacctgagctggggtagaggtggccgagctagagtagaggaagcagtaccttgaagagaaattggagagggagtcaattcctaggatagcagagagatggacaacagacagaatgtcaccccagctctgatctttgccatcacagttgctacaatcggctctttccagtttggctacaacactggggtcatcaatgctcctgagacgatcataaaggaatttatcaataaaactttgacggacaaggcaaatgcccctccctctgaggtgctgctcacgaatctctggtccttgtctgtggccatattttccgtcgggggtatgatcggctccttttccgtcggactctttgttaaccgctttggcaggcgcaattcaatgctgattgtcaacctgttggctgccactggtggctgccttatgggactgtgtaaaatagctgagtcagttgaaatgctgatcctgggccgcttggttattggcctcttctgcggactctgcacaggttttgtgcccatg

SEQ ID NO: 28665 - DNA, 665 bp, Homo sapiens
  source 1..665: mol_type = unassigned DNA
tttttagtaaagactgggtttcgccatgttggccaggctggtctcgaacccctgacctcaagttatccgctctcctcggcctccaaaagtgctaggattacaggtgtgagccaccgtgcgcggcccgaaataactctttacaggatctcgccctgggccttcccagcccagccggcccgcccgcggggatagcccgggcactatctccctgctgcaggcggtgaggggctcgggtatctttgaaaatagatacgttcacaccctcctaacggcggcgccaagggtggtgggtcccaaaactgtttccccgtaaagagttcccccgcccggtcgcaggaagacgcctgagggggcgctcggagggatccccagcagccgccggggctggaccgtgcggtgcgcaggtgagaagccgggaggggccggacaaccccgaccgcgagccggacccctgctctgaccgcaggaagcagtaccttgaagagaaattggagagggagtcaattcctaggatagcagagagatggacaacagacagaatgtcaccccagctctgatctttgccatcacagttgctacaatcggctctttccagtttggctacaacactggggtcatcaatgctcctgagacgatcataaaggaatttatcaataaaactttga

SEQ ID NO: 28666 - DNA, 548 bp, Homo sapiens
  source 1..548: mol_type = unassigned DNA
gggggcgcagcggcccgggagccctctattggagattctgcctcccctgggacagatggcttcttgagcacactcccacgatgggtggctgctctggtacatctcatccacttcttcatctgtgaagctgtcacccatggtggtgagcagctcctggaggtggtcctcatgaatgaaacctgaggattcctcgttgaagcaggtattcatccatggggttcttccgcggtgaagccagcttgtcgtgctgtcccccttgtcattgaagccatcatggttctggtcaatcatgttgaaagcctccttaaactcctggatgtggaactggtcgaacatcacgaagacattggatgtggccccttgtgctgtggtcgcttcttggtggtcttggctttggtccacttgctgaacattttggcttcaggaagcagtaccttgaagagaaattggagagggagtcaattcctaggatagcagagagatggacaacagacagaatgtcaccccagctctgatctttgccatcacagttgctacaatcggctctt

SEQ ID NO: 28667 - DNA, 578 bp, Homo sapiens
  source 1..578: mol_type = unassigned DNA
ggcgggggcgcagcggcccgggaggtgcgtggttgagcgaagccgcggggcccaaccgcagtcgcggggtctgggaggaagcagtaccttgaagagaaattggagagggagtcaattcctaggatagcagagagatggacaacagacagaatagatggagtttcacaatggtggccatgtgtctggaattggtgggttcttggtctcactgacttcaagaatgaagccgcacaccctcgcagtcaccccagctctgatctttgccatcacagttgctacaatcggctctttccagtttggctacaacactggggtcatcaatgctcctgagacgatcataaaggaatttatcaataaaactttgacggacaaggcaaatgcccctccctctgaggtgctgctcacgaatctctggtccttgtctgtggccatattttccgtcgggggtatgatcggctccttttccgtcggactctttgttaaccgctttggcaggcgcaattcaatgctgattgtcaacctgttggctgccactggtggctgccttatgggactgtgtaaaatagctgagtcagttg

SEQ ID NO: 28668 - DNA, 1873 bp, Homo sapiens
  source 1..1873: mol_type = unassigned DNA
acaacctgacttttgttcacaatgcaaagactccaactgttgagagtagaagtactcctgggtgtgaaacaaggagatgaaatgcggcatttctttttttcttctcagacctccactctggagaagagtcagaatgggggcgtcggggaggaggtcaccccagctctgatctttgccatcacagttgctacaatcggctctttccagtttggctacaacactggggtcatcaatgctcctgagacgatcataaaggaatttatcaataaaactttgacggacaaggcaaatgcccctccctctgaggtgctgctcacgaatctctggtccttgtctgtggccatattttccgtcgggggtatgatcggctccttttccgtcggactctttgttaaccgctttggcaggcgcaattcaatgctgattgtcaacctgttggctgccactggtggctgccttatgggactgtgtaaaatagctgagtcagttgaaatgctgatcctgggccgcttggttattggcctcttctgcggactctgcacaggttttgtgcccatgtacattggagagatctcgcctactgccctgaggggtgcctttggcactctcaaccagctgggcatagttattggaattctggtggcccagatctttggtctggaactcatccttgggtctgaagagctatggccggtgctattaggctttaccatccttccagctatcctgcaaagtgcagcccttccatgttgccctgaaagtcccagatttttgctcattaacagaaaaaaagaggagaatgctacgcggatcctccagcggttgtggggcacccaggatgtatcccaagacatccaggagatgaaagatgagagtgcaaggatgtcacaagaaaagcaagtcaccgtgctggagctctttagagtgtccagctaccgacagcccatcatcatttccattgtgctccagctctctcagcagctctctgggatcaatgctgtgttctattactcaacaggaatcttcaaggatgcaggtgttcaacagcccatctatgccaccatcagcgcgggtgtggttaatactatcttcactttactttctctatttctggtggaaagggcaggaagaaggactctgcatatgataggccttggagggatggctttttgttccacgctcatgactgtttctttgttattaaagaatcactataatgggatgagctttgtctgtattggggctatcttggtctttgtggcctgttttgaaattggaccaggccccattccctggtttattgtggccgaactcttcagccagggcccccgcccagctgcgatggcagtggccggctgctccaactggacctccaacttcctagtcggattgctcttcccctctgctgcttactatttaggagcctacgtttttattatcttcaccggcttcctcattaccttcttggcctttaccttcttcaaagtccctgagacccgtggcaggacttttgaggatatcacacgggcctttgaagggcaggcacacggtgcagatagatctgggaaggacggcgtcatggggatgaacagcatcgagcctgctaaggagaccaccaccaatgtctaagtcatgcctccttccacctccctcccggcatgggaaagccacctctccctcaacaagggagagactttatcaggatgaacccaggactgcttctgaatgctgctacttgatttctttctcatcccacgcactccatgagcaccccaaggctgcagtttgttggatcttcaatggctttttaaattttatttcctggacatcctcttctgcttaggagagaccgagtgaacctaccttcatttca

SEQ ID NO: 28669 - DNA, 1650 bp, Homo sapiens
  source 1..1650: mol_type = unassigned DNA
gtatctttgaaaatagatacgttcacaccctcctaacggcggcgccaagggtggtgggtcccaaaactgtttccccgtaaagagttcccccgcccggtcgcaggaagacgcctgagggggcgctcggagggatccccagcagccgccggggctggaccgtgcggtgcgcaggtgagaagccgggaggggccggacaaccccgaccgcgagccggacccctgctctgaccgcaggtgttctattactcaacaggaatcttcaaggatgcaggtgttcaacagcccatctatgccaccatcagcgcgggtgtggttaatactatcttcactttactttctctatttctggtggaaagggcaggaagaaggactctgcatatgataggccttggagggatggctttttgttccacgctcatgactgtttctttgttattaaagaatcactataatgggatgagctttgtctgtattggggctatcttggtctttgtggcctgttttgaaattggaccaggccccattccctggtttattgtggccgaactcttcagccagggcccccgcccagctgcgatggcagtggccggctgctccaactggacctccaacttcctagtcggattgctcttcccctctgctgcttactatttaggagcctacgtttttattatcttcaccggcttcctcattaccttcttggcctttaccttcttcaaagtccctgagacccgtggcaggacttttgaggatatcacacgggcctttgaagggcaggcacacggtgcagatagatctgggaaggacggcgtcatggggatgaacagcatcgagcctgctaaggagaccaccaccaatgtctaagtcatgcctccttccacctccctcccggcatgggaaagccacctctccctcaacaagggagagactttatcaggatgaacccaggactgcttctgaatgctgctacttgatttctttctcatcccacgcactccatgagcaccccaaggctgcagtttgttggatcttcaatggctttttaaattttatttcctggacatcctcttctgcttaggagagaccgagtgaacctaccttcatttcaggagggattggccgcttggcacatgacaactttgccagcttttcctcccttgggttctgatattgccgcactagaggatataggagaggaaaagtaaggtgcagttgccccaacctcagacttaccaggaagcagatacatatgagtgtggaagccggagggtgtttatgtaagagcaccttcctcacttccatacagctctacgcggcaaattaacttgagttttatttatcttatcctctggtttaattacataaatatttattttttaagtgtaattttgccaaataataaaaacagaaggaaattgagattagagggaggtgtttaaagagaggttatagagtaaaagatttgatgctggagaggttaaggtgcaataagaattcagggagaaatgttgttcattattggagggtaaatgatgtggtgcctgaggtctgtacattacctcttaacaatttctgtccttcagatggaaactctttgatttctcagaaaagttgtatgcctatttaataaagctactcatttcctttggaa

SEQ ID NO: 28670 - DNA, 1613 bp, Homo sapiens
  source 1..1613: mol_type = unassigned DNA
aggtcaccccagctctgatctttgccatcacagttgctacaatcggctctttccagtttggctacaacactggggtcatcaatgctcctgagacggcgcaattcaatgctgattgtcaacctgttggctgccactggtggctgccttatgggactgtgtaaaatagctgagtcagttgaaatgctgatcctgggccgcttggttattggcctcttctgcggactctgcacaggttttgtgcccatgtacattggagagatctcgcctactgccctgaggggtgcctttggcactctcaaccagctgggcatagttattggaattctggtggcccagatctttggtctggaactcatccttgggtctgaagagctatggccggtgctattaggctttaccatccttccagctatcctgcaaagtgcagcccttccatgttgccctgaaagtcccagatttttgctcattaacagaaaaaaagaggagaatgctacgcggatcctccagcggttgtggggcacccaggatgtatcccaagacatccaggagatgaaagatgagagtgcaaggatgtcacaagaaaagcaagtcaccgtgctggagctctttagagtgtccagctaccgacagcccatcatcatttccattgtgctccagctctctcagcagctctctgggatcaatgctgtgttctattactcaacaggaatcttcaaggatgcaggtgttcaacagcccatctatgccaccatcagcgcgggtgtggttaatactatcttcactttactttctctatttctggtggaaagggcaggaagaaggactctgcatatgataggccttggagggatggctttttgttccacgctcatgactgtttctttgttattaaagaatcactataatgggatgagctttgtctgtattggggctatcttggtctttgtggcctgttttgaaattggaccaggccccattccctggtttattgtggccgaactcttcagccagggcccccgcccagctgcgatggcagtggccggctgctccaactggacctccaacttcctagtcggattgctcttcccctctgctgcttactatttaggagcctacgtttttattatcttcaccggcttcctcattaccttcttggcctttaccttcttcaaagtccctgagacccgtggcaggacttttgaggatatcacacgggcctttgaagggcaggcacacggtgcagatagatctgggaaggacggcgtcatggggatgaacagcatcgagcctgctaaggagaccaccaccaatgtctaagtcatgcctccttccacctccctcccggcatgggaaagccacctctccctcaacaagggagagactttatcaggatgaacccaggactgcttctgaatgctgctacttgatttctttctcatcccacgcactccatgagcaccccaaggctgcagtttgttggatcttcaatggctttttaaattttatttcctggacatcctcttctgcttaggagagaccgagtgaacctaccttcatttcaggagggattggccgcttggcacatgacaactttgccagcttttcctcccttg

SEQ ID NO: 28671 - DNA, 682 bp, Homo sapiens
  source 1..682: mol_type = unassigned DNA
tgaccgcaggtgggtgcttgtcttgcttacggagggctcccgatgaaccgagtcacgttttgtaaccacattaacggaccattcaaagtcgaatcctaggcttttcgaggcagttagtgggtcccaacggctgcaggcggggccggcgggggcgcagcggcccgggaggaagcagtaccttgaagagaaattggagagggagtcaattcctaggatagcagagagatggacaacagacagaatgtcaccccagctctgatctttgccatcacagttgctacaatcggctctttccagtttggctacaacactggggtcatcaatgctcctgagacgatcataaaggaatttatcaataaaactttgacggacaaggcaaatgcccctccctctgaggtgctgctcacgaatctctggtccttgtctgtggccatattttccgtcgggggtatgatcggctccttttccgtcggactctttgttaaccgctttggcaggcgcaattcaatgctgattgtcaacctgttggctgccactggtggctgccttatgggactgtgtaaaatagctgagtcagttgaaatgctgatcctgggccgcttggttattggcctcttctgcggactctgcacaggttttgtgcccatgtacattggagagatctcgcctactgccctgaggg

SEQ ID NO: 28672 - DNA, 580 bp, Homo sapiens
  source 1..580: mol_type = unassigned DNA
tttggcaggagacctgaatgaaatgagggagccttgggagcatgatccaggcggagggaactggattcgggaggaggaactgccttggccttgaaagatacctaccaggagttcaagtgctgtgcgggtgcatcagctttgtagatttgtgcaagatgaaaattggaattgtcttaggaaattatggatcattcatttattcagtgctggattcattcagtgatttatgtctgaagtgtgacagaaggggagtaaggccaagtgtccttggaagcagtaccttgaagagaaattggagagggagtcaattcctaggatagcagagagatggacaacagacagaatgtcaccccagctctgatctttgccatcacagttgctacaatcggctctttccagtttggctacaacactggggtcatcaatgctcctgagacgatcataaaggaatttatcaataaaactttgacggacaaggcaaatgcccctccctctgaggtgctgctcacgaatctctggtccttgtctgtggccatattttccgtcgggggtatgatcggctccttttccgtcggactct

SEQ ID NO: 28673 - DNA, 4125 bp, Homo sapiens
  source 1..4125: mol_type = unassigned DNA
agtcgcggggtctgggaggagacctgaatgaaatgagggagccttgggagcatgatccaggcggagggaactggattcgggaggaggaactgccttggccttgaaagatacctaccaggagttcaagtgctgtgcgggtgcatcagctttgtagatttgtgcaagatgaaaattggaattgtcttaggaaattatggatcattcatttattcagtgctggattcattcagtgatttatgtctgaagtgtgacagaaggggagtaaggccaagtgtccttgccctctattggagattctgcctcccctgggacagatggcttcttgagcacactcccacgatgggtggctgctctggtacatctcatccacttcttcatctgtgaagctgtcacccatggtggtgagcagctcctggaggtggtcctcatgaatgaaacctgaggattcctcgttgaagcaggtattcatccatggggttcttccgcggtgaagccagcttgtcgtgctgtcccccttgtcattgaagccatcatggttctggtcaatcatgttgaaagcctccttaaactcctggatgtggaactggtcgaacatcacgaagacattggatgtggccccttgtgctgtggtcgcttcttggtggtcttggctttggtccacttgctgaacattttggcttcaggaagcagtaccttgaagagaaattggagagggagtcaattcctaggatagcagagagatggacaacagacagaatagatggagtttcacaatggtggccatgtgtctggaattggtgggttcttggtctcactgacttcaagaatgaagccgcacaccctcgcagtcaccccagctctgatctttgccatcacagttgctacaatcggctctttccagtttggctacaacactggggtcatcaatgctcctgagacgatcataaaggaatttatcaataaaactttgacggacaaggcaaatgcccctccctctgaggtgctgctcacgaatctctggtccttgtctgtggccatattttccgtcgggggtatgatcggctccttttccgtcggactctttgttaaccgctttggcaggcgcaattcaatgctgattgtcaacctgttggctgccactggtggctgccttatgggactgtgtaaaatagctgagtcagttgaaatgctgatcctgggccgcttggttattggcctcttctgcggactctgcacaggttttgtgcccatgtacattggagagatctcgcctactgccctgaggggtgcctttggcactctcaaccagctgggcatagttattggaattctggtggcccagatctttggtctggaactcatccttgggtctgaagagctatggccggtgctattaggctttaccatccttccagctatcctgcaaagtgcagcccttccatgttgccctgaaagtcccagatttttgctcattaacagaaaaaaagaggagaatgctacgcggatcctccagcggttgtggggcacccaggatgtatcccaagacatccaggagatgaaagatgagagtgcaaggatgtcacaagaaaagcaagtcaccgtgctggagctctttagagtgtccagctaccgacagcccatcatcatttccattgtgctccagctctctcagcagctctctgggatcaatgctgtgttctattactcaacaggaatcttcaaggatgcaggtgttcaacagcccatctatgccaccatcagcgcgggtgtggttaatactatcttcactttactttctctatttctggtggaaagggcaggaagaaggactctgcatatgataggccttggagggatggctttttgttccacgctcatgactgtttctttgttattaaagaatcactataatgggatgagctttgtctgtattggggctatcttggtctttgtggcctgttttgaaattggaccaggccccattccctggtttattgtggccgaactcttcagccagggcccccgcccagctgcgatggcagtggccggctgctccaactggacctccaacttcctagtcggattgctcttcccctctgctgcttactatttaggagcctacgtttttattatcttcaccggcttcctcattaccttcttggcctttaccttcttcaaagtccctgagacccgtggcaggacttttgaggatatcacacgggcctttgaagggcaggcacacggtgcagatagatctgggaaggacggcgtcatggggatgaacagcatcgagcctgctaaggagaccaccaccaatgtctaagtcatgcctccttccacctccctcccggcatgggaaagccacctctccctcaacaagggagagactttatcaggatgaacccaggactgcttctgaatgctgctacttgatttctttctcatcccacgcactccatgagcaccccaaggctgcagtttgttggatcttcaatggctttttaaattttatttcctggacatcctcttctgcttaggagagaccgagtgaacctaccttcatttcaggagggattggccgcttggcacatgacaactttgccagcttttcctcccttgggttctgatattgccgcactagaggatataggagaggaaaagtaaggtgcagttgccccaacctcagacttaccaggaagcagatacatatgagtgtggaagccggagggtgtttatgtaagagcaccttcctcacttccatacagctctacgcggcaaattaacttgagttttatttatcttatcctctggtttaattacataaatatttattttttaagtgtaattttgccaaataataaaaacagaaggaaattgagattagagggaggtgtttaaagagaggttatagagtaaaagatttgatgctggagaggttaaggtgcaataagaattcagggagaaatgttgttcattattggagggtaaatgatgtggtgcctgaggtctgtacattacctcttaacaatttctgtccttcagatggaaactctttgatttctcagaaaagttgtatgcctatttaataaagctactcatttcctttggaactttatctttaagataatagtttacatgtagtagtacttgaaatctaggattattaactaatatgggcattgtagttaatggcggttgatgggttctaattttggatggagtccagggaagagaaagtgatttctagaaagcctgttcccctcactggacgaaataactccttgtagtagtctcattacttttgaagtaatcccgccacctatctagtgggagagccatccaaatgagaaacctaaaataattggttcttggtagagattcattatttctccactttgttctttaggagattttaggtgttgattttctgttttattttaactcatacctttaaaggaattccccaaagaatgtttacagcaaacttggaatttgtaacctcagctctgggagaggatttttttctgagcgattattatctaaagtgtgttgttgctttaggctcacggcacgcttgcgtatgtctgttaccatgtcactgtggtcctatgccgaatgccctcaggggacttgaatctttccaataaaccaggtttagacagtatgagtcaatgtgcagtgcagcccacacttgagaggatgaatgtatgtgcactgtcactttgctctgggtggaagtatgttattgttgacttattttctctgtgtttgttcctacagcccctttttcatatgttgctcagtctccctttcccttcttggtgcttacacatctcagaccctttagccaaacccttgccagtgacagtattttggttctcagttctcactgttccctctgctcctggagcctttgaataaaaatgcacgtagctatggagtggggtttagctggaaaggtggccttccaacttcacgtcaacttctggctcctcagtttggcagtaaggcagggaagttgttttcctatttctcactgagaagattgtgaatatttccatatggattttccattattgtttgtttgattctttgttttaaaataaaaattctgaatgtacatga

SEQ ID NO: 28674 - DNA, 854 bp, Homo sapiens
  source 1..854: mol_type = unassigned DNA
gcagcggcccgggaggtgcgtggttgagcgaagccgcggggcccaaccgcagtcgcggggtctgggaggtattcatccatggggttcttccgcggtgaagccagcttgtcgtgctgtcccccttgtcattgaagccatcatggttctggtcaatcatgttgaaagcctccttaaactcctggatgtggaactggtcgaacatcacgaagacattggatgtggccccttgtgctgtggtcgcttcttggtggtcttggctttggtccacttgctgaacattttggcttcaggaagcagtaccttgaagagaaattggagagggagtcaattcctaggatagcagagagatggacaacagacagaatgtcaccccagctctgatctttgccatcacagttgctacaatcggctctttccagtttggctacaacactggggtcatcaatgctcctgagacgatcataaaggaatttatcaataaaactttgacggacaaggcaaatgcccctccctctgaggtgctgctcacgaatctctggtccttgtctgtggccatattttccgtcgggggtatgatcggctccttttccgtcggactctttgttaaccgctttggcaggcgcaattcaatgctgattgtcaacctgttggctgccactggtggctgccttatgggactgtgtaaaatagctgagtcagttgaaatgctgatcctgggccgcttggttattggcctcttctgcggactctgcacaggttttgtgcccatgtacattggagagatctcgcctactgccctgaggggtgcctttggcactctcaaccagctgggcatagttattggaattctggtg

SEQ ID NO: 28675 - DNA, 3915 bp, Homo sapiens
  source 1..3915: mol_type = unassigned DNA
gtggggtggggtggggctgggggcttgtcgccctttcaggctccaccctttgcggagattataaatagtcatgatcccagcgagacccagagatgctgtaatggtaagactttggatccttcctgaggacgtggagaaaacttgctgctgagaaggacattttgaaggttttgttggctgaaaaagctgtttctggaatcacccctagatctttcttgaagacttgaattagattacagcgatggggacacagaaggtcaccccagctctgatatttgccatcacagttgctacaatcggctctttccaatttggctacaacactggggtcatcaatgctcctgagaagatcataaaggaatttatcaataaaactttgacggacaagggaaatgccccaccctctgaggtgctgctcacgtctctctggtccttgtctgtggccatattttccgtcgggggtatgatcggctccttttccgtcggactcttcgtcaaccgctttggcaggcgcaattcaatgctgattgtcaacctgttggctgtcactggtggctgctttatgggactgtgtaaagtagctaagtcggttgaaatgctgatcctgggtcgcttggttattggcctcttctgcggactctgcacaggttttgtgcccatgtacattggagagatctcgcctactgccctgcggggtgcctttggcactctcaaccagctgggcatcgttgttggaattctggtggcccagatctttggtctggaattcatccttgggtctgaagagctatggccgctgctactgggttttaccatccttcctgctatcctacaaagtgcagcccttccattttgccctgaaagtcccagatttttgctcattaacagaaaagaagaggagaatgctaagcagatcctccagcggttgtggggcacccaggatgtatcccaagacatccaggagatgaaagatgagagtgcaaggatgtcacaagaaaagcaagtcaccgtgctagagctctttagagtgtccagctaccgacagcccatcatcatttccattgtgctccagctctctcagcagctctctgggatcaatgctgtgttctattactcaacaggaatcttcaaggatgcaggtgttcaagagcccatctatgccaccatcggcgcgggtgtggttaatactatcttcactgtagtttctctatttctggtggaaagggcaggaagaaggactctgcatatgataggccttggagggatggctttttgttccacgctcatgactgtttctttgttattaaaggataactataatgggatgagctttgtctgtattggggctatcttggtctttgtagccttctttgaaattggaccaggccccattccctggtttattgtggccgaactcttcagccagggcccccgcccagctgcgatggcagtggccggctgctccaactggacctccaacttcctagtcggattgctcttcccctccgctgctcactatttaggagcctacgtttttattatcttcaccggcttcctcattaccttcttggcttttaccttcttcaaagtccctgagacccgtggcaggacttttgaggatatcacacgggcctttgaagggcaggcacacggtgcagatagatctggaaaggacggcgtcatggagatgaacagcatcgagcctgctaaggagaccaccaccaatgtctaagtcgtgcctccttccacctccctcccggcatgggaaagccacctctccctcaacaagggagagacctcatcaggatgaacccaggacgcttctgaatgctgctacttaattcctttctcatcccacgcactccatgagcaccccaaggctgcggtttgttggatcttcaatggctttttaaattttatttcctggacatcctcttctgcttaggagagaccgagtgaacctaccttcatttcaggagggattggccgcttggcacatgacaactttgccagcttttcctcccttgggttctgatattgccgcactaggggatataggagaggaaaagtaaggtgcagttcccccaacctcagacttaccaggaagcagatacatatgagtgtggaagccggagggtgtttatgtaagagcaccttcctcacttccatacagctctacgtggcaaattaacttgagttttatttattttatcctctggtttaattacataattttttttttttaactttaagtttcaggatacatgtgccgaatgtgcaggtttgttacataggtatatatatgccatgatggaaatatttatttttttaagcgtaattttgccaaataataaaaacagaaggaaattgagattagagggaggtgtttaaagagaggttatagagtagaagatttgatgctggagaggttaaggtgcaataagaatttagggagaaatgttgttcattattggagggtaaatgatgtggtgcctgaggtctgtacgttacctcttaacaatttctgtccttcagatggaaactctttaacttctcgtaaaagtcatatacctatataataaagctactgatttcctttggagcttttttctttaagataatagtttacatgtagtagtacttgaaatctaggattattaactaatatgggcattgtagttaatgatggttgatgggttctaattttggatggagtccagggaagagaaagtgatttctagaaagcctgttcccctcactggatgaaataactccttcttgtagtagtctcattacttttgaagtaatcccgccacctatctcgtgggagagccatccaaataagaaacctaaaataattggttcttggtagagattcattatttttccactttgttctttaggagattttaggtgttgattttctgttgtattttaactcatacctttaaaggaattccccaaagaatgtttatagcaaacttggaatttgtaacctcagctctgggagaggatttttttctgagcgattattatctaaagtgtgttgttgctttaggctcacggcacgcttgcgtatgtctgttaccatgtcactgtggtcctatgccgaatgccctcaggggacttgaatctttccaataaaccaggtttagacagtatgagtcaatgtgcagtgtagcccacacttgagaggatgaatgtatgtgcactgtcactttgctctgggtggaagtacgttattgttgacttattttctctgtgtttgttcctacagcccctttttcatatgttgctcagtctccctttcccttcttggtgcttacacatctcagaccctttagccaaacccttgtcagtgacagtattttggttcttagttctcactgttccctctgctcctggagcctttgaataaaaatgcacgtagctgaggccggatgcggtggctcacgcctgtaatcccagcactttgggaggcctaggcgggcggtcaggggttcgagaccagtctggccaacatcgtgaaaccctgtctctactaaaaatgcaaaaattagccgggcgtggtggcgggcgcctgtaatcccagctacttgggaagctgaggcgggagaatcatgtgaacccgggacgcaggggttgcagtgagcggagatcgcatcattgcactctagcctgggccacagggcgagactccgtctcaaaaaaaaaaaaatgcacatagctatcaagtgtgctttagcttgaaaaggtgaccttgcaacttcatgtcaacttctggctcctcaaacagtaggttggcagtaaggcagggtcccatttctcactgagaagattgtgaatatttccatatggattttctattgttactctggttctttgttttaaaataaaaattctgaatgtacacga

SEQ ID NO: 28676 - DNA, 1481 bp, Homo sapiens
  source 1..1481: mol_type = unassigned DNA
agagatgctgtaatggtaagactttggatccttcctgaggacgtggagaaaacttgctgctgagaagatcataaaggaatttatcaataaaactttgacggacaagggaaatgccccaccctctgaggtgctgctcacgtctctctggtccttgtctgtggccatattttccgtcgggggtatgatcggctccttttccgtcggactcttcgtcaaccgctttggcaggcgcaattcaatgctgattgtcaacctgttggctgtcactggtggctgctttatgggactgtgtaaagtagctaagtcggttgaaatgctgatcctgggtcgcttggttattggcctcttctgcggactctgcacaggttttgtgcccatgtacattggagagatctcgcctactgccctgcggggtgcctttggcactctcaaccagctgggcatcgttgttggaattctggtggcccagatctttggtctggaattcatccttgggtctgaagagctatggccgctgctactgggttttaccatccttcctgctatcctacaaagtgcagcccttccattttgccctgaaagtcccagatttttgctcattaacagaaaagaagaggagaatgctaagcagatcctccagcggttgtggggcacccaggatgtatcccaagacatccaggagatgaaagatgagagtgcaaggatgtcacaagaaaagcaagtcaccgtgctagagctctttagagtgtccagctaccgacagcccatcatcatttccattgtgctccagctctctcagcagctctctgggatcaatgctgtgttctattactcaacaggaatcttcaaggatgcaggtgttcaagagcccatctatgccaccatcggcgcgggtgtggttaatactatcttcactgtagtttctctatttctggtggaaagggcaggaagaaggactctgcatatgataggccttggagggatggctttttgttccacgctcatgactgtttctttgttattaaaggataactataatgggatgagctttgtctgtattggggctatcttggtctttgtagccttctttgaaattggaccaggccccattccctggtttattgtggccgaactcttcagccagggcccccgcccagctgcgatggcagtggccggctgctccaactggacctccaacttcctagtcggattgctcttcccctccgctgctcactatttaggagcctacgtttttattatcttcaccggcttcctcattaccttcttggcttttaccttcttcaaagtccctgagacccgtggcaggacttttgaggatatcacacgggcctttgaagggcaggcacacggtgcagatagatctggaaaggacggcgtcatggagatgaacagcatcgagcctgctaaggagaccaccaccaatgtctaagtcgtgcctccttccacctccctcccggcat

SEQ ID NO: 28677 - DNA, 3359 bp, Homo sapiens
  source 1..3359: mol_type = unassigned DNA
ccgctccaccagatccgcgggagccccactgctctccgggtccttggcttgtggctgtgggtcccatcgggcccgccctcgcacgtcactccgggacccccgcggcctccgcaggttctgcgctccaggccggagtcagagactccaggatcggttctttcatcttcgccgcccctgcgcgtccagctcttctaagacgagatgccgtcgggcttccaacagataggctccgaagatggggaaccccctcagcagcgagtgactgggaccctggtccttgctgtgttctctgcggtgcttggctccctgcagtttgggtacaacattggggtcatcaatgcccctcagaaggtgattgaacagagctacaatgagacgtggctggggaggcaggggcctgagggacccagctccatccctccaggcaccctcaccaccctctgggccctctccgtggccatcttttccgtgggcggcatgatttcctccttcctcattggtatcatctctcagtggcttggaaggaaaagggccatgctggtcaacaatgtcctggcggtgctggggggcagcctcatgggcctggccaatgctgctgcctcctatgaaatgctcatccttggacgattcctcattggcgcctactcagggctgacatcagggctggtgcccatgtacgtgggggagattgctcccactcacctgcggggcgccctggggacgctcaaccaactggccattgttatcggcattctgatcgcccaggtgctgggcttggagtccctcctgggcactgccagcctgtggccactgctcctgggcctcacagtgctacctgccctcctgcagctggtcctgctgcccttctgtcccgagagcccccgctacctctacatcatccagaatctcgaggggcctgccagaaagagtctgaagcgcctgacaggctgggccgatgtttctggagtgctggctgagctgaaggatgagaagcggaagctggagcgtgagcggccactgtccctgctccagctcctgggcagccgtacccaccggcagcccctgatcattgcggtcgtgctgcagctgagccagcagctctctggcatcaatgctgttttctattattcgaccagcatcttcgagacagcaggggtaggccagcctgcctatgccaccataggagctggtgtggtcaacacagtcttcaccttggtctcggtgttgttggtggagcgggcggggcgccggacgctccatctcctgggcctggcgggcatgtgtggctgtgccatcctgatgactgtggctctgctcctgctggagcgagttccagccatgagctacgtctccattgtggccatctttggcttcgtggcattttttgagattggccctggccccattccttggttcatcgtggccgagctcttcagccagggaccccgcccggcagccatggctgtggctggtttctccaactggacgagcaacttcatcattggcatgggtttccagtatgttgcggaggctatggggccctacgtcttccttctatttgcggtcctcctgctgggcttcttcatcttcaccttcttaagagtacctgaaactcgaggccggacgtttgaccagatctcagctgccttccaccggacaccctctcttttagagcaggaggtgaaacccagcacagaacttgagtatttagggccagatgagaacgactgaggggccaggcaggggtgggagagccagctctctctacccggcccagagaccccttcctttcctctgcagcactttaaccctctcttccctattatttccgggtggaaaagaatccctgcagcctggtagaattgggaagctgggggaagggtggtctgagcaccccctcattcccctcgtgtgactctcttggattatttatgtgttgtggtttggccgtggccatcagggtgggccactctcccctccctcttccttcccccatcccctttcctccccaccttccccagactcagctccagaataccttcttcgctgctagagaagggggattggagggaagacaggtctagactttctcagtgggacaaaccagagcagagagcaggacaggagacaagaaatccagtttcccaccaccttggactcctcccacaatctgggactttcactgaattcttgccacgcagactctgggcaaaggggtttttttttttttttttttttttttttttgagacagtctcgctctgtcgcccaggctcgagtgcagtggcgtgatcttgcttcactgcaagctgtctcccaggttcacgccattctcctgcctcagcctccggagtagctgggactacaggcgcatgccaccacacctggctaatttattttgtatttttagtatatacgcggtttcaccatgttagccagaatggtctcgatctcctgacctcgtgatctgcctgcctcagcctcccaaagtgctgggattacaggcgtgagccaccgcgcctggcgaagggagttctctcttgacccctgcagggaaaaggactcacctccctcactgcaggctcagccttccagggcaagagggaacaggaaagtatgtgcccatgtgtggcaagatggaaggacggcaggctcccgcctctaggcttggggctctaccccgatggtttcccaaggctgccaagaaggagccctaactttcttcctctcccttcctggaagggtgctgcatccacaggcttttgaccaactaaggcaaagaggggatttgaaaggctgcctggaaacactgggctgggaggagcctttggatatttttatatacgtttgaaaaggggattgagagaagaaaccaaaggtcggttgtactaaatgtatatatatagatacttctataaagtcactgctgaagacaagcatcctattgtggaggtacttgaggatgggctgagacagggaccataactcttcacccctcttcctccctctgtcctgcctcagctcaaggcctcagaatcttctggatgccattgctcatgcccctactcacatttctactcgttgctttattaatagtaaatgctcaataaattgtagctgccagtgccgggcattgctcttggcatttgcagaatactcactctgtgagggaggtgtcagcccatgtcacagatgggcagtgaaacccatgataggggcactcttcaccagggacacagctggagacatggcagcaaggatgccaggccctgcccacggccccacatcccctcctccccaccttcaacagtgagttactagcgattctccaaaacagaagagatggagaccaagaccaca

SEQ ID NO: 28678 - DNA, 1852 bp, Homo sapiens
  source 1..1852: mol_type = unassigned DNA
gattccaatcctaccaaaaggcagagtgggtctggagggcctttcggggcacaggcagcaagtggattctgcgagccagggttcacccccttgcctagtaggcggcgcggcgctccggaatcggggacaccctgccctcgatccgactcgggaaagcagatccaggcgggtcttgccctccgggagctgtccgtccgtcttcgctcacgggcagtgtttcgaggaccggaggctctccgtgggcccccacccccactcctggccgccctccaggacgctgaactttcccttggccccatggatggggaaccccctcagcagcgagtgactgggaccctggtccttgctgtgttctctgcggtgcttggctccctgcagtttgggtacaacattggggtcatcaatgcccctcagaaggtgattgaacagagctacaatgagacgtggctggggaggcaggggcctgagggacccagctccatccctccaggcaccctcaccaccctctgggccctctccgtggccatcttttccgtgggcggcatgatttcctccttcctcattggtatcatctctcagtggcttggaaggaaaagggccatgctggtcaacaatgtcctggcggtgctggggggcagcctcatgggcctggccaatgctgctgcctcctatgaaatgctcatccttggacgattcctcattggcgcctactcagggctgacatcagggctggtgcccatgtacgtgggggagattgctcccactcacctgcggggcgccctggggacgctcaaccaactggccattgttatcggcattctgatcgcccaggtgctgggcttggagtccctcctgggcactgccagcctgtggccactgctcctgggcctcacagtgctacctgccctcctgcagctggtcctgctgcccttctgtcccgagagcccccgctacctctacatcatccagaatctcgaggggcctgccagaaagagtctgaagcgcctgacaggctgggccgatgtttctggagtgctggctgagctgaaggatgagaagcggaagctggagcgtgagcggccactgtccctgctccagctcctgggcagccgtacccaccggcagcccctgatcattgcggtcgtgctgcagctgagccagcagctctctggcatcaatgctgttttctattattcgaccagcatcttcgagacagcaggggtaggccagcctgcctatgccaccataggagctggtgtggtcaacacagtcttcaccttggtctcggtgttgttggtggagcgggcggggcgccggacgctccatctcctgggcctggcgggcatgtgtggctgtgccatcctgatgactgtggctctgctcctgctggagcgagttccagccatgagctacgtctccattgtggccatctttggcttcgtggcattttttgagattggccctggccccattccttggttcatcgtggccgagctcttcagccagggaccccgcccggcagccatggctgtggctggtttctccaactggacgagcaacttcatcattggcatgggtttccagtatgttgcggtaggtccccccgccccagcctcccacaccgtaggccagaggtgggcatcacacagctagcccacctgcttccccgtcagggactcctccagccacagaccatgggtctttgggtcagtttggtggaccacctgctccacagaatcaaagcaaggaagggagctgacctagattggatagtaactgaggtgtctgaaacgcaccagtggcataacttaccttactccaagaataaaatgatacactttgcattaatact

SEQ ID NO: 28679 - DNA, 2301 bp, Homo sapiens
  source 1..2301: mol_type = unassigned DNA
ctgagcgccctccgctcgccccgagagagacccggccatgcaggagccgctgctgggagccgagggcccggactacgacaccttccccgagaagccgcccccgtcgccaggggacagggcgcgggtcgggaccctgcagaacaaaagggtgttcctggccaccttcgccgcagtgctcggcaatttcagctttgggtatgccctggtctacacatcccctgtcatcccagccctggagcgctccttggatcctgacctgcatctgaccaaatcccaggcatcctggtttgggtccgtgttcaccctgggagcagcggccggaggcctgagtgccatgatcctcaacgacctcctgggccggaagctgagcatcatgttctcagctgtgccgtcggcggccggctatgcgctcatggcgggtgcgcacggcctctggatgctgctgctcggaaggacgctgacgggcttcgccggggggctcacagctgcctgcatcccggtgtacgtgtctgagattgctcccccaggcgttcgtggggctctgggggccacaccccagctcatggcagtgttcggatccctgtccctctacgcccttggcctcctgctgccgtggcgctggctggctgtggccggggaggcgcctgtgctcatcatgatcctgctgctcagcttcatgcccaactcgccgcgcttcctgctctctcggggcagggacgaagaggccctgcgggcgctggcctggctgcgtgggacggacgtcgatgtccactgggagttcgagcagatccaggacaacgtccggagacagagcagccgagtatcgtgggctgaggcacgggccccacacgtgtgccggcccatcaccgtggccttgctgatgcgcctcctgcagcagctgacgggcatcacgcccatcctggtctacctgcagtccatcttcgacagcaccgctgtcctgctgccccccaaggacgacgcagccatcgttggggccgtgcggctcctgtccgtgctgatcgccgccctcaccatggacctcgcaggccgcaaggtgctgctcttcgtctcaggctacgccgtgggctggggtcccatcacctggctgctcatgtctgaggtcctgcccctgcgtgcccgtggcgtggcctcagggctctgcgtgctggccagctggctcaccgccttcgtcctcaccaagtccttcctgccagtggtgagcaccttcggcctccaggtgcctttcttcttcttcgcggccatctgcttggtgagcctggtgttcacaggctgctgtgtgcccgagaccaagggacggtccctggagcagatcgagtccttcttccgcacggggagaaggtccttcttgcgctaggtcaaggtccccgcctggagggggccaaacccccagtggctgggcctctgtgttggctacaaacctgcaccctgggaccaagaggcagcagtcatccctgccaccagccagagcacaggaagagcagtgtgatggggcctcagcagcgggtgcccctggctcgggacaggtagcactgctgtccagccacagccccagcccaggcagcccacagtgctgcacgtagccatgggccgcaggagtgcatacaaccctgcatccagggacacggccctgctgggtgacctcaggcctagtccctttcccttgcgtgaaggacacgccccacagaaggctacggggaggactgagaggacagggctggaggcagccaagtaacgtagtcatatcatcgcgctctgatctggtggcatctggctgtgcaaggaagacccggctttgccctcacaagtcttatgggcaccacagggaacatcctggacttaaaaagccagggcaggccgggcacagtggctcacgcctgtaatcccagcactttgggaggccaaagcaggtggattacccaaggccaggagttcaagaccagcctggccaacatggtgaaaccccgtctctactaaaaaatacaaaaaagctgggtgtggtggcacacacccgtagttccagctacttgggaggctgaggcagcattgcttgaacccgggaggtggaggctgcaatgagctgagatcatgccattgcactccagcctgggcaacgagagtgaaactccgtccccaccccctgccaaaaaaaaaaaaaaaaaagccagggcaaaggacctggcgtggccacttcctcctgccccagcccaacctctgggaacaggcagctcctatctgcaaactgtgttcacccttttgtaaaaataaaggaactggacctgt

SEQ ID NO: 28680 - DNA, 2528 bp, Homo sapiens
  source 1..2528: mol_type = unassigned DNA
cggtgccctcggagctgctggccccgggcggctgctccagtctgagcgccctccgctcgccccgagagagacccggccatgcaggagccgctgctgggagccgagggcccggactacgacaccttccccgagaagccgcccccgtcgccaggggacagggcgcgggtcgggaccctgcagaacaaaagggtgttcctggccaccttcgccgcagtgctcggcaatttcagctttgggtatgccctggtctacacatcccctgtcatcccagccctggagcgctccttggatcctgacctgcatctgaccaaatcccaggcatcctggtttgggtccgtgttcaccctgggagcagcggccggaggcctgagtgccatgatcctcaacgacctcctgggccggaagctgagcatcatgttctcagctgtgccgtcggcggccggctatgcgctcatggcgggtgcgcacggcctctggatgctgctgctcggaaggacgctgacgggcttcgccggggggctcacagctgcctgcatcccggtgtacgtgtctgagattgctcccccaggcgttcgtggggctctgggggccacaccccagctcatggcagtgttcggatccctgtccctctacgcccttggcctcctgctgccgtggcgctggctggctgtggccggggaggcgcctgtgctcatcatgatcctgctgctcagcttcatgcccaactcgccgcgcttcctgctctctcggggcagggacgaagaggccctgcgggcgctggcctggctgcgtgggacggacgtcgatgtccactgggagttcgagcagatccaggacaacgtccggagacagagcagccgagtatcgtgggctgaggcacgggccccacacgtgtgccggcccatcaccgtggccttgctgatgcgcctcctgcagcagctgacgggcatcacgcccatcctggtctacctgcagtccatcttcgacagcaccgctgtcctgctgccccccaaggacgacgcagccatcgttggggccgtgcggctcctgtccgtgctgatcgccgccctcaccatggacctcgcaggccgcaaggtgctgctcttcgtctcagcggccatcatgtttgctgccaacctgactctggggctgtacatccactttggccccaggcctctgagccccaacagcactgcgggcctggaaagcgagtcctggggggacttggcgcagcccctggcagcacccgctggctacctcaccctggtgcccctgctggccaccatgctcttcatcatgggctacgccgtgggctggggtcccatcacctggctgctcatgtctgaggtcctgcccctgcgtgcccgtggcgtggcctcagggctctgcgtgctggccagctggctcaccgccttcgtcctcaccaagtccttcctgccagtggtgagcaccttcggcctccaggtgcctttcttcttcttcgcggccatctgcttggtgagcctggtgttcacaggctgctgtgtgcccgagaccaagggacggtccctggagcagatcgagtccttcttccgcacggggagaaggtccttcttgcgctaggtcaaggtccccgcctggagggggccaaacccccagtggctgggcctctgtgttggctacaaacctgcaccctgggaccaagaggcagcagtcatccctgccaccagccagagcacaggaagagcagtgtgatggggcctcagcagcgggtgcccctggctcgggacaggtagcactgctgtccagccacagccccagcccaggcagcccacagtgctgcacgtagccatgggccgcaggagtgcatacaaccctgcatccagggacacggccctgctgggtgacctcaggcctagtccctttcccttgcgtgaaggacacgccccacagaaggctacggggaggactgagaggacagggctggaggcagccaagtaacgtagtcatatcatcgcgctctgatctggtggcatctggctgtgcaaggaagacccggctttgccctcacaagtcttatgggcaccacagggaacatcctggacttaaaaagccagggcaggccgggcacagtggctcacgcctgtaatcccagcactttgggaggccaaagcaggtggattacccaaggccaggagttcaagaccagcctggccaacatggtgaaaccccgtctctactaaaaaatacaaaaaagctgggtgtggtggcacacacccgtagttccagctacttgggaggctgaggcagcattgcttgaacccgggaggtggaggctgcaatgagctgagatcatgccattgcactccagcctgggcaacgagagtgaaactccgtccccaccccctgccaaaaaaaaaaaaaaaaaagccagggcaaaggacctggcgtggccacttcctcctgccccagcccaacctctgggaacaggcagctcctatctgcaaactgtgttcacccttttgtaaaaataaaggaactggacctgt

SEQ ID NO: 28681 - DNA, 588 bp, Homo sapiens
  source 1..588: mol_type = unassigned DNA
cgagagagacccggccatgcaggagccgctgctgggagccgagggcccggactacgacaccttccccgagaagccgcccccgtcgccaggggacagggcgcgggtcggtccgtgttcaccctgggagcagcggccggaggcctgagtgccatgatcctcaacgacctcctgggccggaagctgagcatcatgttctcagctgtgccgtcggcggccggctatgcgctcatggcgggtgcgcacggcctctggatgctgctgctcggaaggacgctgacgggcttcgccggggggctcacagctgcctgcatcccggggctgactctcccatctcggccgggcctaggaaccagtattttcagcaaaacctggtgcggcggctgtgtcttgcaggtgtacgtgtctgagattgctcccccaggcgttcgtggggctctgggggccacaccccagctcatggcagtgttcggatccctgtccctctacgcccttggcaaggacgaagaggccctgcgggcgctggcctggctgcgtgggacggacgtcgatgtccactgggagttcgagcagatccaggacaacgtccgg

SEQ ID NO: 28682 - DNA, 727 bp, Homo sapiens
  source 1..727: mol_type = unassigned DNA
ggagctgctggccccgggcggctgctccagtctgagcgccctccgctcgccccgagagagacccggccatgcaggagccgctgctgggagccgagggcccggactacgacaccttccccgagaagccgcccccgtcgccaggggacagggcgcgggtcgggaccctgcagaacaaaagggtgttcctggccaccttcgccgcagtgctcggcaatttcagctttgggtatgccctggtctacacatcccctgtcatcccagccctggagcgctccttggatcctgacctgcatctgaccaaatcccaggcatcctggtttgggtccgtgttcaccctgggagcagcggccggaggcctgagtgccatgatcctcaacgacctcctgggccggaagctgagcatcatgttctcagctgtgccgtcggcggccggctatgcgctcatggcgggtgcgcacggcctctggatgctgctgctcggaaggacgctgacgggcttcgccggggggctcacagctgcctgcatcccggtgtacgtgtctgagattgctcccccaggcgttcgtggggctctgggggccacaccccagctcatggcagtgttcggatccctgtccctctacgcccttgggacgaagaggccctgcgggcgctggcctggctgcgtgggacggacgtcgatgtccactgggagttcgagcagatccaggacaacgtccggagacag

SEQ ID NO: 28683 - DNA, 1539 bp, Homo sapiens
  source 1..1539: mol_type = unassigned DNA
atggagaacaaagaggcgggaacccctccacccattccatccagggaggggcggctccagccgacgctgttgctggcgacactgagcgcggcctttggctcagccttccagtacggctacaacctctctgtggtcaacacgccgcacaaggtcttcaagtcattttacaacgaaacctactttgagcgacacgcaacattcatggacgggaagctcatgctgcttctatggtcttgcaccgtctccatgtttcctctgggcggcctgttggggtcattgctcgtgggcctgctggttgatagctgcggcagaaaggggaccctgctgatcaacaacatctttgccatcatccccgccatcctgatgggagtcagcaaagtggccaaggcttttgagctgatcgtcttttcccgagtggtgctgggagtctgtgcaggcatctcctacagcgcccttcccatgtacctgggagaactggcccccaagaacctgagaggcatggtgggaacaatgaccgaggttttcgtcatcgttggagtcttcctagcacagatcttcagcctccaggccatcttgggcaacccggcaggctggccggtgcttctggcgctcacaggggtgcccgccctgctgcagctgctgaccctgcccttcttccccgaaagcccccgctactccctgattcagaaaggagatgaagccacagcgcgacaagctctgaggaggctgagaggccacacggacatggaggccgagctggaggacatgcgtgcggaggcccgggccgagcgcgccgagggccacctgtctgtgctgcacctctgtgccctgcggtccctgcgctggcagctcctctccatcatcgtgctcatggccggccagcagctgtcgggcatcaatgcgatcaactactatgcggacaccatctacacatctgcgggcgtggaggccgctcactcccaatatgtaacggtgggctctggcgtcgtcaacatagtgatgaccatcacctcggctgtccttgtggagcggctgggacggcggcacctcctgctggccggctacggcatctgcggctctgcctgcctggtgctgacggtggtgctcctattccagaacagggtccccgagctgtcctacctcggcatcatctgtgtctttgcctacatcgcgggacattccattgggcccagtcctgtcccctcggtggtgaggaccgagatcttcctgcagtcctcccggcgggcagctttcatggtggacggggcagtgcactggctcaccaacttcatcataggcttcctgttcccatccatccaggaggccatcggtgcctacagtttcatcatctttgccggaatctgcctcctcactgcgatttacatctacgtggttattccggagaccaagggcaaaacatttgtggagataaaccgcatttttgccaagagaaacagggtgaagcttccagaggagaaagaagaaaccattgatgctgggcctcccacagcctctcctgccaaggaaacttccttttag

SEQ ID NO: 28684 - DNA, 1447 bp, Homo sapiens
  source 1..1447: mol_type = unassigned DNA
atgacatgcagtctcggaaaggtctacatctccgaaatcgcctacccagcagtccgggggttgctcggctcctgtgtgcagctaatggtcgtcgtcggcatcctcctggcctacctggcaggctgggtgctggagtggcgctggctggctgtgctgggctgcgtgcccccctccctcatgctgcttctcatgtgcttcatgcccgagaccccgcgcttcctgctgactcagcacaggcgccaggaggccatggccgccctgcggttcctgtggggctccgagcagggctgggaagacccccccatcggggctgagcagagctttcacctggccctgctgcggcagcccggcatctacaagcccttcatcatcggcgtctccctgatggccttccagcagctgtcgggggtcaacgccgtcatgttctatgcagagaccatctttgaagaggccaagttcaaggacagcagcctggcctcggtcgtcgtgggtgtcatccaggtgctgttcacagctgtggcggctctcatcatggacagagcagggcggaggctgctcctggtcttgtcaggtgtggtcatggtgttcagcacgagtgccttcggcgcctacttcaagctgacccagggtggccctggcaactcctcgcacgtggccatctcggcgcctgtctctgcacagcctgttgatgccagcgtggggctggcctggctggccgtgggcagcatgtgcctcttcatcgccggctttgcggtgggctgggggcccatcccctggctcctcatgtcagagatcttccctctgcatgtcaagggcgtggcgacaggcatctgcgtcctcaccaactggctcatggcctttctcgtgaccaaggagttcagcagcctcatggaggtcctcaggccctatggagccttctggcttgcctccgctttctgcatcttcagtgtccttttcactttgttctgtgtccctgaaactaaaggaaagactctggaacaaatcacagcccattttgaggggcgatgacagccactcactaggggatggagcaagcctgtgactccaagctgggcccaagcccagagcccctgcctgccccaggggagccagaatccagccccttggagccttggtctgcagggtccctccttcctgtcatgctccctccagcccatgacccggggctaggaggctcactgcctcctgttccagctcctgctgctgctctgaggactcaggaacaccttcgagctttgcagacctgcggtcagccctccatgcgcaagactaaagcagcggaagaggaggtgggcctctaggatctttgtcttctggctggaggtgcttttggaggttgggtgctgggcattcagtcgctcctctcacgcggctgccttatcgggaaggaaatttgtttgccaaataaagactgacacagaaaatc

SEQ ID NO: 28685 - DNA, 914 bp, Homo sapiens
  source 1..914: mol_type = unassigned DNA
ccgacatgacgcccgaggacccagaggaaacccagccgcttctggggcctcctggcggcaggtctacatctccgaaatcgcctacccagcagtccgggggttgctcggctcctgtgtgcagctaatggtcgtcgtcggcatcctcctggcctacctggcagagctttcacctggccctgctgcggcagcccggcatctacaagcccttcatcatcggcgtctccctgatggccttccagcagctgtcgggggtcaacgccgtcatgttctatgcagagaccatctttgaagaggccaagttcaaggacagcagcctggcctcggtcgtcgtgggtgtcatccaggtgctgttcacagctgtggcggctctcatcatggacagagcagggcggaggctgctcctggtcttgtcaggtgtggtcatggtgttcagcacgagtgccttcggcgcctacttcaagctgacccagggtggccctggcaactcctcgcacgtggccatctcggcgcctgtctctgcacagcctgttgatgccagcgtggggctggcctggctggccgtgggcagcatgtgcctcttcatcgccggctttgcggtgggctgggggcccatcccctggctcctcatgtcagagatcttccctctgcatgtcaagggcgtggcgacaggcatctgcgtcctcaccaactggctcatggcctttctcgtgaccaaggagttcagcagcctcatggaggtcctcaggccctatggagccttctggcttgcctccgctttctgcatcttcagtgtccttttcactttgttctgtgtccctgaaactaaaggaaagactctggaacaaatcacagcccattttgaggggcgatgacagccactcactaggggatggagcaagcctgtgactccaagc

SEQ ID NO: 28686 - DNA, 1937 bp, Homo sapiens
  source 1..1937: mol_type = unassigned DNA
atgacgcccgaggacccagaggaaacccagccgcttctggggcctcctggcggcagcgcgccccgcggccgccgcgtcttcctcgccgccttcgccgctgccctgggcccactcagcttcggcttcgcgctcggctacagctccccggccatccctagcctgcagcgcgccgcgcccccggccccgcgcctggacgacgccgccgcctcctggttcggggctgtcgtgaccctgggtgccgcggcggggggagtgctgggcggctggctggtggaccgcgccgggcgcaagctgagcctcttgctgtgctccgtgcccttcgtggccggctttgccgtcatcaccgcggcccaggacgtgtggatgctgctggggggccgcctcctcaccggcctggcctgcggtgttgcctccctagtggccccggtctacatctccgaaatcgcctacccagcagtccgggggttgctcggctcctgtgtgcagctaatggtcgtcgtcggcatcctcctggcctacctggcaggctgggtgctggagtggcgctggctggctgtgctgggctgcgtgcccccctccctcatgctgcttctcatgtgcttcatgcccgagaccccgcgcttcctgctgactcagcacaggcgccaggaggccatggccgccctgcggttcctgtggggctccgagcagggctgggaagacccccccatcggggctgagcagagctttcacctggccctgctgcggcagcccggcatctacaagcccttcatcatcggcgtctccctgatggccttccagcagctgtcgggggtcaacgccgtcatgttctatgcagagaccatctttgaagaggccaagttcaaggacagcagcctggcctcggtcgtcgtgggtgtcatccaggtgctgttcacagctgtggcggctctcatcatggacagagcagggcggaggctgctcctggtcttgtcaggtgtggtcatggtgttcagcacgagtgccttcggcgcctacttcaagctgacccagggtggccctggcaactcctcgcacgtggccatctcggcgcctgtctctgcacagcctgttgatgccagcgtggggctggcctggctggccgtgggcagcatgtgcctcttcatcgccggaggtcctcaggccctatggagccttctggcttgcctccgctttctgcatcttcagtgtccttttcactttgttctgtgtccctgaaactaaaggaaagactctggaacaaatcacagcccattttgaggggcgatgacagccactcactaggggatggagcaagcctgtgactccaagctgggcccaagcccagagcccctgcctgccccaggggagccagaatccagccccttggagccttggtctgcagggtccctccttcctgtcatgctccctccagcccatgacccggggctaggaggctcactgcctcctgttccagctcctgctgctgctctgaggactcaggaacaccttcgagctttgcagacctgcggtcagccctccatgcgcaagactaaagcagcggaagaggaggtgggcctctaggatctttgtcttctggctggaggtgcttttggaggttgggtgctgggcattcagtcgctcctctcacgcggctgccttatcgggaaggaaatttgtttgccaaataaagactgacacagaaaatcaggtcagtgtctctgggctttgtgcaagctcagtttgaaaagggtttattcccatcactgcccaggacaccctgtggctttacttgctcatggtcagccaagcttacccttcacactgagaagtcatttctggctacttccttgggctcagttccctgggtcatcagccatcaaatcttgttgagtttaaaaaataaacagcaaaaaaaaacaaaacaaaacaaaaaaaaa

SEQ ID NO: 28687 - DNA, 2172 bp, Homo sapiens
  source 1..2172: mol_type = unassigned DNA
attggctgcgagaggccggtgcgggccgcactcgcagggcccgtggcggttcaggcgccagagctggccgatcggcgttggccgccgacatgacgcccgaggacccagaggaaacccagccgcttctggggcctcctggcggcagcgcgccccgcggccgccgcgtcttcctcgccgccttcgccgctgccctgggcccactcagcttcggcttcgcgctcggctacagctccccggccatccctagcctgcagcgcgccgcgcccccggccccgcgcctggacgacgccgccgcctcctggttcggggctgtcgtgaccctgggtgccgcggcggggggagtgctgggcggctggctggtggaccgcgccgggcgcaagctgagcctcttgctgtgctccgtgcccttcgtggccggctttgccgtcatcaccgcggcccaggacgtgtggatgctgctggggggccgcctcctcaccggcctggcctgcggtgttgcctccctagtggccccggtctacatctccgaaatcgcctacccagcagtccgggggttgctcggctcctgtgtgcagctaatggtcgtcgtcggcatcctcctggcctacctggcaggctgggtgctggagtggcgctggctggctgtgctgggctgcgtgcccccctccctcatgctgcttctcatgtgcttcatgcccgagaccccgcgcttcctgctgactcagcacaggcgccaggaggccatggccgccctgcggttcctgtggggctccgagcagggctgggaagacccccccatcggggctgagcagagctttcacctggccctgctgcggcagcccggcatctacaagcccttcatcatcggcgtctccctgatggccttccagcagctgtcgggggtcaacgccgtcatgttctatgcagagaccatctttgaagaggccaagttcaaggacagcagcctggcctcggtcgtcgtgggtgtcatccaggtgctgttcacagctgtggcggctctcatcatggacagagcagggcggaggctgctcctggtcttgtcaggtgtggtcatggtgttcagcacgagtgccttcggcgcctacttcaagctgacccagggtggccctggcaactcctcgcacgtggccatctcggcgcctgtctctgcacagcctgttgatgccagcgtggggctggcctggctggccgtgggcagcatgtgcctcttcatcgccggctttgcggtgggctgggggcccatcccctggctcctcatgtcagagatcttccctctgcatgtcaagggcgtggcgacaggcatctgcgtcctcaccaactggctcatggcctttctcgtgaccaaggagttcagcagcctcatggaggtcctcaggccctatggagccttctggcttgcctccgctttctgcatcttcagtgtccttttcactttgttctgtgtccctgaaactaaaggaaagactctggaacaaatcacagcccattttgaggggcgatgacagccactcactaggggatggagcaagcctgtgactccaagctgggcccaagcccagagcccctgcctgccccaggggagccagaatccagccccttggagccttggtctgcagggtccctccttcctgtcatgctccctccagcccatgacccggggctaggaggctcactgcctcctgttccagctcctgctgctgctctgaggactcaggaacaccttcgagctttgcagacctgcggtcagccctccatgcgcaagactaaagcagcggaagaggaggtgggcctctaggatctttgtcttctggctggaggtgcttttggaggttgggtgctgggcattcagtcgctcctctcacgcggctgccttatcgggaaggaaatttgtttgccaaataaagactgacacagaaaatcaggtcagtgtctctgggctttgtgcaagctcagtttgaaaagggtttattcccatcactgcccaggacaccctgtggctttacttgctcatggtcagccaagcttacccttcacactgagaagtcatttctggctacttccttgggctcagttccctgggtcatcagccatcaaatcttgttgagtttaaaaaataaacagcaaaaaaaaacaaaacaaaacaaaaaaaaa

SEQ ID NO: 28688 - DNA, 506 bp, Homo sapiens
  source 1..506: mol_type = unassigned DNA
gcggccgccgcgtcttcctcgccgccttcgccgctgccctgggcccactcagcttcggcttcgcgctcggctacagctccccggccatccctagcctgcagcgcgccgcgcccccggccccgcgcctggacgacgccgccgcctcctggttcggggtctacatctccgaaatcgcctacccagcagtccgggggttgctcggctcctgtgtgcagctaatggtcgtcgtcggcatcctcctggcctacctggcaggctgggtgctggagtggcgctggctggctgtgctgggctgcgtgcccccctccctcatgctgcttctcatgtgcttcatgcccgagaccccgcgcttcctgctgactcagcacaggcgccaggaggccatggccgccctgcggttcctgtggggctccgagcagggctgggaagacccccccatcggggctgagcagcagctgtcgggggtcaacgccgtcatgttctatgcagagaccatctttgaagag

SEQ ID NO: 28689 - DNA, 793 bp, Homo sapiens
  source 1..793: mol_type = unassigned DNA
ggccgatcggcgttggccgccgacatgacgcccgaggacccagaggaaacccagccgcttctggggcctcctggcggcagcgcgccccgcggccgccgcgtcttcctcgccgccttcgccgctgccctgggcccactcagcttcggcttcgcgctcggctacagctccccggccatccctagcctgcagcgcgccgcgcccccggccccgcgcctggacgacgccgccgcctcctggttcggggtctacatctccgaaatcgcctacccagcagtccgggggttgctcggctcctgtgtgcagctaatggtcgtcgtcggcatcctcctggcctacctggcaggctgggtgctggagtggcgctggctggctgtgctgggctgcgtgcccccctccctcatgctgcttctcatgtgcttcatgcccgagaccccgcgcttcctgctgactcagcacaggcgccaggaggccatggccgccctgcggttcctgtggggctccgagcagggctgggaagacccccccatcggggctgagcagagctttcacctggccctgctgcggcagcccggcatctacaagcccttcatcatcggcgtctccctgatggccttccagcagctgtcgggggtcaacgccgtcatgttctatgcagagaccatctttgaagaggccaagttcaaggacagcagcctggcctcggtcgtcgtgggtgtcatccaggtgctgttcacagctgtggcggctctcatcatggacagagcagggcggaggctgctcctggtcttgtcag

SEQ ID NO: 28690 - DNA, 933 bp, Homo sapiens
  source 1..933: mol_type = unassigned DNA
caggcctgggggcgcggctccccctggcgggaccttctgggtgccaggcttgaagtccctgcgttatctcgcggtccctcccgtcgaccctgggaaggatcctactgttctctccattttacactgaggtcatgacatgcagtctcggaaaggtctacatctccgaaatcgcctacccagcagtccgggggttgctcggctcctgtgtgcagctaatggtcgtcgtcggcatcctcctggcctacctggcaggctgggtgctggagtggcgctggctggctgtgctgggctgcgtgcccccctccctcatgctgcttctcatgtgcttcatgcccgagaccccgcgcttcctgctgactcagcacaggcgccaggaggccatggccgccctgcggttcctgtggggctccgagcagggctgggaagacccccccatcggggctgagcagagctttcacctggccctgctgcggcagcccggcatctacaagcccttcatcatcggcgtctccctgatggccttccagcagctgtcgggggtcaacgccgtcatgttctatgcagagaccatctttgaagaggccaagttcaaggacagcagcctggcctcggtcgtcgtgggtgtcatccaggtgctgttcacagctgtggcggctctcatcatggacagagcagggcggaggctgctcctggtcttgtcaggtgtggtcatggtgttcagcacgagtgccttcggcgcctacttcaagctgacccagggtggccctggcaactcctcgcacgtggccatctcggcgcctgtctctgcacagcctgttgatgccagcgtggggctggcctggctggccgtgggcagcatgtgcctcttcatcgccggctttgcggtgggctgggggcccatcccctggctcctcatgtcagagatcttccctc

SEQ ID NO: 28691 - DNA, 1030 bp, Homo sapiens
  source 1..1030: mol_type = unassigned DNA
cagctaatggtcgtcgtcggcatcctcctggcctacctggcaggctgggtgctggagtggcgctggctggctgtgctgggctgcgtgcccccctccctcatgctgcttctcatgtgcttcatgcccgagaccccgcgcttcctgctgactcagcacaggcgccaggaggccatggccgccctgcggttcctgtggggctccgagcagggctgggaagacccccccatcggggctgagcagagctttcacctggccctgctgcggcagcccggcatctacaagcccttcatcatcggcgtctccctgatggccttccagcagctgtcgggggtcaacgccgtcatgttctatgcagagaccatctttgaagaggccaagttcaaggacagcagcctggcctcggtcgtcgtgggtgtcatccaggtgctgttcacagctgtggcggctctcatcatggacagagcagggcggaggctgctcctggtcttgtcaggtgtggtcatggtgttcagcacgagtgccttcggcgcctacttcaagctgacccagggtggccctggcaactcctcgcacgtggccatctcggcgcctgtctctgcacagcctgttgatgccagcgtggggctggcctggctggccgtgggcagcatgtgcctcttcatcgccggctttgcggtgggctgggggcccatcccctggctcctcatgtcagagatcttccctctgcatgtcaagggcgtggcgacaggcatctgcgtcctcaccaactggctcatggcctttctcgtgaccaaggagttcagcagcctcatgctcctgctgctgctctgaggactcaggaacaccttcgagctttgcagacctgcggtcagccctccatgcgcaagactaaagcagcggaagaggaggtgggcctctaggatctttgtcttctggctggaggtgcttttggaggttgggtgctgggcattcagtcgctcctctcacgcggctgccttatcgggaaggaaatttgtttgccaaataaaga

SEQ ID NO: 28692 - DNA, 854 bp, Homo sapiens
  source 1..854: mol_type = unassigned DNA
caggcctgggggcgcggctccccctggcgggaccttctgggtgccaggcttgaagtccctgcgttatctcgcggtccctcccgtcgaccctgggaaggatcctactgttctctccattttacactgaggtcatgacatgcagtctcggaaaggtctacatctccgaaatcgcctacccagcagtccgggggttgctcggctcctgtgtgcagctaatggtcgtcgtcggcatcctcctggcctacctggcaggctgggtgctggagtggcgctggctggctgtgctgggctgcgtgcccccctccctcatgctgcttctcatgtgcttcatgcccgagaccccgcgcttcctgctgactcagcacaggcgccaggaggccatggccgccctgcggttcctgtggggctccgagcagggctgggaagacccccccatcggggctgagcagcagctgtcgggggtcaacgccgtcatgttctatgcagagaccatctttgaagaggccaagttcaaggacagcagcctggcctcggtcgtcgtgggtgtcatccaggtgctgttcacagctgtggcggctctcatcatggacagagcagggcggaggctgctcctggtcttgtcaggtgtggtcatggtgttcagcacgagtgccttcggcgcctacttcaagctgacccagggtggccctggcaactcctcgcacgtggccatctcggcgcctgtctctgcacagcctgttgatgccagcgtggggctggcctggctggccgtgggcagcatgtgcctcttcatcgccggctttgcggtgggctgggggcccatcccctggctcctcatgtcagagatcttccct

SEQ ID NO: 28693 - DNA, 992 bp, Homo sapiens
  source 1..992: mol_type = unassigned DNA
ggccggtgcgggccgcactcgcagggcccgtggcggttcaggcgccagagctggccgatcggcgttggccgccgacatgacgcccgaggacccagaggaaacccagccgcttctggggcctcctggcggcaggtctacatctccgaaatcgcctacccagcagtccgggggttgctcggctcctgtgtgcagctaatggtcgtcgtcggcatcctcctggcctacctggcaggctgggtgctggagtggcgctggctggctgtgctgggctgcgtgcccccctccctcatgctgcttctcatgtgcttcatgcccgagaccccgcgcttcctgctgactcagcacaggcgccaggaggccatggccgccctgcggttcctgtggggctccgagcagggctgggaagacccccccatcggggctgagcagagctttcacctggccctgctgcggcagcccggcatctacaagcccttcatcatcggcgtctccctgatggccttccagcagctgtcgggggtcaacgccgtcatgttctatgcagagaccatctttgaagaggccaagttcaaggacagcagcctggcctcggtcgtcgtgggtgtcatccaggtgctgttcacagctgtggcggctctcatcatggacagagcagggcggaggctgctcctggtcttgtcaggtgtggtcatggtgttcagcacgagtgccttcggcgcctacttcaagctgacccagggtggccctggcaactcctcgcacgtggccatctcggcgcctgtctctgcacagcctgttgatgccagcgtggggctggcctggctggccgtgggcagcatgtgcctcttcatcgccggctttgcggtgggctgggggcccatcccctggctcctcatgtcagagatcttccctctgcatgtcaagggcgtggcgacaggcatctgcgtcctcaccaactggctcatggcctttctcgtgaccaaggagttcag

SEQ ID NO: 28694 - DNA, 1850 bp, Homo sapiens
  source 1..1850: mol_type = unassigned DNA
cttggcagagtctggggtccctggactgagccatcagctgggtcactgagacccatggcaaggaaacaaaataggaattccaaggaactgggcctagttcccctcacagatgacaccagccacgccgggcctccagggccagggagggcactgctggagtgtgaccacctgaggagtggggtgccaggtggaaggagaagaaaggactggtcctgctcgctcctcgtggcctccctcgcgggcgccttcggctcctccttcctctacggctacaacctgtcggtggtgaatgcccccaccccgtacatcaaggccttttacaatgagtcatgggaaagaaggcatggacgtccaatagacccagacactctgactttgctctggtctgtgactgtgtccatattcgccatcggtggacttgtggggacgttaattgtgaagatgattggaaaggttcttgggaggaagcacactttgctggccaataatgggtttgcaatttctgctgcattgctgatggcctgctcgctccaggcaggagcctttgaaatgctcatcgtgggacgcttcatcatgggcatagatggaggcgtcgccctcagtgtgctccccatgtaccttagtgagatctcacccaaggagatccgtggctctctggggcaggtgactgccatctttatctgcattggcgtgttcactgggcagcttctgggcctgcccgagctgctgggaaaggagagtacctggccatacctgtttggagtgattgtggtccctgccgttgtccagctgctgagccttccctttctcccggacagcccacgctacctgctcttggagaagcacaacgaggcaagagctgtgaaagccttccaaacgttcttgggtaaagcagacgtttcccaagaggtagaggaggtcctggctgagagccgcgtgcagaggagcatccgcctggtgtccgtgctggagctgctgagagctccctacgtccgctggcaggtggtcaccgtgattgtcaccatggcctgctaccagctctgtggcctcaatgcaatttggttctataccaacagcatctttggaaaagctgggatccctccggcaaagatcccatacgtcaccttgagtacagggggcatcgagactttggctgccgtcttctctggtttggtcattgagcacctgggacggagacccctcctcattggtggctttgggctcatgggcctcttctttgggaccctcaccatcacgctgaccctgcaggaccacgccccctgggtcccctacctgagtatcgtgggcattctggccatcatcgcctctttctgcagtgggccaggtggcatcccgttcatcttgactggtgagttcttccagcaatctcagcggccggctgccttcatcattgcaggcaccgtcaactggctctccaactttgctgttgggctcctcttcccattcattcagaaaagtctggacacctactgtttcctagtctttgctacaatttgtatcacaggtgctatctacctgtattttgtgctgcctgagaccaaaaacagaacctatgcagaaatcagccaggcattttccaaaaggaacaaagcatacccaccagaagagaaaatcgactcagctgtcactgatggtaagataaatggaaggccttaacaagtttcctcctccacgttggacaattatgtcaaaaacaggattgtctacatggatgatctcacttttcaggaaacttaaaatttacccattattgggaagcttaaatgaattgaagctatgcaagtcttttatattattaaatatttaaaagtaaacctgtactaatctaa

SEQ ID NO: 28695 - DNA, 1866 bp, Homo sapiens
  source 1..1866: mol_type = unassigned DNA
gttggctctagggctggcaccaggcactggaattaaacattctggactccagaggggcatgaaaactcttcctgaaggagatgcagaggaagattcgaactggaggaaaaccctaaaataaacaataacaacaaaagttcaaaacctgaaaagtgaaccatgaagctcagtaaaaaggaccgaggagaagatgaagaaagtgattcagcgaaaaagaaattggactggtcctgctcgctcctcgtggcctccctcgcgggcgccttcggctcctccttcctctacggctacaacctgtcggtggtgaatgcccccaccccgtacatcaaggccttttacaatgagtcatgggaaagaaggcatggacgtccaatagacccagacactctgactttgctctggtctgtgactgtgtccatattcgccatcggtggacttgtggggacgttaattgtgaagatgattggaaaggttcttgggaggaagcacactttgctggccaataatgggtttgcaatttctgctgcattgctgatggcctgctcgctccaggcaggagcctttgaaatgctcatcgtgggacgcttcatcatgggcatagatggaggcgtcgccctcagtgtgctccccatgtaccttagtgagatctcacccaaggagatccgtggctctctggggcaggtgactgccatctttatctgcattggcgtgttcactgggcagcttctgggcctgcccgagctgctgggaaaggagagtacctggccatacctgtttggagtgattgtggtccctgccgttgtccagctgctgagccttccctttctcccggacagcccacgctacctgctcttggagaagcacaacgaggcaagagctgtgaaagccttccaaacgttcttgggtaaagcagacgtttcccaagaggtagaggaggtcctggctgagagccgcgtgcagaggagcatccgcctggtgtccgtgctggagctgctgagagctccctacgtccgctggcaggtggtcaccgtgattgtcaccatggcctgctaccagctctgtggcctcaatgcaatttggttctataccaacagcatctttggaaaagctgggatccctccggcaaagatcccatacgtcaccttgagtacagggggcatcgagactttggctgccgtcttctctggtttggtcattgagcacctgggacggagacccctcctcattggtggctttgggctcatgggcctcttctttgggaccctcaccatcacgctgaccctgcaggaccacgccccctgggtcccctacctgagtatcgtgggcattctggccatcatcgcctctttctgcagtgggccaggtggcatcccgttcatcttgactggtgagttcttccagcaatctcagcggccggctgccttcatcattgcaggcaccgtcaactggctctccaactttgctgttgggctcctcttcccattcattcagaaaagtctggacacctactgtttcctagtctttgctacaatttgtatcacaggtgctatctacctgtattttgtgctgcctgagaccaaaaacagaacctatgcagaaatcagccaggcattttccaaaaggaacaaagcatacccaccagaagagaaaatcgactcagctgtcactgatggtaagataaatggaaggccttaacaagtttcctcctccacgttggacaattatgtcaaaaacaggattgtctacatggatgatctcacttttcaggaaacttaaaatttacccattattgggaagcttaaatgaattgaagctatgcaagtcttttatattattaaatatttaaaagtaaacctgtactaatct

SEQ ID NO: 28696 - DNA, 1927 bp, Homo sapiens
  source 1..1927: mol_type = unassigned DNA
ccatgaagagttctagcaccaagtcagtgcaagacccgaggtgttcctgttggctgagtgttggctctagggctggcaccaggcactggaattaaacattctggactccagaggggcatgaaaactcttcctgaaggagatgcagaggaagattcgaactggaggaaaaccctaaaataaacaataacaacaaaagttcaaaacctgaaaagtgaaccatgaagctcagtaaaaaggaccgaggagaagatgaagaaagtgattcagcgaaaaagaaattggactggtcctgctcgctcctcgtggcctccctcgcgggcgccttcggctcctccttcctctacggctacaacctgtcggtggtgaatgcccccaccccgtacatcaaggccttttacaatgagtcatgggaaagaaggcatggacgtccaatagacccagacactctgactttgctctggtctgtgactgtgtccatattcgccatcggtggacttgtggggacgttaattgtgaagatgattggaaaggttcttgggaggaagcacactttgctggccaataatgggtttgcaatttctgctgcattgctgatggcctgctcgctccaggcaggagcctttgaaatgctcatcgtgggacgcttcatcatgggcatagatggaggcgtcgccctcagtgtgctccccatgtaccttagtgagatctcacccaaggagatccgtggctctctggggcaggtgactgccatctttatctgcattggcgtgttcactgggcagcttctgggcctgcccgagctgctgggaaaggagagtacctggccatacctgtttggagtgattgtggtccctgccgttgtccagctgctgagccttccctttctcccggacagcccacgctacctgctcttggagaagcacaacgaggcaagagctgtgaaagccttccaaacgttcttgggtaaagcagacgtttcccaagaggtagaggaggtcctggctgagagccgcgtgcagaggagcatccgcctggtgtccgtgctggagctgctgagagctccctacgtccgctggcaggtggtcaccgtgattgtcaccatggcctgctaccagctctgtggcctcaatgcaatttggttctataccaacagcatctttggaaaagctgggatccctccggcaaagatcccatacgtcaccttgagtacagggggcatcgagactttggctgccgtcttctctggtttggtcattgagcacctgggacggagacccctcctcattggtggctttgggctcatgggcctcttctttgggaccctcaccatcacgctgaccctgcaggaccacgccccctgggtcccctacctgagtatcgtgggcattctggccatcatcgcctctttctgcagtgggccaggtggcatcccgttcatcttgactggtgagttcttccagcaatctcagcggccggctgccttcatcattgcaggcaccgtcaactggctctccaactttgctgttgggctcctcttcccattcattcagaaaagtctggacacctactgtttcctagtctttgctacaatttgtatcacaggtgctatctacctgtattttgtgctgcctgagaccaaaaacagaacctatgcagaaatcagccaggcattttccaaaaggaacaaagcatacccaccagaagagaaaatcgactcagctgtcactgatggtaagataaatggaaggccttaacaagtttcctcctccacgttggacaattatgtcaaaaacaggattgtctacatggatgatctcacttttcaggaaacttaaaatttacccattattgggaagcttaaatgaattgaagctatgcaagtcttttatattattaaatatttaaaagtaaacctgtactaatctaa

SEQ ID NO: 28697 - DNA, 738 bp, Homo sapiens
  source 1..738: mol_type = unassigned DNA
catggacatgaatgtgtggcttaaattacattgctgtgtgggcatgaatcagacgctctgcccatgaagagttctagcaccaagtcagtgcaagacccgaggtgaaacaataacaacaaaagttcaaaacctgaaaagtgaaccatgaagctcagtaaaaaggaccgaggagaagatgaagaaagtgattcagcgaaaaagaaattggactggtcctgctcgctcctcgtggcctccctcgcgggcgccttcggctcctccttcctctacggctacaacctgtcggtggtgaatgcccccaccccgtacatcaaggccttttacaatgagtcatgggaaagaaggcatggacgtccaatagacccagacactctgactttgctctggtctgtgactgtgtccatattcgccatcggtggacttgtggggacgttaattgtgaagatgattggaaaggttcttgggaggaagcacactttgctggccaataatgggtttgcaatttctgctgcattgctgatggcctgctcgctccaggcaggagcctttgaaatgctcatcgtgggacgcttcatcatgggcatagatggaggcgtcgccctcagtgtgctccccatgtaccttagtgagatctcacccaaggagatccgtggctctctggggcaggtgactgccatctttatctgcattggcgtgttcactgggcagcttctgggcctgcccgagctgctgggaaag

SEQ ID NO: 28698 - DNA, 2344 bp, Homo sapiens
  source 1..2344: mol_type = unassigned DNA
ctccattcagtgcacgcgttactttggctaaaaggaggtgagcggcactctgcccttccagagcaagcatggagcaacaggatcagagcatgaaggaagggaggctgacgcttgtgcttgccctggcaaccctgatagctgcctttgggtcatccttccagtatgggtacaacgtggctgctgtcaactccccagcactgctcatgcaacaattttacaatgagacttactatggtaggaccggtgaattcatggaagacttccccttgacgttgctgtggtctgtaaccgtgtccatgtttccatttggagggtttatcggatccctcctggtcggccccttggtgaataaatttggcagaaaaggggccttgctgttcaacaacatattttctatcgtgcctgcgatcttaatgggatgcagcagagtcgccacatcatttgagcttatcattatttccagacttttggtgggaatatgtgcaggtgtatcttccaacgtggtccccatgtacttaggggagctggcccctaaaaacctgcggggggctctcggggtggtgccccagctcttcatcactgttggcatccttgtggcccagatctttggtcttcggaatctccttgcaaacgtagatggtgagttcaggacatctcgggagcacccccaccccttcaccactacccttggccccctccttgtgttccaaagccaccaccacaggacaggactttctgcagactggtctcttctaacaggctggatgtccttggggggcccatcctgtcccgagccaacatagcaggccatggacaaaggcgcgataagggactggccagcgtttactatctagtccctcttaggagatggatgaggtggctttgagtgatgggcttccctgcctgctcagcagctgtccatatggaggcccgtggcatagcaatgacagccaccagtgtgccaggctctgtgcttggggcggacccagcatcagttcataggaccctcccagcaacgctgctgcctgggactcagtgattatcccattttgcagaccagaaagagaagtaccaggagtgagggtggcctggccccatgggggaggtggtgaggacatcccagaccctgcctccaccttccccaagacagcctggggcctggcatgcggcaggtgcacagacacctgtaaccggggttgtttttgcacgactttccctttaaactatcatcagtcatcccgtcagccaaaacataagccagttcccgccagggttctacacaccgtctgcaagtcagtcaagtggatcatcaagctctgtgctgcttagacactctctgtagaaagtgcttaccgtgagccaagtgccaagtcttttttagtaactcatgtattcctcagaacagccctattaagcctgtaccagtatcatacccattttgcaggtgcatcacaggtacagagagattggaagactggtccaaggtctcatgaggatgcagacccagcggcacagacctaggtccctgtttaagtaccacatgctcctgcctctccttcactcctgcatgtgttggggacacttacgccaaggcgccgcgttctcattaggagctgggaccagaagtgaataagccaggttcctgtctcagggagctccatagcaggactcagaaccacacacggccctctaggcatttgtgaagctctgtgcttcatttttttgctttgcctctagttttgcctttgcagtaccaatgcagccagcccatgtgtcccctctatgtggaatgttaacgatattcccactgtttctggtgtcctttctgtaatcagagctgccgtgaccattccagttcaggcatcctggtggcctggcttctctgggcatagagctgggagtgggcagttgggtcaggccgggtatgcccagctcctccagcccctgcaagactgtcctctgaaggacacggggacgttctcaccagcacatggtattaccggcctcgtcggtgtggtctgtctgatgggcgcaggggtgcgtcgctgctgatccctgctgcaggtgtttcccgagtgtccaccgtcgggagttgctgttcttagggctgggaaagctgtgccctcctggagcctgcaccccactcaggatgacggggctggggccggctctgcagagggcgccttcggggtggtggggaggccgctggtgccagctcgctgccttcctcccaggctggccgatcctgctggggctgaccggggtccccgcggcgctgcagctccttctgctgcccttcttccccgagagccccaggtacctgctgattcagaagaaagacgaa

SEQ ID NO: 28699 - DNA, 4165 bp, Homo sapiens
  source 1..4165: mol_type = unassigned DNA
gaagtgaaaggaagaccaggttcctgaaagggttattctgacttaatctggctataaaaatgctattggctgttatttggcatggccaaagtgcacccagaatgtcttctctctccattcagtgcacgcgttactttggctaaaaggaggtgagcggcactctgcccttccagagcaagcatggagcaacaggatcagagcatgaaggaagggaggctgacgcttgtgcttgccctggcaaccctgatagctgcctttgggtcatccttccagtatgggtacaacgtggctgctgtcaactccccagcactgctcatgcaacaattttacaatgagacttactatggtaggaccggtgaattcatggaagacttccccttgacgttgctgtggtctgtaaccgtgtccatgtttccatttggagggtttatcggatccctcctggtcggccccttggtgaataaatttggcagaaaaggggccttgctgttcaacaacatattttctatcgtgcctgcgatcttaatgggatgcagcagagtcgccacatcatttgagcttatcattatttccagacttttggtgggaatatgtgcaggtgtatcttccaacgtggtccccatgtacttaggggagctggcccctaaaaacctgcggggggctctcggggtggtgccccagctcttcatcactgttggcatccttgtggcccagatctttggtcttcggaatctccttgcaaacgtagatggctggccgatcctgctggggctgaccggggtccccgcggcgctgcagctccttctgctgcccttcttccccgagagccccaggtacctgctgattcagaagaaagacgaagcggccgccaagaaagccctacagacgctgcgcggctgggactctgtggacagggaggtggccgagatccggcaggaggatgaggcagagaaggccgcgggcttcatctccgtgctgaagctgttccggatgcgctcgctgcgctggcagctgctgtccatcatcgtcctcatgggcggccagcagctgtcgggcgtcaacgctatctactactacgcggaccagatctacctgagcgccggcgtgccggaggagcacgtgcagtacgtgacggccggcaccggggccgtgaacgtggtcatgaccttctgcgccgtgttcgtggtggagctcctgggtcggaggctgctgctgctgctgggcttctccatctgcctcatagcctgctgcgtgctcactgcagctctggcactgcaggacacagtgtcctggatgccatacatcagcatcgtctgtgtcatctcctacgtcataggacatgccctcgggcccagtcccatacccgcgctgctcatcactgagatcttcctgcagtcctctcggccatctgccttcatggtggggggcagtgtgcactggctctccaacttcaccgtgggcttgatcttcccgttcatccaggagggcctcggcccgtacagcttcattgtcttcgccgtgatctgcctcctcaccaccatctacatcttcttgattgtcccggagaccaaggccaagacgttcatagagatcaaccagattttcaccaagatgaataaggtgtctgaagtgtacccggaaaaggaggaactgaaagagcttccacctgtcacttcggaacagtgactctggagaggaagccagtggagctggtctgccaggggcttcccactttggcttatttttctgacttctagctgtctgtgaatatccagaaataaaacaactctgatgtggaatgcagtcctcatctccagcctccccaccccagtgggaactgtgcaaagggctgccttgctgttcttgaagctgggctgtctctctccatgttggcctgtcaccagacccgagtcaattaaacagctggtcctccactttgctggttcagccttcgtgtggctcctggtaacgtggctccaccttgatgggtcaacctttgtgtggctcctggtaacataacaacaacagttactatagtggtgagatggaaggaatcaaattttgccagagaaactaacttggtggccccgacaggtcttccggggccatgggcatttgtttagagccaaattcatcctcttaccagatccttttccagaaatacctgtctaggaaggtgtgatgtcagaaacaatgacatccagaaagctgaggaacaggttcctgtggagacactgagtcagaattcttcatcctaaattattttgttagtggaaaatggaattgcttctgtgtagtcaataaaatgaacctgatcacttttcaacaagacgtgctgctgttctttgagcaagtagaaggcaggaggaagttccctgctcattcaggcagtgttttttttgtttttatttttgcttttttttttttttttaagacggagtctcgctctgtcacccaggctggagtgcagtggtgcgatctcagctcactgcaaactccacctcccgggttcacaccattctcctgcctcagcctcctgagtagctgggactacaggcgcctgccaccacgcccggctaacttttttgtatttttagtagagactgggtttcactgtgttggccaggatagtctcaatctcctgacctcatgatccgcccacctaggcccctcaaagtgctgggattacaggtgtgagccactgcgcccggccacttcaggcagtttgactgcacgagtgtcagttccttgagggcaggggcttggtcagttttgtttatgcctgaatccccagcatctcgaagagggcctctggaggctgaggtgggaggattgcttaagcctgggaagtagaggttgcagtgagctgaaattgcaccctatactccagcctgggcaacacagtgagatcccatctcaaaaaaaatttttttaattgggcatggtgacacgcctttggggtcccagctatttgggaggctgaaatgggaggatcgcttgagcctgggaggtcaaggctgccctgagtcatgattgcatcactgcacaccagcctgcatgacagaatgagaccttgtctcaaataaataaatacatgtaagattgaggaagcttccaaatgtcctcacatatgtaatgaaatcttgaggagtcttaaaatcttgagactgtggtgggggaggaagggaaaaggaacagggtcttgatatggtttggctgtgtccccacccaaatctcatcttgaattgtagctcccataattcccatgtgttctgggagggaccctgtgggagataattgaatcatgggggcaatttcccccatactgttctcatggtagtgaatcagcctcatgagatctgatggttctgtaaggggtaaaaccttttgcttggttctcattctctcttgcctgccaccaggtaagacgtgccttttgctttctggcatgattgtgaggcctccccagccatgtggaatggcgagtccattaaatctctttttctttgcaatttacccagtctctgatacatctttatcagcagcatgaaaatggtctaacacaggtctctccccaaaaatatagagagctggaggtttttcttagagatatgaataaagggtgtgagtgtgagtgtatgtgcaaaaatatggataaaaccttgaaagtgctgaatggcctgtagcaagaagtgatgtcttctcatagatgggtggcagaggctggtggccgggagagagagcagtgggacttgggagcactttttgtgggtatgtaatggagattccaccagcaacaagctaaaccactcacaagcgggcccagaggaagtaaacagaacactgtggttgaaccatccttggccttctgcagcaaggatctgcagcctggaaggggcacagaaacaaccaaagatgaaggctctcagagctgaggagaggccaggtcagaatatcagaagtcaagaaactgcagcacctctaacacaggggaggctatgaagttcatggttctggatgtctgctccctgggttcaaaccttggtcctgccacattagttgtgcaacttggaaagttacttggcttttttgtatctcagtcttctcttctgttaaatggcactaatagtaaatgtctcacatgtccattgtgagaattaaatga

SEQ ID NO: 28700 - DNA, 2140 bp, Homo sapiens
  source 1..2140: mol_type = unassigned DNA
gtttgactcttttcatcaacaccagcaccacattatcccaggaggaaaagcagacgcgtgacagagtcagagagcaggcatagagtgctgtggcagtcagccagtgcccacatcaacaccaaggagagtcctgcgggtgctgtgcaaggccgggtgcacgcgttactttggctaaaaggaggtgagcggcactctgcccttccagagcaagcatggagcaacaggatcagagcatgaaggaagggaggctgacgcttgtgcttgccctggctgctgtcaactccccagcactgctcatgcaacaattttacaatgagacttactatggtaggaccggtgaattcatggaagacttccccttgacgttgctgtggtctgtaaccgtgtccatgtttccatttggagggtttatcggatccctcctggtcggccccttggtgaataaatttggcagaaaaggggccttgctgttcaacaacatattttctatcgtgcctgcgatcttaatgggatgcagcagagtcgccacatcatttgagcttatcattatttccagacttttggtgggaatatgtgcaggtgtatcttccaacgtggtccccatgtacttaggggagctggcccctaaaaacctgcggggggctctcggggtggtgccccagctcttcatcactgttggcatccttgtggcccagatctttggtcttcggaatctccttgcaaacgtagatggctggccgatcctgctggggctgaccggggtccccgcggcgctgcagctccttctgctgcccttcttccccgagagccccaggtacctgctgattcagaagaaagacgaagcggccgccaagaaagccctacagacgctgcgcggctgggactctgtggacagggaggtggccgagatccggcaggaggatgaggcagagaaggccgcgggcttcatctccgtgctgaagctgttccggatgcgctcgctgcgctggcagctgctgtccatcatcgtcctcatgggcggccagcagctgtcgggcgtcaacgctatctactactacgcggaccagatctacctgagcgccggcgtgccggaggagcacgtgcagtacgtgacggccggcaccggggccgtgaacgtggtcatgaccttctgcgccgtgttcgtggtggagctcctgggtcggaggctgctgctgctgctgggcttctccatctgcctcatagcctgctgcgtgctcactgcagctctggcactgcaggacacagtgtcctggatgccatacatcagcatcgtctgtgtcatctcctacgtcataggacatgccctcgggcccagtcccatacccgcgctgctcatcactgagatcttcctgcagtcctctcggccatctgccttcatggtggggggcagtgtgcactggctctccaacttcaccgtgggcttgatcttcccgttcatccaggagggcctcggcccgtacagcttcattgtcttcgccgtgatctgcctcctcaccaccatctacatcttcttgattgtcccggagaccaaggccaagacgttcatagagatcaaccagattttcaccaagatgaataaggtgtctgaagtgtacccggaaaaggaggaactgaaagagcttccacctgtcacttcggaacagtgactctggagaggaagccagtggagctggtctgccaggggcttcccactttggcttatttttctgacttctagctgtctgtgaatatccagaaataaaacaactctgatgtggaatgcagtcctcatctccagcctccccaccccagtgggaactgtgcaaagggctgccttgctgttcttgaagctgggctgtctctctccatgttggcctgtcaccagacccgagtcaattaaacagctggtcctccactttgctggttcagccttcgtgtggctcctggtaacgtggctccaccttgatgggtcaacctttgtgtggctcctggtaacataacaacaacagttactatagtggtgagatggaaggaatcaaattttgccagagaaactaacttggtggccccgacaggtcttccggggccatgggcatttgtttagagccaaattcatcctcttaccagatccttttccaga

SEQ ID NO: 28701 - DNA, 1443 bp, Homo sapiens
  source 1..1443: mol_type = unassigned DNA
agagcaagcatggagcaacaggatcagagcatgaaggaagggaaaaggggccttgctgttcaacaacatattttctatcgtgcctgcgatcttaatgggatgcagcagagtcgccacatcatttgagcttatcattatttccagacttttggtgggaatatgtgcaggtgtatcttccaacgtggtccccatgtacttaggggagctggcccctaaaaacctgcggggggctctcggggtggtgccccagctcttcatcactgttggcatccttgtggcccagatctttggtcttcggaatctccttgcaaacgtagatggctggccgatcctgctggggctgaccggggtccccgcggcgctgcagctccttctgctgcccttcttccccgagagccccaggtacctgctgattcagaagaaagacgaagcggccgccaagaaagccctacagacgctgcgcggctgggactctgtggacagggaggtggccgagatccggcaggaggatgaggcagagaaggccgcgggcttcatctccgtgctgaagctgttccggatgcgctcgctgcgctggcagctgctgtccatcatcgtcctcatgggcggccagcagctgtcgggcgtcaacgctatctactactacgcggaccagatctacctgagcgccggcgtgccggaggagcacgtgcagtacgtgacggccggcaccggggccgtgaacgtggtcatgaccttctgcgccgtgttcgtggtggagctcctgggtcggaggctgctgctgctgctgggcttctccatctgcctcatagcctgctgcgtgctcactgcagctctggcactgcaggacacagtgtcctggatgccatacatcagcatcgtctgtgtcatctcctacgtcataggacatgccctcgggcccagtcccatacccgcgctgctcatcactgagatcttcctgcagtcctctcggccatctgccttcatggtggggggcagtgtgcactggctctccaacttcaccgtgggcttgatcttcccgttcatccaggagggcctcggcccgtacagcttcattgtcttcgccgtgatctgcctcctcaccaccatctacatcttcttgattgtcccggagaccaaggccaagacgttcatagagatcaaccagattttcaccaagatgaataaggtgtctgaagtgtacccggaaaaggaggaactgaaagagcttccacctgtcacttcggaacagtgactctggagaggaagccagtggagctggtctgccaggggcttcccactttggcttatttttctgacttctagctgtctgtgaatatccagaaataaaacaactctgatgtggaatgcagtcctcatctccagcctccccaccccagtgggaactgtgcaaagggctgccttgctgttcttgaagctggg

SEQ ID NO: 28702 - DNA, 1846 bp, Homo sapiens
  source 1..1846: mol_type = unassigned DNA
agtataagcggctctcacgtgtggcaagtttctcagtgtttaggaatgctggagctccactcgctgacagcttcgtccatcatgagggtcctcatcatgagggctccattgcgagaggcccctccagagaagtttgctttgcttctgtcaggatctccaggaaaaggggccttgctgttcaacaacatattttctatcgtgcctgcgatcttaatgggatgcagcagagtcgccacatcatttgagcttatcattatttccagacttttggtgggaatatgtgcaggtgtatcttccaacgtggtccccatgtacttaggggagctggcccctaaaaacctgcggggggctctcggggtggtgccccagctcttcatcactgttggcatccttgtggcccagatctttggtcttcggaatctccttgcaaacgtagatggctggccgatcctgctggggctgaccggggtccccgcggcgctgcagctccttctgctgcccttcttccccgagagccccaggtacctgctgattcagaagaaagacgaagcggccgccaagaaagccctacagacgctgcgcggctgggactctgtggacagggaggtggccgagatccggcaggaggatgaggcagagaaggccgcgggcttcatctccgtgctgaagctgttccggatgcgctcgctgcgctggcagctgctgtccatcatcgtcctcatgggcggccagcagctgtcgggcgtcaacgctatctactactacgcggaccagatctacctgagcgccggcgtgccggaggagcacgtgcagtacgtgacggccggcaccggggccgtgaacgtggtcatgaccttctgcgccgtgttcgtggtggagctcctgggtcggaggctgctgctgctgctgggcttctccatctgcctcatagcctgctgcgtgctcactgcagctctggcactgcaggacacagtgtcctggatgccatacatcagcatcgtctgtgtcatctcctacgtcataggacatgccctcgggcccagtcccatacccgcgctgctcatcactgagatcttcctgcagtcctctcggccatctgccttcatggtggggggcagtgtgcactggctctccaacttcaccgtgggcttgatcttcccgttcatccaggagggcctcggcccgtacagcttcattgtcttcgccgtgatctgcctcctcaccaccatctacatcttcttgattgtcccggagaccaaggccaagacgttcatagagatcaaccagattttcaccaagatgaataaggtgtctgaagtgtacccggaaaaggaggaactgaaagagcttccacctgtcacttcggaacagtgactctggagaggaagccagtggagctggtctgccaggggcttcccactttggcttatttttctgacttctagctgtctgtgaatatccagaaataaaacaactctgatgtggaatgcagtcctcatctccagcctccccaccccagtgggaactgtgcaaagggctgccttgctgttcttgaagctgggctgtctctctccatgttggcctgtcaccagacccgagtcaattaaacagctggtcctccactttgctggttcagccttcgtgtggctcctggtaacgtggctccaccttgatgggtcaacctttgtgtggctcctggtaacataacaacaacagttactatagtggtgagatggaaggaatcaaattttgccagagaaactaacttggtggccccgacaggtcttccggggccatgggcatttgtttagagccaaattcatcctcttaccagatccttttccag

SEQ ID NO: 28703 - DNA, 3381 bp, Homo sapiens
  source 1..3381: mol_type = unassigned DNA
gcttcggggccggcgcgaggcgcggcggggtcacgcgggtcgctgcgcgggctataagtaggggccggcggggtgctccgctggagtgatggctgccggcgctctctgcgtggttcttcttctcggccgctgaaacccccgcggctgcttcctgggaaggtcgtgagtcccgctgagctgtccccggtgccgccgacccgggccgtgtgcccgtggctccagccgctgtcgcctcgatctcctcgtctcccgctccgccctcccttttccctggatgaacttgcgtcctttctcttctccgccatggaattctgctccgtgcttttagccctcctgagccaaagaaaccccagacaacagatgcccatacgcagcgtatagcagtaactccccagctcggtttctgtgccgtagtttacagtatttaattttatataatatatattatttattatagcatttttgatacctcatattctgtttacacatcttgaaaggcgctcagtagttctcttactaaacaaccactactccagagaatggcaacgctgattaccagtactacagctgctaccgccgcttctggtcctttggtggactacctatggatgctcatcctgggcttcattattgcatttgtcttggcattctccgtgggagccaatgatgtagcaaattcttttggtacagctgtgggctcaggtgtagtgaccctgaagcaagcctgcatcctagctagcatctttgaaacagtgggctctgtcttactgggggccaaagtgagcgaaaccatccggaagggcttgattgacgtggagatgtacaactcgactcaagggctgctgatggccggctcagtcagtgctatgtttggttctgctgtgtggcaactcgtggcttcgtttttgaagctccctatttctggaacccattgtattgttggtgcaactattggtttctccctcgtggcaaaggggcaggagggtgtcaagtggtctgaactgataaaaattgtgatgtcttggttcgtgtccccactgctttctggaattatgtctggaattttattcttcctggttcgtgcattcatcctccataaggcagatccagttcctaatggtttgcgagctttgccagttttctatgcctgcacagttggaataaacctcttttccatcatgtatactggagcaccgttgctgggctttgacaaacttcctctgtggggtaccatcctcatctcggtgggatgtgcagttttctgtgcccttatcgtctggttctttgtatgtcccaggatgaagagaaaaattgaacgagaaataaagtgtagtccttctgaaagccccttaatggaaaaaaagaatagcttgaaagaagaccatgaagaaacaaagttgtctgttggtgatattgaaaacaagcatcctgtttctgaggtagggcctgccactgtgcccctccaggctgtggtggaggagagaacagtctcattcaaacttggagatttggaggaagctccagagagagagaggcttcccagcgtggacttgaaagaggaaaccagcatagatagcaccgtgaatggtgcagtgcagttgcctaatgggaaccttgtccagttcagtcaagccgtcagcaaccaaataaactccagtggccactaccagtatcacaccgtgcataaggattccggcctgtacaaagagctactccataaattacatcttgccaaggtgggagattgcatgggagactccggtgacaaacccttaaggcgcaataatagctatacttcctataccatggcaatatgtggcatgcctctggattcattccgtgccaaagaaggtgaacagaagggcgaagaaatggagaagctgacatggcctaatgcagactccaagaagcgaattcgaatggacagttacaccagttactgcaatgctgtgtctgaccttcactcagcatctgagatagacatgagtgtcaaggcagagatgggtctaggtgacagaaaaggaagtaatggctctctagaagaatggtatgaccaggataagcctgaagtctctctcctcttccagttcctgcagatccttacagcctgctttgggtcattcgcccatggtggcaatgacgtaagcaatgccattgggcctctggttgctttatatttggtttatgacacaggagatgtttcttcaaaagtggcaacaccaatatggcttctactctatggtggtgttggtatctgtgttggtctgtgggtttggggaagaagagttatccagaccatggggaaggatctgacaccgatcacaccctctagtggcttcagtattgaactggcatctgccctcactgtggtgattgcatcaaatattggccttcccatcagtacaacacattgtaaagtgggctctgttgtgtctgttggctggctccggtccaagaaggctgttgactggcgtctctttcgtaacatttttatggcctggtttgtcacagtccccatttctggagttatcagtgctgccatcatggcaatcttcagatatgtcatcctcagaatgtgaagctgtttgagattaaaatttgtgtcaatgtttgggaccatcttaggtattcctgctcccctgaagaatgattacagtgttaacagaagactgacaagagtctttttatttgggagccagaggagggaagtgttacttgtgctataactgcttttgtgctaaatatgaattgtctcaaaattagctgtgtaaaatagcccgggttccactggctcctgctgaggtcccctttccttctgggctgtgaattcctgtacatatttctctactttttgtatcaggcttcaattccattatgttttaatgttgtctctgaagatgacttgtgatttttttttcttttttttaaaccatgaagagccgtttgacagagcatgctctgcgttgttggtttcaccagcttctgccctcacatgcacagggatttaacaacaaaaatataactacaacttcccttgtagtctcttatataagtagagtccttggtactctgccctcctgtcagtagtggcaggatctattggcatattcgggagcttcttagagggatgaggttctttgaacacagtgaaaatttaaattagtaacttttttgcaagcagtttattgactgttattgctaagaagaagtaagaaagaaaaagcctgttggcaatcttggttatttctttaagatttctggcagtgtgggatggatgaatgaagtggaatgtgaactttgggcaagttaagtgggacagccttccatgttcatttgtctacctcttaactgaataaaaaagcctacagtttttagaaaatt

SEQ ID NO: 28704 - DNA, 2411 bp, Homo sapiens
  source 1..2411: mol_type = unassigned DNA
atggggttttgccatgttgggcaggctggtctcgaactcctgacctcaagtgatctgcctgccacggcctcccaaagtgctgggattacaggcatgagccaccgtgcctggctgaaagacaaagcttttacaactattcttaaattatcaacttttgatagataatatccttgttttctgtatcttgctttgatactgctttcaaggagataatctcattaaagcattttactaaaggccagtatagtgaatgtaatcacttttacacagaattgtgtcagcatgacaaatgtgactactgagacatcattctgttaacattaaaataagtttgtaggtggtaatggaatatgtggcagttacgatcatgagctaggagagtggaacacttgctgtctttttcatagctagtcataggtccttagcgtgtagtgatctttattatcttccaaggtgaagaaaggaaaaggctcgtatgttgagaagcataggaacttgagtcccgcaggtgttcaagtgggctaggctggtgtgggttttcagatgatcattgagtttttctcccaaatttgtataggcactagcacagtaatcctgtgcacttaaatctggcagcagctgtcaggggtgatgggctggtatggggaacccctcagtccccagaggagggtttacacaatattgcagggggctgttgccctggggttttcaagatgcaccattttatctcctagtgctgggctttgacaaacttcctctgtggggtaccatcctcatctcggtgggatgtgcagttttctgtgcccttatcgtctggttctttgtatgtcccaggatgaagagaaaaattgaacgagaaataaagtgtagtccttctgaaagccccttaatggaaaaaaagaatagcttgaaagaagaccatgaagaaacaaagttgtctgttggtgatattgaaaacaagcatcctgtttctgaggtagggcctgccactgtgcccctccaggctgtggtggaggagagaacagtctcattcaaacttggagatttggaggaagctccagagagagagaggcttcccagcgtggacttgaaagaggaaaccagcatagatagcaccgtgaatggtgcagtgcagttgcctaatgggaaccttgtccagttcagtcaagccgtcagcaaccaaataaactccagtggccactaccagtatcacaccgtgcataaggattccggcctgtacaaagagctactccataaattacatcttgccaaggtgggagattgcatgggagactccggtgacaaacccttaaggcgcaataatagctatacttcctataccatggcaatatgtggcatgcctctggattcattccgtgccaaagaaggtgaacagaagggcgaagaaatggagaagctgacatggcctaatgcagactccaagaagcgaattcgaatggacagttacaccagttactgcaatgctgtgtctgaccttcactcagcatctgagatagacatgagtgtcaaggcagagatgggtctaggtgacagaaaaggaagtaatggctctctagaagaatggtatgaccaggataagcctgaagtctctctcctcttccagttcctgcagatccttacagcctgctttgggtcattcgcccatggtggcaatgacgtaagcaatgccattgggcctctggttgctttatatttggtttatgacacaggagatgtttcttcaaaagtggcaacaccaatatggcttttgtgctaaatatgaattgtctcaaaattagctgtgtaaaatagcccgggttccactggctcctgctgaggtcccctttccttctgggctgtgaattcctgtacatatttctctactttttgtatcaggcttcaattccattatgttttaatgttgtctctgaagatgacttgtgatttttttttcttttttttaaaccatgaagagccgtttgacagagcatgctctgcgttgttggtttcaccagcttctgccctcacatgcacagggatttaacaacaaaaatataactacaacttcccttgtagtctcttatataagtagagtccttggtactctgccctcctgtcagtagtggcaggatctattggcatattcgggagcttcttagagggatgaggttctttgaacacagtgaaaatttaaattagtaacttttttgcaagcagtttattgactgttattgctaagaagaagtaagaaagaaaaagcctgttggcaatcttggttatttctttaagatttctggcagtgtgggatggatgaatgaagtggaatgtgaactttgggcaagttaagtgggacagccttccatgttcatttgtctacctcttaactgaataaaaaagcctacagtttttag

SEQ ID NO: 28705 - DNA, 3657 bp, Homo sapiens
  source 1..3657: mol_type = unassigned DNA
cgcttccggaagcgggcgactcgcagctccacgcgacgccgaggggctccgcgccgggaccgggcgggtgctcggagtttcggggaccgcacgggaccgagggcaggaggagacatcacagctttcccagatcgggaggaaaaatatggaatgtgttttaccgctgactgaacacaaccaaatgaactgtcctgacagtagtttgcaaaccagcagctagcagtttgtccagcctctaacattgtccagcactttccagagcaaactcactgtttacaagaactcttggccttacgaagtttataacctcaagctttgtttatttaaaatattcctgcaaaagaaaagtacccggcacccactttccaaaatggccatggatgagtatttgtggatggtcattttgggtttcatcatagctttcatcttggccttttctgttggtgcaaacgatgttgccaactcctttggtacagccgtgggctctggtgtggtgaccttgaggcaggcatgcattttagcttcaatatttgaaaccaccggctccgtgttactaggcgccaaagtaggagaaaccattcgcaaaggtatcattgacgtgaacctgtacaacgagacggtggagactctcatggctggggaagttagtgccatggttggttccgctgtgtggcagctgattgcttccttcctgaggcttccaatctcaggaacgcactgcattgtgggttctactataggattctcactggtcgcaatcggtaccaaaggtgtgcagtggatggagcttgtcaagattgttgcttcttggtttatatctccactgttgtctggtttcatgtctggcctgctgtttgtactcatcagaattttcatcttaaaaaaggaagaccctgttcccaatggcctccgggcactcccagtattctatgctgctaccatagcaatcaatgtcttttccatcatgtacacaggagcaccagtgctcggccttgttctccccatgtgggccatagccctcatttcctttggtgtcgccctcctgttcgctttttttgtgtggctcttcgtgtgtccgtggatgcggaggaaaataacaggcaaattacaaaaagaaggtgctttatcacgagtatctgacgaaagcctcagtaaggttcaggaagcagagtccccagtatttaaagagctaccaggtgccaaggctaatgatgacagcaccatcccgctcacgggagcagcaggggagacactggggacctcggaaggcacttctgcgggcagccaccctcgggctgcatacggaagagcactgtccatgacccatggctctgtgaaatcgcccatctccaacggcaccttcggcttcgacggccacaccaggagcgacggtcatgtgtaccacaccgtgcacaaagactcggggctctacaaagatctgctgcacaaaatccacatcgacaggggccccgaggagaagccagcccaggaaagcaactaccggctgctgcgccgaaacaacagttacacctgctacaccgcagccatttgtgggctgccagtgcacgccacctttcgagctgcggactcatcggccccagaggacagtgagaagctggtgggcgacaccgtgtcctactccaagaagaggctgcgctacgacagctactcgagctactgtaacgcggtggcagaggcggagatcgaggcggaggagggcggcgtggagatgaagctggcgtcggagctggccgaccctgaccagccgcgagaggaccctgcagaggaggagaaggaggagaaggacgcacccgaggttcacctcctgttccatttcctgcaggtcctcaccgcctgtttcgggtcctttgctcacggcggcaatgacgtgagtaatgccatcggtcccctggtagccttgtggctgatttacaaacaaggcggggtaacgcaagaagcagctacacccgtctggctgctgttttatggaggagttggaatctgcacaggcctctgggtctgggggagaagagtgatccagaccatggggaaggacctcactcccatcacgccgtccagcggcttcacgatcgagctggcctcagccttcacagtggtgatcgcctccaacatcgggcttccagtcagcaccacgcactgtaaggtgggctcggtggtggccgtgggctggatccgctcccgcaaggctgtggactggcgcctctttcggaacatcttcgtggcctggttcgtgaccgtccctgtggctgggctgttcagcgctgctgtcatggctcttctcatgtatgggatccttccatatgtgtgatttgtcttcttccagctgcaaacagctaaagggatggtctggtgttggcgtgtgggagacatgtgtgctcgtgccgcacatacacatcctggccgtgcacggctctctcatgaccagctctctgcctcccttccaggaggctccatcccacactgttcacccaggctgcggagactcaccttcccgagctaacttaactactgtacataataatatgtattaaactggtatcgtggtgatataatgtggtgcagttacttatatattaaatatctattgtatccatagaataggcagcattatttcaaacatattcaagttgggagtggagatcattgcctagaagtcaatattcaataaatcttgtacataactatttcgatggcaaatgttaagccttctaaaaggaaagtgtagattggaaaatgattttttttccaaatgatgtttttgccttctaatatactgtaaggtaatgagcttcagaacaggcaacctgaccctgcagaggtcgcgtgctgtgggatgacagcgggacgggagctcacaagtgctttcactgaagatttgttcatatactgtgtattgattgttgtgtaatatatcatcattgcttttgtaaatacgtaaaactgtaattttttaatggtgtgcttcccttatacttttttgatcagagaattttggaaagtaccaaagaagcaggggaatcattggccagtgttacgttttcacattgtctgtctcccaccctcactgatcacgcctgccccagagcagtgtgtggcggtgacaccgtcacccagcatgcgccacgccgtggctcccaccagcagtgccaccgccaccacaccccagatcccacccaccttgcagtggcctttccttgtcatcagagtagagaatgcacaggtgttggtgagggcgtgtggctgagcactacatgtcaagtccagagtcagtttctatcccaattctccctgcagcctgaagaacggatccttgtctccaatgtcagcacaaaggaggctttttctgtgctttgacattctagcacttcagggatgagagggagggagaatcctggatgctggatggagtatttctctgaggcccacacaaagctggacacccccaggctctactccatcccattggagtctcttctttttttgatagcgggagggaggaagtacgactaatgttggagcctgaaactatggaaatgctgctaaaatttttatattgacaaacattttcttggtacttcattgtcatttttcattaatcaaccatattaaatttataataaaaaatgcccctcagaa

SEQ ID NO: 28706 - DNA, 533 bp, Homo sapiens
  source 1..533: mol_type = unassigned DNA
atgatgcaaatcagcgtgttcctgcctgctgcttggctgcagttaattttagccggggaggagacatcacagctttcccagatcgggaggaaaaatatggaatgtgttttaccgctgactgaacacaaccaaatgaactgtcctgacagtagtttgcaaaccagcagctagcagtttgtccagcctctaacattgtccagcactttccagagcaaactcactgtttacaagaactcttggccttacgaagtttataacctcaagctttgtttatttaaaatattcctgcaaaagaaaagtacccggcacccactttccaaaatggccatggatgagtatttgtggatggtcattttgggtttcatcatagctttcatcttggccttttctgttggtgcaaacgatgttgccaactcctttggtacagccgtgggctctggtgtggtgaccttgaggcaggcatgcattttagcttcaatatttgaaaccaccggctccgtgttactaggcgccaaagtaggagaaaccattcg

SEQ ID NO: 28707 - DNA, 557 bp, Homo sapiens
  source 1..557: mol_type = unassigned DNA
atttcctgccggccggtcggtttccggatgaaacgaggagccaggcatctccttggaaacaatgccatctttgaatgtgagagataaacctagtttcagcatgtctgcagcagagaccagtacatcaggcttattcccacaggaagcctcctaaagcctgtggcgcggcaaccatttccaggactaaataataatgtgtcagatgcctgaggagacatcacagctttcccagatcgggaggaaaaatatggaatgtgttttaccgctgactgaacacaaccaaatgaactgtcctgacagtagtttgcaaaccagcagctagcagtttgtccagcctctaacattgtccagcactttccagagcaaactcactgtttacaagaactcttggccttacgaagtttataacctcaagctttgtttatttaaaatattcctgcaaaagaaaagtacccggcacccactttccaaaatggccatggatgagtatttgtggatggtcattttgggtttcatcatagctttcatcttggccttttctgttggtgcaaacgatg

SEQ ID NO: 28708 - DNA, 573 bp, Homo sapiens
  source 1..573: mol_type = unassigned DNA
cttttcatattcacgtgtactcttaagaaagcgtctgttctccaaactggctttccattctccccgtcctaaatggaggagacatcacagctttcccagatcgggaggaaaaatatggaatgtgttttaccgctgactgaacacaaccaaatgaactgtcctgacagtagtttgcaaaccagcagctagcagtttgtccagcctctaacattgtccagcactttccagagcaaactcactgtttacaagaactcttggccttacgaagtttataacctcaagctttgtttatttaaaatattcctgcaaaagaaaagtacccggcacccactttccaaaatggccatggatgagtatttgtggatggtcattttgggtttcatcatagctttcatcttggccttttctgttggtgcaaacgatgttgccaactcctttggtacagccgtgggctctggtgtggtgaccttgaggcaggcatgcattttagcttcaatatttgaaaccaccggctccgtgttactaggcgccaaagtaggagaaaccattcgcaaaggtatcattgacgtgaac

SEQ ID NO: 28709 - DNA, 2284 bp, Homo sapiens
  source 1..2284: mol_type = unassigned DNA
cccttttcagttttttgagccggagagacgcagcggcggccccagtgccgcccccgggcgcgaggagacatcacagctttcccagatcgggaggaaaaatatggaatgtgttttaccgctgactgaacacaaccaaatgaactgtcctgacagtagtttgcaaaccagcagctagcagtttgtccagcctctaacattgtccagcactttccagagcaaactcactgtttacaagaactcttggccttacgaagtttataacctcaagctttgtttatttaaaatattcctgcaaaagaaaagtacccggcacccactttccaaaatggccatggatgagtatttgtggatggtcattttgggtttcatcatagctttcatcttggccttttctgttggtgcaaacgatgttgccaactcctttggtacagccgtgggctctggtgtggtgaccttgaggcaggcatgcattttagcttcaatatttgaaaccaccggctccgtgttactaggcgccaaagtaggagaaaccattcgcaaaggtatcattgacgtgaacctgtacaacgagacggtggagactctcatggctggggaagttagtgccatggttggttccgctgtgtggcagctgattgcttccttcctgaggcttccaatctcaggaacgcactgcattgtgggttctactataggattctcactggtcgcaatcggtaccaaaggtgtgcagtggatggagcttgtcaagattgttgcttcttggtttatatctccactgttgtctggtttcatgtctggcctgctgtttgtactcatcagaattttcatcttaaaaaaggaagaccctgttcccaatggcctccgggcactcccagtattctatgctgctaccatagcaatcaatgtcttttccatcatgtacacaggagcaccagtgctcggccttgttctccccatgtgggccatagccctcatttcctttggtgtcgccctcctgttcgctttttttgtgtggctcttcgtgtgtccgtggatgcggaggaaaataacaggcaaattacaaaaagaaggtgctttatcacgagtatctgacgaaagcctcagtaaggttcaggaagcagagtccccagtatttaaagagctaccaggtgccaaggctaatgatgacagcaccatcccgctcacgggagcagcaggggagacactggggacctcggaaggcacttctgcgggcagccaccctcgggctgcatacggaagagcactgtccatgacccatggctctgtgaaatcgcccatctccaacggcaccttcggcttcgacggccacaccaggagcgacggtcatgtgtaccacaccgtgcacaaagactcggggctctacaaagatctgctgcacaaaatccacatcgacaggggccccgaggagaagccagcccaggaaagcaactaccggctgctgcgccgaaacaacagttacacctgctacaccgcagccatttgtgggctgccagtgcacgccacctttcgagctgcggactcatcggccccagaggacagtgagaagctggtgggcgacaccgtgtcctactccaagaagaggctgcgctacgacagctactcgagctactgtaacgcggtggcagaggcggagatcgaggcggaggagggcggcgtggagatgaagctggcgtcggagctggccgaccctgaccagccgcgagaggaccctgcagaggaggagaaggaggagaaggacgcacccgaggttcacctcctgttccatttcctgcaggtcctcaccgcctgtttcgggtcctttgctcacggcggcaatgacgtgagtaatgccatcggtcccctggtagccttgtggctgatttacaaacaaggcggggtaacgcaagaagcagctacacccgtctggctgctgttttatggaggagttggaatctgcacaggcctctgggtctgggggagaagagtgatccagaccatggggaaggacctcactcccatcacgccgtccagcggcttcacgatcgagctggcctcagccttcacagtggtgatcgcctccaacatcgggcttccagtcagcaccacgcactgtaaggtgggctcggtggtggccgtgggctggatccgctcccgcaaggctgtggactggcgcctctttcggaacatcttcgtggcctggttcgtgaccgtccctgtggctgggctgttcagcgctgctgtcatggctcttctcatgtatgggatccttccatatgtgtga

SEQ ID NO: 28710 - DNA, 2992 bp, Homo sapiens
  source 1..2992: mol_type = unassigned DNA
gtgcttaaaaatcaagtgaatgcctgttgggaaaaagcttactccttctctttgtcagtacttgcaaaaacaacttaaaagaagttagtattattggactgaattcagtaattagcataatcatgatgctatgtattgttcaccagggcacgccccttggccgcatttcccattaagaggacaccgatgttgtcctagtgaataaatcccggcacacatgatgcaaatcagcgtgttcctgcctgctgcttggctgcagttaattttagccggggttagttctatgagttgtaaaagtagaagttagcaagctgaaatgtgacttctcggcctaatgtggtaggatatctattttagacttcagattgtgtttgtgatcaggagagcagtcttctgaagaattgtggctcagttttcttggaaactacttgaggagacatcacagctttcccagatcgggaggaaaaatatggaatgtgttttaccgctgactgaacacaaccaaatgaactgtcctgacagtagtttgcaaaccagcagctagcagtttgtccagcctctaacattgtccagcactttccagagcaaactcactgtttacaagaactcttggccttacgaagtttataacctcaagctttgtttatttaaaatattcctgcaaaagaaaagtacccggcacccactttccaaaatggccatggatgagtatttgtggatggtcattttgggtttcatcatagctttcatcttggccttttctgttggtgcaaacgatgttgccaactcctttggtacagccgtgggctctggtgtggtgaccttgaggcaggcatgcattttagcttcaatatttgaaaccaccggctccgtgttactaggcgccaaagtaggagaaaccattcgcaaaggtatcattgacgtgaacctgtacaacgagacggtggagactctcatggctggggaagttagtgccatggttggttccgctgtgtggcagctgattgcttccttcctgaggcttccaatctcaggaacgcactgcattgtgggttctactataggattctcactggtcgcaatcggtaccaaaggtgtgcagtggatggagcttgtcaagattgttgcttcttggtttatatctccactgttgtctggtttcatgtctggcctgctgtttgtactcatcagaattttcatcttaaaaaaggaagaccctgttcccaatggcctccgggcactcccagtattctatgctgctaccatagcaatcaatgtcttttccatcatgtacacaggagcaccagtgctcggccttgttctccccatgtgggccatagccctcatttcctttggtgtcgccctcctgttcgctttttttgtgtggctcttcgtgtgtccgtggatgcggaggaaaataacaggcaaattacaaaaagaaggtgctttatcacgagtatctgacgaaagcctcagtaaggttcaggaagcagagtccccagtatttaaagagctaccaggtgccaaggctaatgatgacagcaccatcccgctcacgggagcagcaggggagacactggggacctcggaaggcacttctgcgggcagccaccctcgggctgcatacggaagagcactgtccatgacccatggctctgtgaaatcgcccatctccaacggcaccttcggcttcgacggccacaccaggagcgacggtcatgtgtaccacaccgtgcacaaagactcggggctctacaaagatctgctgcacaaaatccacatcgacaggggccccgaggagaagccagcccaggaaagcaactaccggctgctgcgccgaaacaacagttacacctgctacaccgcagccatttgtgggctgccagtgcacgccacctttcgagctgcggactcatcggccccagaggacagtgagaagctggtgggcgacaccgtgtcctactccaagaagaggctgcgctacgacagctactcgagctactgtaacgcggtggcagaggcggagatcgaggcggaggagggcggcgtggagatgaagctggcgtcggagctggccgaccctgaccagccgcgagaggaccctgcagaggaggagaaggaggagaaggacgcacccgaggttcacctcctgttccatttcctgcaggtcctcaccgcctgtttcgggtcctttgctcacggcggcaatgacgtgagtaatgccatcggtcccctggtagccttgtggctgatttacaaacaaggcggggtaacgcaagaagcagctacacccgtctggctgctgttttatggaggagttggaatctgcacaggcctctgggtctgggggagaagagtgatccagaccatggggaaggacctcactcccatcacgccgtccagcggcttcacgatcgagctggcctcagccttcacagtggtgatcgcctccaacatcgggcttccagtcagcaccacgcactgtaaggtgggctcggtggtggccgtgggctggatccgctcccgcaaggctgtggactggcgcctctttcggaacatcttcgtggcctggttcgtgaccgtccctgtggctgggctgttcagcgctgctgtcatggctcttctcatgtatgggatccttccatatgtgtgatttgtcttcttccagctgcaaacagctaaagggatggtctggtgttggcgtgtgggagacatgtgtgctcgtgccgcacatacacatcctggccgtgcacggctctctcatgaccagctctctgcctcccttccaggaggctccatcccacactgttcacccaggctgcggagactcaccttcccgagctaacttaactactgtacataataatatgtattaaactggtatcgtggtgatataatgtggtgcagttacttatatattaaatatctattgtatccatagaataggcagcattatttcaaacatattcaagttgggagtggagatcattgc

SEQ ID NO: 28711 - DNA, 751 bp, Homo sapiens
  source 1..751: mol_type = unassigned DNA
gccgaggggatgcaatctcagatcagcagccagcagtgtttgtaaacaacaggagggagattgtgctggtgatgtccaactcacaccaatgaagatcaaccggtttgtgctttgggcagcaggctgcagatggacagtgcctcctgagggcatcgccatgttttagggatccatgttgcaggatacctgtctgcaagagagagtcaaggagggctttttaagcccctggggttcaggcctggcatctgggtgttaagtagagtgaatctcctgaagtccaaactaacatatgacattttaaaatgaggaaaacaaatggctctgaaaaggtctataggattataggaggagacatcacagctttcccagatcgggaggaaaaatatggaatgtgttttaccgctgactgaacacaaccaaatgaactgtcctgacagtagtttgcaaaccagcagctagcagtttgtccagcctctaacattgtccagcactttccagagcaaactcactgtttacaagaactcttggccttacgaagtttataacctcaagctttgtttatttaaaatattcctgcaaaagaaaagtacccggcacccactttccaaaatggccatggatgagtatttgtggatggtcattttgggtttcatcatagctttcatcttggccttttctgttggtgcaaacgatgttgccaactcctttggtacagccgtgggctctggtgtggtgaccttgaggcaggcat

SEQ ID NO: 28712 - DNA, 1387 bp, Homo sapiens
  source 1..1387: mol_type = unassigned DNA
agcagctgccggcccctaggacagagcagggacctcaactacactgatcaccagccccatcggatccagacccggccaccagtgggacttggtgtgcaactccaacaaactgaaggagatggcccagtctatcttcatggcaggtatactgattggagggctcgtgcttggagacctgtctgacaggtttggccgcaggcccatcctgacctgcagctacctgctgctggcagccagcggctccggtgcagccttcagccccaccttccccatctacatggtcttccgcttcctgtgtggctttggcatctcaggcattaccctgagcaccgtcatcttgaatgtggaatgggtgcctacccggatgcgggccatcatgtcgacagcactcgggtactgctacacctttggccagttcattctgcccggcctggcctacgccatcccccagtggcgttggctgcagttaactgtgtccattcccttcttcgtcttcttcctatcatcctggtggacaccagagtccatacgctggttggtcttgtctggaaagtcctcgaaggccctgaagatactccggcgggtggctgtcttcaatggcaagaaggaagagggagaaaggctcagcttggaggagctcaaactcaacctgcagaaggagatctccttggccaaggccaagtacaccgcaagtgacctgttccggatacccatgctgcgccgcatgaccttctgtctttccctggcctggtttgctaccggttttgcctactatagtttggctatgggtgtggaagaatttggagtcaacctctacatcctccagatcatctttggtggggtcgatgtcccagccaagttcatcaccatcctctccttaagctacctgggccggcataccactcaggccgctgccctgctcctggcaggaggggccatcttggctctcacctttgtgcccttggacttgcagaccgtgaggacagtattggctgtgtttgggaagggatgcctatccagctccttcagctgcctcttcctctacacaagtgaattataccccacagtcatcaggcaaacaggtatgggcgtaagtaacctgtggacccgcgtgggaagcatggtgtccccgctggtgaaaatcacgggtgaggtacagcccttcatccccaatatcatctacgggatcaccgccctcctcgggggcagtgctgccctcttcctgcctgagaccctgaatcagcccttgccagagactatcgaagacctggaaaactggtccctgcgggcaaagaagccaaagcaggagccagaggtggaaaaggcctcccagaggatccctctacagcctcacggaccaggcctgggctccagctgaggacaacgg

SEQ ID NO: 28713 - DNA, 1622 bp, Homo sapiens
  source 1..1622: mol_type = unassigned DNA
actacagcagctgccggcccctaggacagagcagggacctcaactacactgatcaccagccccatcggatccagacccggccaccagcctgcccaatgacacccagagggccatggagccatgcctggatggctgggtctacaacagcaccaaggactccattgtgacagagtgggacttggtgtgcaactccaacaaactgaaggagatggcccagtctatcttcatggcaggtatactgattggagggctcgtgcttggagacctgtctgacaggtttggccgcaggcccatcctgacctgcagctacctgctgctggcagccagcggctccggtgcagccttcagccccaccttccccatctacatggtcttccgcttcctgtgtggctttggcatctcaggcattaccctgagcaccgtcatcttgaatgtggaatgggtgcctacccggatgcgggccatcatgtcgacagcactcgggtactgctacacctttggccagttcattctgcccggcctggcctacgccatcccccagtggcgttggctgcagttaactgtgtccattcccttcttcgtcttcttcctatcatcctggtggacaccagagtccatacgctggttggtcttgtctggaaagtcctcgaaggccctgaagatactccggcgggtggctgtcttcaatggcaagaaggaagagggagaaaggctcagcttggaggagctcaaactcaacctgcagaaggagatctccttggccaaggccaagtacaccgcaagtgacctgttccggatacccatgctgcgccgcatgaccttctgtctttccctggcctggtttgctaccggttttgcctactatagtttggctatgggtgtggaagaatttggagtcaacctctacatcctccagatcatctttggtggggtcgatgtcccagccaagttcatcaccatcctctccttaagctacctgggccggcataccactcaggccgctgccctgctcctggcaggaggggccatcttggctctcacctttgtgcccttggacttgcagaccgtgaggacagtattggctgtgtttgggaagggatgcctatccagctccttcagctgcctcttcctctacacaagtgaattataccccacagtcatcaggcaaacaggtatgggcgtaagtaacctgtggacccgcgtgggaagcatggtgtccccgctggtgaaaatcacgggtgaggtacagcccttcatccccaatatcatctacgggatcaccgccctcctcgggggcagtgctgccctcttcctgcctgagaccctgaatcagcccttgccagagactatcgaagacctggaaaactggtccctgcgggcaaagaagccaaagcaggagccagaggtggaaaaggcctcccagaggatccctctacagcctcacggaccaggcctgggctccagctgaggacaacggaaccccctttccctgccctccagagactgatcctagccaggcaccttaggagtatagggaggccccatataggtccatcctcctaggatgaagccttctgagagcttggtgaaggtgtctccatcaccaccaccagagcctcctg

SEQ ID NO: 28714 - DNA, 2143 bp, Homo sapiens
  source 1..2143: mol_type = unassigned DNA
caagggtcaggtctccagcagaccctgaaagctgagctgccctgacccccaaagtgaggagaagctgcaagggaaaagggagggacagatcagggagaccggggaagaaggaggagcagccaaggaggctgctgtccccccacagagcagctcggactcagctcccggagcaacccagctgcggaggcaacggcagtgctgctcctccagcgaaggacagcaggcaggcagacagacagaggtcctgggactggaaggcctcagcccccagccactgggctgggcctggcccaatggcctttaatgacctcctgcagcaggtggggggtgtcggccgcttccagcagatccaggtcaccctggtggtcctccccctgctcctgatggcttctcacaacaccctgcagaacttcactgctgccatccctacccaccactgccgcccgcctgccgatgccaacctcagcaagaacggggggctggaggtctggctgccccgggacaggcaggggcagcctgagtcctgcctccgcttcacctccccgcagtggggactgccctttctcaatggcacagaagccaatggcacaggggccacagagccctgcaccgatggctggatctatgacaacagcaccttcccatctaccatcgtgactgagtgggaccttgtgtgctctcacagggccctacgccagctggcccagtccttgtacatggtgggggtgctgctcggagccatggtgttcggctaccttgcagacaggctaggccgccggaaggtactcatcttgaactacctgcagacagctgtgtcagggacctgcgcagccttcgcacccaacttccccatctactgcgccttccggctcctctcgggcatggctctggctggcatctccctcaactgcatgacactgaatgtggagtggatgcccattcacacacgggcctgcgtgggcaccttgattggctatgtctacagcctgggccagttcctcctggctggtgtggcctacgctgtgccccactggcgccacctgcagctactggtctctgcgcctttttttgccttcttcatctactcctggttcttcattgagtcggcccgctggcactcctcctccgggaggctggacctcaccctgagggccctgcagagagtcgcccggatcaatgggaagcgggaagaaggagccaaattgagtatggaggtactccgggccagtctgcagaaggagctgaccatgggcaaaggccaggcatcggccatggagctgctgcgctgccccaccctccgccacctcttcctctgcctctccatgctgtggtttgccactagctttgcatactatgggctggtcatggacctgcagggctttggagtcagcatctacctaatccaggtgatctttggtgctgtggacctgcctgccaagcttgtgggcttccttgtcatcaactccctgggtcgccggcctgcccagatggctgcactgctgctggcaggcatctgcatcctgctcaatggggtgataccccaggaccagtccattgtccgaacctctcttgctgtgctggggaagggttgtctggctgcctccttcaactgcatcttcctgtatactggggaactgtatcccacaatgatccggcagacaggcatgggaatgggcagcaccatggcccgagtgggcagcatcgtgagcccactggtgagcatgactgccgagctctacccctccatgcctctcttcatctacggtgctgttcctgtggccgccagcgctgtcactgtcctcctgccagagaccctgggccagccactgccagacacggtgcaggacctggagagcaggaaagggaaacagacgcgacagcaacaagagcaccagaagtatatggtcccactgcaggcctcagcacaagagaagaatggactctgaggactgagaaggggccttacagaaccctaaagggagggaaggtcctacaggtctccggccacccacacaaggaggaggaagaggaaatggtgacccaagtgtgggggttgtggttcaggaaagcatcttcccaggggtccacctccctttataaaccccaccagaaccacatcattaaaaggtttgactgcgcacca

SEQ ID NO: 28715 - DNA, 2151 bp, Homo sapiens
  source 1..2151: mol_type = unassigned DNA
gaaagctgagctgccctgacccccaaagtgaggagaagctgcaagggaaaagggagggacagatcagggagaccggggaagaaggaggagcagccaaggaggctgctgtccccccacagagcagctcggactcagctcccggagcaacccagctgcggaggcaacggcagtgctgctcctccagcgaaggacagcaggcaggcagacagacagaggtcctgggactggaaggcctcagcccccagccactgggctgggcctggcccaatggcctttaatgacctcctgcagcaggtggggggtgtcggccgcttccagcagatccaggtcaccctggtggtcctccccctgctcctgatggcttctcacaacaccctgcagaacttcactgctgccatccctacccaccactgccgcccgcctgccgatgccaacctcagcaagaacggggggctggaggtctggctgccccgggacaggcaggggcagcctgagtcctgcctccgcttcacctccccgcagtggggactgccctttctcaatggcacagaagccaatggcacaggggccacagagccctgcaccgatggctggatctatgacaacagcaccttcccatctaccatcgtgactgagtgggaccttgtgtgctctcacagggccctacgccagctggcccagtccttgtacatggtgggggtgctgctcggagccatggtgttcggctaccttgcagacaggctaggccgccggaaggtactcatcttgaactacctgcagacagctgtgtcagggacctgcgcagccttcgcacccaacttccccatctactgcgccttccggctcctctcgggcatggctctggctggcatctccctcaactgcatgacactgaatgtggagtggatgcccattcacacacgggcctgcgtgggcaccttgattggctatgtctacagcctgggccagttcctcctggctggtgtggcctacgctgtgccccactggcgccacctgcagctactggtctctgcgcctttttttgccttcttcatctactcctggttcttcattgagtcggcccgctggcactcctcctccgggaggctggacctcaccctgagggccctgcagagagtcgcccggatcaatgggaagcgggaagaaggagccaaattgagtatggaggtactccgggccagtctgcagaaggagctgaccatgggcaaaggccaggcatcggccatggagctgctgcgctgccccaccctccgccacctcttcctctgcctctccatgctgtggtttgccactagctttgcatactatgggctggtcatggacctgcagggctttggagtcagcatctacctaatccaggtgatctttggtgctgtggacctgcctgccaagcttgtgggcttccttgtcatcaactccctgggtcgccggcctgcccagatggctgcactgctgctggcaggcatctgcatcctgctcaatggggtgataccccaggaccagtccattgtccgaacctctcttgctgtgctggggaagggttgtctggctgcctccttcaactgcatcttcctgtatactggggaactgtatcccacaatgatccggcagacaggcatgggaatgggcagcaccatggcccgagtgggcagcatcgtgagcccactggtgagcatgactgccgagctctacccctccatgcctctcttcatctacggtgctgttcctgtggccgccagcgctgtcactgtcctcctgccagagaccctgggccagccactgccagacacggtgcaggacctggagagcaggtgggcccccactcagaaagaagcagggatatatcccaggaaagggaaacagacgcgacagcaacaagagcaccagaagtatatggtcccactgcaggcctcagcacaagagaagaatggactctgaggactgagaaggggccttacagaaccctaaagggagggaaggtcctacaggtctccggccacccacacaaggaggaggaagaggaaatggtgacccaagtgtgggggttgtggttcaggaaagcatcttcccaggggtccacctccctttataaaccccaccagaaccacatcattaaaaggtttgactgcg

SEQ ID NO: 28716 - DNA, 2093 bp, Homo sapiens
  source 1..2093: mol_type = unassigned DNA
aaaaactgcccatgcaagggtcaggtctccagcagaccctgaaagctgagctgccctgacccccaaagtgaggagaagctgcaagggaaaagggagggacagatcagggagaccggggaagaaggaggagcagccaaggaggctgctgtccccccacagagcagctcggactcagctcccggagcaacccagctgcggaggcaacggcagtgctgctcctccagcgaaggacagcaggcaggcagacagacagaggtcctgggactggaaggcctcagcccccagccactgggctgggcctggcccaatggcctttaatgacctcctgctcctgatggcttctcacaacaccctgcagaacttcactgctgccatccctacccaccactgccgcccgcctgccgatgccaacctcagcaagaacggggggctggaggtctggctgccccgggacaggcaggggcagcctgagtcctgcctccgcttcacctccccgcagtggggactgccctttctcaatggcacagaagccaatggcacaggggccacagagccctgcaccgatggctggatctatgacaacagcaccttcccatctaccatcgtgactgagtgggaccttgtgtgctctcacagggccctacgccagctggcccagtccttgtacatggtgggggtgctgctcggagccatggtgttcggctaccttgcagacaggctaggccgccggaaggtactcatcttgaactacctgcagacagctgtgtcagggacctgcgcagccttcgcacccaacttccccatctactgcgccttccggctcctctcgggcatggctctggctggcatctccctcaactgcatgacactgaatgtggagtggatgcccattcacacacgggcctgcgtgggcaccttgattggctatgtctacagcctgggccagttcctcctggctggtgtggcctacgctgtgccccactggcgccacctgcagctactggtctctgcgcctttttttgccttcttcatctactcctggttcttcattgagtcggcccgctggcactcctcctccgggaggctggacctcaccctgagggccctgcagagagtcgcccggatcaatgggaagcgggaagaaggagccaaattgagtatggaggtactccgggccagtctgcagaaggagctgaccatgggcaaaggccaggcatcggccatggagctgctgcgctgccccaccctccgccacctcttcctctgcctctccatgctgtggtttgccactagctttgcatactatgggctggtcatggacctgcagggctttggagtcagcatctacctaatccaggtgatctttggtgctgtggacctgcctgccaagcttgtgggcttccttgtcatcaactccctgggtcgccggcctgcccagatggctgcactgctgctggcaggcatctgcatcctgctcaatggggtgataccccaggaccagtccattgtccgaacctctcttgctgtgctggggaagggttgtctggctgcctccttcaactgcatcttcctgtatactggggaactgtatcccacaatgatccggcagacaggcatgggaatgggcagcaccatggcccgagtgggcagcatcgtgagcccactggtgagcatgactgccgagctctacccctccatgcctctcttcatctacggtgctgttcctgtggccgccagcgctgtcactgtcctcctgccagagaccctgggccagccactgccagacacggtgcaggacctggagagcaggaaagggaaacagacgcgacagcaacaagagcaccagaagtatatggtcccactgcaggcctcagcacaagagaagaatggactctgaggactgagaaggggccttacagaaccctaaagggagggaaggtcctacaggtctccggccacccacacaaggaggaggaagaggaaatggtgacccaagtgtgggggttgtggttcaggaaagcatcttcccaggggtccacctccctttataaaccccaccagaaccacatcattaaaaggtttgactgcgcacc

SEQ ID NO: 28717 - DNA, 1560 bp, Homo sapiens
  source 1..1560: mol_type = unassigned DNA
atggcctttaatgacctcctgcagcaggtggggggtgtcggccgcttccagcagatccaggtcaccctggtggtcctccccctgctcctgatggcttctcacaacaccctgcagaacttcactgctgccatccctacccaccactgccgcccgcctgccgatgccaacctcagcaagaacggggggctggaggtctggctgccccgggacaggcaggggcagcctgagtcctgcctccgcttcacctccccgcagtggggactgccctttctcaatggcacagaagccaatggcacaggggccacagagccctgcaccgatggctggatctatgacaacagcaccttcccatctaccatcgtgactgagtgggaccttgtgtgctctcacagggccctacgccagctggcccagtccttgtacatggtgggggtgctgctcggagccatggtgttcggctaccttgcagacaggctaggccgccggaaggtactcatcttgaactacctgcagacagctgtgtcagggacctgcgcagccttcgcacccaacttccccatctactgcgccttccggctcctctcgggcatggctctggctggcatctccctcaactgcatgacactgaatgtggagtggatgcccattcacacacgggcctgcgtgggcaccttgattggctatgtctacagcctgggccagttcctcctggctggtgtggcctacgctgtgccccactggcgccacctgcagctactggtctctgcgcctttttttgccttcttcatctactcctggttcttcattgagtcggcccgctggcactcctcctccgggaggctggacctcaccctgagggccctgcagagagtcgcccggatcaatgggaagcgggaagaaggagccaaattgagtatggaggtactccgggccagtctgcagaaggagctgaccatgggcaaaggccaggcatcggccatggagctgctgcgctgccccaccctccgccacctcttcctctgcctctccatgctgtggtttgccactagctttgcatactatgggctggtcatggacctgcagggctttggagtcagcatctacctaatccaggtgatctttggtgctgtggacctgcctgccaagcttgtgggcttccttgtcatcaactccctgggtcgccggcctgcccagatggctgcactgctgctggcaggcatctgcatcctgctcaatggggtgataccccaggaccagtccattgtccgaacctctcttgctgtgctggggaagggttgtctggctgcctccttcaactgcatcttcctgtatactggggaactgtatcccacaatgatccgcgctgtcactgtcctcctgccagagaccctgggccagccactgccagacacggtgcaggacctggagagcaggtgggcccccactcagaaagaagcagggatatatcccaggaaagggaaacagacgcgacagcaacaagagcaccagaagtatatggtcccactgcaggcctcagcacaagagaagaatggactctga

SEQ ID NO: 28718 - DNA, 1521 bp, Homo sapiens
  source 1..1521: mol_type = unassigned DNA
atggcctttaatgacctcctgcagcaggtggggggtgtcggccgcttccagcagatccaggtcaccctggtggtcctccccctgctcctgatggcttctcacaacaccctgcagaacttcactgctgccatccctacccaccactgccgcccgcctgccgatgccaacctcagcaagaacggggggctggaggtctggctgccccgggacaggcaggggcagcctgagtcctgcctccgcttcacctccccgcagtggggactgccctttctcaatggcacagaagccaatggcacaggggccacagagccctgcaccgatggctggatctatgacaacagcaccttcccatctaccatcgtgactgagtgggaccttgtgtgctctcacagggccctacgccagctggcccagtccttgtacatggtgggggtgctgctcggagccatggtgttcggctaccttgcagacaggctaggccgccggaaggtactcatcttgaactacctgcagacagctgtgtcagggacctgcgcagccttcgcacccaacttccccatctactgcgccttccggctcctctcgggcatggctctggctggcatctccctcaactgcatgacactgaatgtggagtggatgcccattcacacacgggcctgcgtgggcaccttgattggctatgtctacagcctgggccagttcctcctggctggtgtggcctacgctgtgccccactggcgccacctgcagctactggtctctgcgcctttttttgccttcttcatctactcctggttcttcattgagtcggcccgctggcactcctcctccgggaggctggacctcaccctgagggccctgcagagagtcgcccggatcaatgggaagcgggaagaaggagccaaattgagtatggaggtactccgggccagtctgcagaaggagctgaccatgggcaaaggccaggcatcggccatggagctgctgcgctgccccaccctccgccacctcttcctctgcctctccatgctgtggtttgccactagctttgcatactatgggctggtcatggacctgcagggctttggagtcagcatctacctaatccaggtgatctttggtgctgtggacctgcctgccaagcttgtgggcttccttgtcatcaactccctgggtcgccggcctgcccagatggctgcactgctgctggcaggcatctgcatcctgctcaatggggtgataccccaggaccagtccattgtccgaacctctcttgctgtgctggggaagggttgtctggctgcctccttcaactgcatcttcctgtatactggggaactgtatcccacaatgatccgcgctgtcactgtcctcctgccagagaccctgggccagccactgccagacacggtgcaggacctggagagcaggaaagggaaacagacgcgacagcaacaagagcaccagaagtatatggtcccactgcaggcctcagcacaagagaagaatggactctga

SEQ ID NO: 28719 - DNA, 1822 bp, Homo sapiens
  source 1..1822: mol_type = unassigned DNA
atgggctttgaggagctgctggagcaggtgggcggctttgggcccttccaactgcggaatgtggcactgctggccctgccccgagtgctgctaccactgcacttcctcctgcccatcttcctggctgccgtgcctgcccaccgatgtgccctgccgggtgcccctgccaacttcagccatcaggatgtgtggctggaggcccatcttccccgggagcctgatggcacgctcagctcctgcctccgctttgcctatccccaggctctccccaacaccacgttgggggaagaaaggcagagccgtggggagctggaggatgaacctgccacagtgccctgctctcagggctgggagtacgaccactcagaattctcctctaccattgcaactgagtgggatctggtgtgtgagcagaaaggtctgaacagagctgcgtccactttcttcttcgccggtgtgctggtgggggctgtggcctttggatatctgtccgacaggtttgggcggcggcgtctgctgctggtagcctacgtgagtaccctggtgctgggcctggcatctgcagcctccgtcagctatgtaatgtttgccatcacccgcacccttactggctcagccctggctggttttaccatcatcgtgatgccactggagctggagtggctggatgtggagcaccgcaccgtggctggagtcctgagcagcaccttctggacagggggcgtgatgctgctggcactggttgggtacctgatacgggactggcgatggcttctgctagctgtcaccctgccttgtgccccaggcatcctcagcctctggtgggtgcctgagtctgcacgctggcttctgacccaaggccatgtgaaagaggcccacaggtacttgctccactgtgccaggctcaatgggcggccagtgtgtgaggacagcttcagccaggaggctgtgagcaaagtggccgccggggaacgggtggtccgaagaccttcatacctagacctgttccgcacaccacggctccgacacatctcactgtgctgcgtggtggtgtggttcggagtgaacttctcctattacggcctgagtctggatgtgtcggggctggggctgaacgtgtaccagacacagctgttgttcggggctgtggaactgccctccaagctgctggtctacttgtcggtgcgctacgcaggacgccgcctcacgcaagctgggacactgctgggcacggccctggcgttcggcactagactgctagtgtcctccgatatgaagtcctggagcactgtcctggcagtgatggggaaagctttttctgaagctgccttcaccactgcctacctgttcacttcagagttgtaccctacggtgctcagacagacagggatggggctgactgcactggtgggccggctggggggctctttggccccactggcggccttgctggatggagtgtggctgtcactgcccaagcttacttatggggggatcgccctgctggctgccggcaccgccctcctgctgccagagacgaggcaggcacagctgccagagaccatccaggacgtggagagaaagaggtgtgtgcacaggactgtgtctgtgtacgtgtgataacatgcatatggatgcaggtgctcagatacctgacaccttaggattcagacaggaaactatatctgcacatgtgtacttggtgcatgtatgtgtgcgtgcacaggtgagtgtttcagggtgcatgattgggggcatgtaaactgcaagcataaatgtgtacatgagtgtatgaacacaaatacataaggttgttcaggaa

SEQ ID NO: 28720 - DNA, 2555 bp, Homo sapiens
  source 1..2555: mol_type = unassigned DNA
ccacctccagagtccaagggtctatgtggtgggcagtttgagctggctggatactagagggaggctgcacctgaagcatttggtgggtgagcagcatgggctttgaggagctgctggagcaggtgggcggctttgggcccttccaactgcggaatgtggcactgctggccctgccccgagtgctgctaccactgcacttcctcctgcccatcttcctggctgccgtgcctgcccaccgatgtgccctgccgggtgcccctgccaacttcagccatcaggatgtgtggctggaggcccatcttccccgggagcctgatggcacgctcagctcctgcctccgctttgcctatccccaggctctccccaacaccacgttgggggaagaaaggcagagccgtggggagctggaggatgaacctgccacagtgccctgctctcagggctgggagtacgaccactcagaattctcctctaccattgcaactgagtcccagtgggatctggtgtgtgagcagaaaggtctgaacagagctgcgtccactttcttcttcgccggtgtgctggtgggggctgtggcctttggatatctgtccgacaggtttgggcggcggcgtctgctgctggtagcctacgtgagtaccctggtgctgggcctggcatctgcagcctccgtcagctatgtaatgtttgccatcacccgcacccttactggctcagccctggctggttttaccatcatcgtgatgccactggagctggagtggctggatgtggagcaccgcaccgtggctggagtcctgagcagcaccttctggacagggggcgtgatgctgctggcactggttgggtacctgatacgggactggcgatggcttctgctagctgtcaccctgccttgtgccccaggcatcctcagcctctggtgggtgcctgagtctgcacgctggcttctgacccaaggccatgtgaaagaggcccacaggtacttgctccactgtgccaggctcaatgggcggccagtgtgtgaggacagcttcagccaggaggctgtgagcaaagtggccgccggggaacgggtggtccgaagaccttcatacctagacctgttccgcacaccacggctccgacacatctcactgtgctgcgtggtggtgtggttcggagtgaacttctcctattacggcctgagtctggatgtgtcggggctggggctgaacgtgtaccagacacagctgttgttcggggctgtggaactgccctccaagctgctggtctacttgtcggtgcgctacgcaggacgccgcctcacgcaagctgggacactgctgggcacggccctggcgttcggcactagactgctagtgtcctccgatatgaagtcctggagcactgtcctggcagtgatggggaaagctttttctgaagctgccttcaccactgcctacctgttcacttcagagttgtaccctacggtgctcagacagacagggatggggctgactgcactggtgggccggctggggggctctttggccccactggcggccttgctggatggagtgtggctgtcactgcccaagcttacttatggggggatcgccctgctggctgccggcaccgccctcctgctgccagagacgaggcaggcacagctgccagagaccatccaggacgtggagagaaagagtgccccaaccagtcttcaggaggaagagatgcccatgaagcaggtccagaactaagtgggagtggaggcaggccctccacagaagctctgcagcaggggctgggagagcagaagggcaggccctgcaactcaggctgggagtatcgaaccctctgcctagggccggagttgctgccagtacccgctccctctgctcatccatccttgattatttggcttctaggaacagttgacttcccagaatgcagtgggctgctgggcacccctctcacggttggggaggattctgtaaataaaggtgccccttgggttggggcagtggtgacgagctgtgggaagagccctggataggaagccactgagtctgccctgggctctgataaaaccttcaccattaacttgctgtgtgaccttgggcatgtggctttccctctctgggcctcagtctgttcatctcccaaatggataatgaagcctcttgggaggccctaccataggatctgttgccatgctcaaatgagttactgaataaggtgcttctgcttcttctagagatggtgctaaagaaaggactagcatatgagacttctggtaccaatggggctggtgggcatgctgtccactgtgtggtgctaggactgccaatgccaggcccaagggacaaaaagaacagagctttttgttctcatggctggccctgctacctccgaggcaccctgcagggcaatgcatgtcatcccaacccccacactccccatcctccaacccactggtctcatgcccaaagaagagttgaaggcatgggagccaacattttattgaagaagccacagaggctgaaattcaataaacacaagttttatgagta

SEQ ID NO: 28721 - DNA, 2549 bp, Homo sapiens
  source 1..2549: mol_type = unassigned DNA
ccacctccagagtccaagggtctatgtggtgggcagtttgagctggctggatactagagggaggctgcacctgaagcatttggtgggtgagcagcatgggctttgaggagctgctggagcaggtgggcggctttgggcccttccaactgcggaatgtggcactgctggccctgccccgagtgctgctaccactgcacttcctcctgcccatcttcctggctgccgtgcctgcccaccgatgtgccctgccgggtgcccctgccaacttcagccatcaggatgtgtggctggaggcccatcttccccgggagcctgatggcacgctcagctcctgcctccgctttgcctatccccaggctctccccaacaccacgttgggggaagaaaggcagagccgtggggagctggaggatgaacctgccacagtgccctgctctcagggctgggagtacgaccactcagaattctcctctaccattgcaactgagtgggatctggtgtgtgagcagaaaggtctgaacagagctgcgtccactttcttcttcgccggtgtgctggtgggggctgtggcctttggatatctgtccgacaggtttgggcggcggcgtctgctgctggtagcctacgtgagtaccctggtgctgggcctggcatctgcagcctccgtcagctatgtaatgtttgccatcacccgcacccttactggctcagccctggctggttttaccatcatcgtgatgccactggagctggagtggctggatgtggagcaccgcaccgtggctggagtcctgagcagcaccttctggacagggggcgtgatgctgctggcactggttgggtacctgatacgggactggcgatggcttctgctagctgtcaccctgccttgtgccccaggcatcctcagcctctggtgggtgcctgagtctgcacgctggcttctgacccaaggccatgtgaaagaggcccacaggtacttgctccactgtgccaggctcaatgggcggccagtgtgtgaggacagcttcagccaggaggctgtgagcaaagtggccgccggggaacgggtggtccgaagaccttcatacctagacctgttccgcacaccacggctccgacacatctcactgtgctgcgtggtggtgtggttcggagtgaacttctcctattacggcctgagtctggatgtgtcggggctggggctgaacgtgtaccagacacagctgttgttcggggctgtggaactgccctccaagctgctggtctacttgtcggtgcgctacgcaggacgccgcctcacgcaagctgggacactgctgggcacggccctggcgttcggcactagactgctagtgtcctccgatatgaagtcctggagcactgtcctggcagtgatggggaaagctttttctgaagctgccttcaccactgcctacctgttcacttcagagttgtaccctacggtgctcagacagacagggatggggctgactgcactggtgggccggctggggggctctttggccccactggcggccttgctggatggagtgtggctgtcactgcccaagcttacttatggggggatcgccctgctggctgccggcaccgccctcctgctgccagagacgaggcaggcacagctgccagagaccatccaggacgtggagagaaagagtgccccaaccagtcttcaggaggaagagatgcccatgaagcaggtccagaactaagtgggagtggaggcaggccctccacagaagctctgcagcaggggctgggagagcagaagggcaggccctgcaactcaggctgggagtatcgaaccctctgcctagggccggagttgctgccagtacccgctccctctgctcatccatccttgattatttggcttctaggaacagttgacttcccagaatgcagtgggctgctgggcacccctctcacggttggggaggattctgtaaataaaggtgccccttgggttggggcagtggtgacgagctgtgggaagagccctggataggaagccactgagtctgccctgggctctgataaaaccttcaccattaacttgctgtgtgaccttgggcatgtggctttccctctctgggcctcagtctgttcatctcccaaatggataatgaagcctcttgggaggccctaccataggatctgttgccatgctcaaatgagttactgaataaggtgcttctgcttcttctagagatggtgctaaagaaaggactagcatatgagacttctggtaccaatggggctggtgggcatgctgtccactgtgtggtgctaggactgccaatgccaggcccaagggacaaaaagaacagagctttttgttctcatggctggccctgctacctccgaggcaccctgcagggcaatgcatgtcatcccaacccccacactccccatcctccaacccactggtctcatgcccaaagaagagttgaaggcatgggagccaacattttattgaagaagccacagaggctgaaattcaataaacacaagttttatgagta

SEQ ID NO: 28722 - DNA, 658 bp, Homo sapiens
  source 1..658: mol_type = unassigned DNA
attgagatcacatagccaactctgatgttacaacctcacctccttccctaccaggctgtgagcaaagtggccgccggggaacgggtggtccgaagaccttcatacctagacctgttccgcacaccacggctccgacacatctcactgtgctgcgtggtggtgtggttcggagtgaacttctcctattacggcctgagtctggatgtgtcggggctggggctgaacgtgtaccagacacagctgttgttcggggctgtggaactgccctccaagctgctggtctacttgtcggtgcgctacgcaggacgccgcctcacgcaagctgggacactgctgggcacggccctggcgttcggcactagactgctagtgtcctccgatatgaagtcctggagcactgtcctggcagtgatggggaaagctttttctgaagctgccttcaccactgcctacctgttcacttcagagttgtaccctacggtgctcagacagacagggatggggctgactgcactggtgggccggctggggggctctttggccccactggcggccttgctggatggagtgtggctgtcactgcccaagcttacttatggggggatcgccctgctggctgccggcaccgccctcctgctgccagagacgaggcaggcac

SEQ ID NO: 28723 - DNA, 933 bp, Homo sapiens
  source 1..933: mol_type = unassigned DNA
ctcccacctccagagtccaagggtctatgtggtgggcagtttgagctggctggatactagagggaggctgcacctgaagcatttggtgggtgagcagcatgggctttgaggagctgctggagcaggtgggcggctttgggcccttccaactgcggaatgtggcactgctggccctgccccgagtgctgctaccactgcacttcctcctgcccatcttcctggctgccgtgcctgcccaccgatgtgccctgccgggtgcccctgccaacttcagccatcaggatgtgtggctggaggcccatcttccccgggagcctgatggcacgctcagctcctgcctccgctttgcctatccccaggctctccccaacaccacgttgggggaagaaaggcagagccgtggggagctggaggatgaacctgccacagtgccctgctctcagggctgggagtacgaccactcagaattctcctctaccattgcaactgagtcccaggtcggtatttacataatccatctggaggtggaatgtcggtggaggcagtctccctgggaggcagcaggtcgaggccttccttgggaagaagctgaggctgcaggactggggagggacaaagtttcctattccccaagctggcgtgaatcgttgggaggtttattatctggcatggagtgggatctggtgtgtgagcagaaaggtctgaacagagctgcgtccactttcttcttcgccggtgtgctggtgggggctgtggcctttggatatctgtccgacaggtttgggcggcggcgtctgctgctggtagcctacgtgagtaccctggtgctgggcctggcatctgcagcctccgtcagctatgtaatgtttgccatcacccgcacccttactggctcagccctggctggttttaccatcatcgtgatgccactgg

SEQ ID NO: 28724 - DNA, 846 bp, Homo sapiens
  source 1..846: mol_type = unassigned DNA
tgggagctctgctgaccaaggggctaggggctcacctcctatgccatcacccagctacctcatcatggtagccttggtccctgaacactaatgggctctccccaacaccacgttgggggaagaaaggcagagccgtggggagctggaggatgaacctgccacagtgccctgctctcagggctgggagtacgaccactcagaattctcctctaccattgcaactgagtcccaggtcggtatttacataatccatctggaggtggaatgtcggtggaggcagtctccctgggaggcagcaggtcgaggccttccttgggaagaagctgaggctgcaggactggggagggacaaagtttcctattccccaagctggcgtgaatcgttgggaggtttattatctggcatggagtgggatctggtgtgtgagcagaaaggtctgaacagagctgcgtccactttcttcttcgccggtgtgctggtgggggctgtggcctttggatatctgtccgacaggtttgggcggcggcgtctgctgctggtagcctacgtgagtaccctggtgctgggcctggcatctgcagcctccgtcagctatgtaatgtttgccatcacccgcacccttactggctcagccctggctggttttaccatcatcgtgatgccactgggtgaggcagagctggagtggctggatgtggagcaccgcaccgtggctggagtcctgagcagcaccttctggacagggggcgtgatgctgctggcactggttgggtacctgatacgggactggcgatggcttctgctagctgtcaccctgccttgtgccccaggcatcctcagcctctg

SEQ ID NO: 28725 - DNA, 2178 bp, Homo sapiens
  source 1..2178: mol_type = unassigned DNA
agcttgttagagctgagctgccctactacagcagctgccggcccctaggacagagcagggacctcaactacactgatcaccagccccatcggatccagacccggccaccagctctggctcgtcttgccccagtgccatgaccttctcggagatcctggaccgtgtgggaagcatgggccatttccagttcctgcatgtagccatactgggcctcccgatcctcaacatggccaaccacaacctgctgcagatcttcacagccgccacccctgtccaccactgtcgcccgccccacaatgcctccacagggccttgggtgctccccatgggcccaaatgggaagcctgagaggtgcctccgttttgtacatccgcccaatgccagcctgcccaatgacacccagagggccatggagccatgcctggatggctgggtctacaacagcaccaaggactccattgtgacagagtgggacttggtgtgcaactccaacaaactgaaggagatggcccagtctatcttcatggcaggtatactgattggagggctcgtgcttggagacctgtctgacaggtttggccgcaggcccatcctgacctgcagctacctgctgctggcagccagcggctccggtgcagccttcagccccaccttccccatctacatggtcttccgcttcctgtgtggctttggcatctcaggcattaccctgagcaccgtcatcttgaatgtggaatgggtgcctacccggatgcgggccatcatgtcgacagcactcgggtactgctacacctttggccagttcattctgcccggcctggcctacgccatcccccagtggcgttggctgcagttaactgtgtccattcccttcttcgtcttcttcctatcatcctggtggacaccagagtccatacgctggttggtcttgtctggaaagtcctcgaaggccctgaagatactccggcgggtggctgtcttcaatggcaagaaggaagagggagaaaggctcagcttggaggagctcaaactcaacctgcagaaggagatctccttggccaaggccaagtacaccgcaagtgacctgttccggatacccatgctgcgccgcatgaccttctgtctttccctggcctggtttgctaccggttttgcctactatagtttggctatgggtgtggaagaatttggagtcaacctctacatcctccagatcatctttggtggggtcgatgtcccagccaagttcatcaccatcctctccttaagctacctgggccggcataccactcaggccgctgccctgctcctggcaggaggggccatcttggctctcacctttgtgcccttggacttgcagaccgtgaggacagtattggctgtgtttgggaagggatgcctatccagctccttcagctgcctcttcctctacacaagtgaattataccccacagtcatcaggcaaacaggtatgggcgtaagtaacctgtggacccgcgtgggaagcatggtgtccccgctggtgaaaatcacgggtgaggtacagcccttcatccccaatatcatctacgggatcaccgccctcctcgggggcagtgctgccctcttcctgcctgagaccctgaatcagcccttgccagagactatcgaagacctggaaaactggtccctgcgggcaaagaagccaaagcaggagccagaggtggaaaaggcctcccagaggatccctctacagcctcacggaccaggcctgggctccagctgaggacaacggaaccccctttccctgccctccagagactgatcctagccaggcaccttaggagtatagggaggccccatataggtccatcctcctaggatgaagccttctgagagcttggtgaaggtgtctccatcaccaccaccagagcctcctgcccagccctggccagttcaaaggttcagccatccctgcccttgttctccctgcaacccaggccctgccattcttctgtctagcccttccccactggccaccttcccccactgtcccggtcctcttcccctgaggtcccctgatatcccctggctcagtcctaacaagactgagtcttaacaagatgagaagtcctccccttcttgcctcccacacttttctttgatgggaggtttcaataaacagcgataagaactcta

SEQ ID NO: 28726 - DNA, 1744 bp, Homo sapiens
  source 1..1744: mol_type = unassigned DNA
agcttgttagagctgagctgccctactacagcagctgccggcccctaggacagagcagggacctcaactacactgatcaccagccccatcggatccagacccggccaccagtgccatgaccttctcggagatcctggaccgtgtgggaagcatgggccatttccagttcctgcatgtagccatactgggcctcccgatcctcaacatggccaaccacaacctgctgcagatcttcacagccgccacccctgtccaccactgtcgcccgccccacaatgcctccacagggccttgggtgctccccatgggcccaaatgggaagcctgagaggtgcctccgttttgtacatccgcccaatgccagcctgcccaatgacacccagagggccatggagccatgcctggatggctgggtctacaacagcaccaaggactccattgtgacagagtgggacttggtgtgcaactccaacaaactgaaggagatggcccagtctatcttcatggcaggtatactgattggagggctcgtgcttggagacctgtctgacaggtttggccgcaggcccatcctgacctgcagctacctgctgctggcagccagcggctccggtgcagccttcagccccaccttccccatctacatggtcttccgcttcctgtgtggctttggcatctcaggcattaccctgagcaccgtcatcttgaatgtggaatgggtgcctacccggatgcgggccatcatgtcgacagcactcgggtactgctacacctttggccagttcattctgcccggcctggcctacgccatcccccagtggcgttggctgcagttaactgtgtccattcccttcttcgtcttcttcctatcatcctggtggacaccagagtccatacgctggttggtcttgtctggaaagtcctcgaaggccctgaagatactccggcgggtggctgtcttcaatggcaagaaggaagagggagaaaggctcagcttggaggagctcaaactcaacctgcagaaggagatctccttggccaaggccaagtacaccgcaagtgacctgttccggatacccatgctgcgccgcatgaccttctgtctttccctggcctggtttgctaccggttttgcctactatagtttggctatgggtgtggaagaatttggagtcaacctctacatcctccagatcatctttggtggggtcgatgtcccagccaagttcatcaccatcctctccttaagctacctgggccggcataccactcaggccgctgccctgctcctggcaggaggggccatcttggctctcacctttgtgcccttggacttgcagaccgtgaggacagtattggctgtgtttgggaagggatgcctatccagctccttcagctgcctcttcctctacacaagtgaattataccccacagtcatcaggcaaacaggtatgggcgtaagtaacctgtggacccgcgtgggaagcatggtgtccccgctggtgaaaatcacgggtgaggtacagcccttcatccccaatatcatctacgggatcaccgccctcctcgggggcagtgctgccctcttcctgcctgagaccctgaatcagcccttgccagagactatcgaagacctggaaaactggtccctgcgggcaaagaagccaaagcaggagccagaggtggaaaaggcctcccagaggatccctctacagcctcacggaccaggcctgggctccagctga

SEQ ID NO: 28727 - DNA, 2135 bp, Homo sapiens
  source 1..2135: mol_type = unassigned DNA
agcttgttagagctgagctgccctactacagcagctgccggcccctaggacagagcagggacctcaactacactgatcaccagccccatcggatccagacccggccaccagctctggctcgtcttgccccagtgccatgaccttctcggagatcctggaccgtgtgggaagcatgggccatttccagttcctgcatgtagccatactgggcctcccgatcctcaacatggccaaccactgtcgcccgccccacaatgcctccacagggccttgggtgctccccatgggcccaaatgggaagcctgagaggtgcctccgttttgtacatccgcccaatgccagcctgcccaatgacacccagagggccatggagccatgcctggatggctgggtctacaacagcaccaaggactccattgtgacagagtgggacttggtgtgcaactccaacaaactgaaggagatggcccagtctatcttcatggcaggtatactgattggagggctcgtgcttggagacctgtctgacaggtttggccgcaggcccatcctgacctgcagctacctgctgctggcagccagcggctccggtgcagccttcagccccaccttccccatctacatggtcttccgcttcctgtgtggctttggcatctcaggcattaccctgagcaccgtcatcttgaatgtggaatgggtgcctacccggatgcgggccatcatgtcgacagcactcgggtactgctacacctttggccagttcattctgcccggcctggcctacgccatcccccagtggcgttggctgcagttaactgtgtccattcccttcttcgtcttcttcctatcatcctggtggacaccagagtccatacgctggttggtcttgtctggaaagtcctcgaaggccctgaagatactccggcgggtggctgtcttcaatggcaagaaggaagagggagaaaggctcagcttggaggagctcaaactcaacctgcagaaggagatctccttggccaaggccaagtacaccgcaagtgacctgttccggatacccatgctgcgccgcatgaccttctgtctttccctggcctggtttgctaccggttttgcctactatagtttggctatgggtgtggaagaatttggagtcaacctctacatcctccagatcatctttggtggggtcgatgtcccagccaagttcatcaccatcctctccttaagctacctgggccggcataccactcaggccgctgccctgctcctggcaggaggggccatcttggctctcacctttgtgcccttggacttgcagaccgtgaggacagtattggctgtgtttgggaagggatgcctatccagctccttcagctgcctcttcctctacacaagtgaattataccccacagtcatcaggcaaacaggtatgggcgtaagtaacctgtggacccgcgtgggaagcatggtgtccccgctggtgaaaatcacgggtgaggtacagcccttcatccccaatatcatctacgggatcaccgccctcctcgggggcagtgctgccctcttcctgcctgagaccctgaatcagcccttgccagagactatcgaagacctggaaaactggtccctgcgggcaaagaagccaaagcaggagccagaggtggaaaaggcctcccagaggatccctctacagcctcacggaccaggcctgggctccagctgaggacaacggaaccccctttccctgccctccagagactgatcctagccaggcaccttaggagtatagggaggccccatataggtccatcctcctaggatgaagccttctgagagcttggtgaaggtgtctccatcaccaccaccagagcctcctgcccagccctggccagttcaaaggttcagccatccctgcccttgttctccctgcaacccaggccctgccattcttctgtctagcccttccccactggccaccttcccccactgtcccggtcctcttcccctgaggtcccctgatatcccctggctcagtcctaacaagactgagtcttaacaagatgagaagtcctccccttcttgcctcccacacttttctttgatgggaggtttcaataaacagcgataagaactct

SEQ ID NO: 28728 - DNA, 3860 bp, Homo sapiens
  source 1..3860: mol_type = unassigned DNA
atctgcctgactttcacttttggtgctggagaactcagaaggtggctcagccctctggtccacacttggtgggcagctcggatgccccaggcagcccgggcacagtgagcttagtccccttcaccccctccgcagagctctggggcatccgcacagtcactcctggacacaagataaggaggagtttccccgaggcatcacagggcttcccgggactgagggactgactcaactggttattggacagtgccccacccccaatccggctgaggggcaggaaggcagaaggtcttggtggccctggatcttgtggctgcaatcggttccaaacagcagttaggtcagcagtccgctcagccgaggcagctctgttcatggcgttctcgaagctcttggagcaagccggaggcgtgggcctcttccagaccctgcaggtgctcaccttcatcctcccctgcctcatgataccttcccagatgctcctggagaacttctcagccgccatcccaggccaccgatgctggacacacatgctggacaatggctctgcggtttccacaaacatgacccccaaggcccttctgaccatctccatcccgccaggccccaaccaggggccccaccagtgccgccgcttccgccagccacagtggcagctcttggaccccaatgccacggccaccagctggagcgaagctgacacggagccgtgtgtggacggctgggtctatgaccgcagcgtcttcacctccaccatcgtggccaagtgggacctggtgtgcagctcccagggcttgaagcccctaagccagtccatcttcatgtccgggatcctggtgggctcctttatctggggcctcctctcctaccggtttgggaggaagccgatgctgagctggtgctgcctgcagttggccgtggcgggcaccagcaccatcttcgccccaacattcgtcatctactgcggcctgcggttcgtggccgcttttgggatggccggcatctttctgagttcactgacactgatggtggagtggaccacgaccagcaggagggcggtcaccatgacggtggtgggatgtgccttcagcgcaggccaggcggcgctgggcggcctggcctttgccctgcgggactggaggactctccagctggcagcatcagtgcccttctttgccatctccctgatatcctggtggctgccagaatccgcccggtggctgattattaagggcaaaccagaccaagcacttcaggagctcagaaaggtggccaggataaatggccacaaggaggccaagaacctgaccatagaggtgctgatgtccagcgtgaaggaggaggtggcctctgcaaaggagccgcggtcggtgctggacctgttctgcgtgcccgtgctccgctggaggagctgcgccatgctggtggtgaatttctctctattgatctcctactatgggctggtcttcgacctgcagagcctgggccgtgacatcttcctcctccaggccctcttcggggccgtggacttcctgggccgggccaccactgccctcttgctcagtttccttggccgccgcaccatccaggcgggttcccaggccatggccggcctcgccattctagccaacatgctggtgccgcaagatttgcagaccctgcgtgtggtctttgctgtgctgggaaagggatgttttgggataagcctaacctgcctcaccatctacaaggctgaactctttccaacgccagtgcggatgacagcagatggcattctgcatacagtgggccggctgggggctatgatgggtcccctgatcctgatgagccgccaagccctgcccctgctgcctcctctcctctatggcgttatctccattgcttccagcctggttgtgctgttcttcctcccggagacccagggacttccgctccctgacactatccaggacctggagagccagaaatcaacagcagcccagggcaaccggcaagaggccgtcactgtggaaagtacctcgctctagaaattgtgcctgcatggagcccctttagtcaaagactcctggaaaggagttgcctcttctccaatcagagcgtggaggcgagttgggcgacttcaagggcctggcatggcagaggccaggcagccgtggccgagtggacagcgtggccgtctgctgtggctgaaggcagcttccacagctcactcctcttctccctgccctgatcagattccccaccttacccgggccctacaggagcctgtgcagatggccatgcccaaccaataacgagacggttcccctccctttccctgccaggctcatgtctttacaccttcactcagccacgccaaccagagactgggttccaatctcaccccaccacatacagagccctcatctgtgaaatgagaatgatcacgtgacccaccccccagggcaggtatcagggtgaactgatcttagcaccggccaaataaatggaacctgctgagagagctgccagatacaggtgtccaggttgtgcactggcccgaggcacgcagccaaggaggcgtgtggggtctgaaactcagccccggctacactggccccaccacccaccctagcaaaggctgtgtcctctccaaaaaaaggagctgttttaatcacttttcatttactcatcagtgagggagggcttccagccctatggttacgaagacggccaaacacaccaccaaacaccagacagaggaggctggcagcaggttaccacacacgtgcgcagagcccacgaagatgacgctgcactgaggcatggggcggggtgcactgaggatccgagcgagcagccagggctgcaggaaggcagctttggagcacaaagggggtggggcaactcctggcttctgcgggaaggtgtaatcagcttgtttcatcatgctgcaggctggcgagaaacggagccttacaagcgtagggataagaggaacccctcttggtcccctcgatgagggttgttgggccggggagcctcatccacagggcggagtgaaaggggagaaggggagctcacaggcaggcctgccaaggccttctggctttgccagatgtcaagggcagcacctaatactgaaccttaactttcggctttcaaccaaacggcacccttttgctgtttgttttctggaggggacaccttttcttgattcatgcccagacctcccttgtccaggccatgaaaactctgggatggtcgaggccggctgcccatctcagatgggcaaggaagcaaaagtgcagagtggtggaggggccagcttgcagaaacacggccgaacccggccctgatcctagcccagggctctttccagcacaggaggctcctagccctcgtctccaaccctccatgccactgatatctgtggccctgccacaaagttaccctcatgcccttccctggagaccccactctgggccacctcaatctcaggcccctcaactcacctctttcaccctgtgtacactgggtcaatcactcctgcctcctcacagctcccaaatccacctacttcccttcactctggctacaccctggttcacaccacggttgtagctccaaactggtccctgatgtctacattgcactctgcacaacagccaccatgcttattaagaaacgcaatccaaaccaaatccctccctgctgaaagccctccagtggctcacaataaggatcacacttctccccctgcctggtcaggcagccatgggaccccagcctttcctcccacttcggtaaattttaaaggattcggatcatacaaagaatgttcttgaaccagcatggaattaaattagaaatcaattatg

SEQ ID NO: 28729 - DNA, 2882 bp, Homo sapiens
  source 1..2882: mol_type = unassigned DNA
ccacagcaggtgagtggaggcaggagccacgggtggggccaggccacacagcctgggaggcgcaggggctgggcagctgccagtgacccaagcccacacagagacttgcacagctgccccagccccaaattagggggatcccctggcccaccttctcttggctcagccactctgggaggtgggcacacaggggcaccgaagggagcaggcagccctggcatcccacagccgccaggagaaaaacttaggcctccccaagacctggcacagagcaggccggccctggcccccaagcagaggaggctgcacctccctcgcgtctgtgcctgcctcaacgcgggttaaactttgaccaaggaaatgattgctaaactcgattccataagtgtcaccggtcacactttaattccagtctaaaattaaagtcttcagtctccacattccctactttccaaattcagctttcccgggaggtctggagcagctgcctctctggggagatgctggaggtctcggaatcacctcacgcggcctcagggcccagttggagccaccccaagtgacaccagcaggcagatgaccagagagcctgagcctccggccccgagtctgtgaagcctagccgctgggctggagaagccactgtgggcaccaccgtgggggaaacaggcccgttgccctggcctctttgccctgggccagcctttgtgaagtgggcccctcttctgggccccttgagtaggttccatggcattttctgaactcctggacctcgtgggtggcctgggcaggttccaggttctccagacgatggctctgatggtctccatcatgtggctgtgtacccagagcatgctggagaacttctcggccgccgtgcccagccaccgctgctgggcacccctcctggacaacagcacggctcaggccagcatcctagggagcttgagtcctgaggccctcctggctatttccatcccgccgggccccaaccagaggccccaccagtgccgccgcttccgccagccacagtggcagctcttggaccccaatgccacggccaccagctggagcgaggccgacacggagccgtgtgtggatggctgggtctatgaccgcagcatcttcacctccacaatcgtggccaagtggaacctcgtgtgtgactctcatgctctgaagcccatggcccagtccatctacctggctgggattctggtgggagctgctgcgtgcggccctgcctcagacaggtggctggcagagtcggcacgatggctcctcaccacaggcaggctggattggggcctgcaggagctgtggagggtggctgccatcaacggaaagggggcagtgcaggacaccctgacccctgaggtcttgctttcagccatgcgggaggagctgagcatgggccagcctcctgccagcctgggcaccctgctccgcatgcccggactgcgcttccggacctgtatctccacgttgtgctggttcgcctttggcttcaccttcttcggcctggccctggacctgcaggccctgggcagcaacatcttcctgctccaaatgttcattggtgtcgtggacatcccagccaagatgggcgccctgctgctgctgagccacctgggccgccgccccacgctggccgcatccctgttgctggcagggctctgcattctggccaacacgctggtgccccacgaaatgggggctctgcgctcagccttggccgtgctggggctgggcggggtgggggctgccttcacctgcatcaccatctacagcagcgagctcttccccactgtgctcaggatgacggcagtgggcttgggccagatggcagcccgtggaggagccatcctggggcctctggtccggctgctgggtgtccatggcccctggctgcccttgctggtgtatgggacggtgccagtgctgagtggcctggccgcactgcttctgcccgagacccagagcttgccgctgcccgacaccatccaagatgtgcagaaccaggcagtaaagaaggcaacacatggcacgctggggaactctgtcctaaaatccacacagttttagcctcctggggaacctgcgatgggacggtcagaggaagagacttcttctgttctctggagaaggcaggaggaaagcaaagacctccatttccagaggcccagaggctgccctctgaggtccccactctcccccagggctgcccctccaggtgagccctgcccctctcacagtccaaggggcccccttcaatactgaaggggaaaaggacagtttgattggcaggaggtgacccagtgcaccatcaccctgccctgccctcgtggcttcggagagcagaggggtcaggcccaggggaacgagctggccttgccaaccctctgcttgactccgcactgccacttgtccccccacacccgtccacctgcccagagctcagagctaaccaccatccatggtcaagacctctcctagctccacacaagcagtagagtctcagctccacagctttacccagaagccctgtaagcctggcccctggcccctccccatgtccctccaggcctcagccacctgcccgccacatcctctgcctgctgtccccttcccaccctcatccctgaccgactccacttaacccccaaacccagccccccttccaggggtccagggccagcctgagatgcccgtgaaactcctacccacagttacagccacaagcctgcctcctcccaccctgccagcctatgagttcccagagggttggggcagtcccatgaccccatgtcccagctccccacacagcgctgggccagagaggcattggtgcgagggattgaataaagaaacaaatgaatggc

SEQ ID NO: 28730 - DNA, 3206 bp, Homo sapiens
  source 1..3206: mol_type = unassigned DNA
ccacagcaggtgagtggaggcaggagccacgggtggggccaggccacacagcctgggaggcgcaggggctgggcagctgccagtgacccaagcccacacagagacttgcacagctgccccagccccaaattagggggatcccctggcccaccttctcttggctcagccactctgggaggtgggcacacaggggcaccgaagggagcaggcagccctggcatcccacagccgccaggagaaaaacttaggcctccccaagacctggcacagagcaggccggccctggcccccaagcagaggaggctgcacctccctcgcgtctgtgcctgcctcaacgcgggttaaactttgaccaaggaaatgattgctaaactcgattccataagtgtcaccggtcacactttaattccagtctaaaattaaagtcttcagtctccacattccctactttccaaattcagctttcccgggaggtctggagcagctgcctctctggggagatgctggaggtctcggaatcacctcacgcggcctcagggcccagttggagccaccccaagtgacaccagcaggcagatgaccagagagcctgagcctccggccccgagtctgtgaagcctagccgctgggctggagaagccactgtgggcaccaccgtgggggaaacaggcccgttgccctggcctctttgccctgggccagcctttgtgaagtgggcccctcttctgggccccttgagtaggttccatggcattttctgaactcctggacctcgtgggtggcctgggcaggttccaggttctccagacgatggctctgatggtctccatcatgtggctgtgtacccagagcatgctggagaacttctcggccgccgtgcccagccaccgctgctgggcacccctcctggacaacagcacggctcaggccagcatcctagggagcttgagtcctgaggccctcctggctatttccatcccgccgggccccaaccagaggccccaccagtgccgccgcttccgccagccacagtggcagctcttggaccccaatgccacggccaccagctggagcgaggccgacacggagccgtgtgtggatggctgggtctatgaccgcagcatcttcacctccacaatcgtggccaagtggaacctcgtgtgtgactctcatgctctgaagcccatggcccagtccatctacctggctgggattctggtgggagctgctgcgtgcggccctgcctcagacaggtttgggcgcaggctggtgctaacctggagctaccttcagatggctgtgatgggtacggcagctgccttcgcccctgccttccccgtgtactgcctgttccgcttcctgttggcctttgccgtggcaggcgtcatgatgaacacgggcactctcctgatggagtggacggcggcacgggcccgacccttggtgatgaccttgaactctctgggcttcagcttcggccatggcctgacagctgcagtggcctacggtgtgcgggactggacactgctgcagctggtggtctcggtccccttcttcctctgctttttgtactcctggtggctggcagagtcggcacgatggctcctcaccacaggcaggctggattggggcctgcaggagctgtggagggtggctgccatcaacggaaagggggcagtgcaggacaccctgacccctgaggtcttgctttcagccatgcgggaggagctgagcatgggccagcctcctgccagcctgggcaccctgctccgcatgcccggactgcgcttccggacctgtatctccacgttgtgctggttcgcctttggcttcaccttcttcggcctggccctggacctgcaggccctgggcagcaacatcttcctgctccaaatgttcattggtgtcgtggacatcccagccaagatgggcgccctgctgctgctgagccacctgggccgccgccccacgctggccgcatccctgttgctggcagggctctgcattctggccaacacgctggtgccccacgaaatgggggctctgcgctcagccttggccgtgctggggctgggcggggtgggggctgccttcacctgcatcaccatctacagcagcgagctcttccccactgtgctcaggatgacggcagtgggcttgggccagatggcagcccgtggaggagccatcctggggcctctggtccggctgctgggtgtccatggcccctggctgcccttgctggtgtatgggacggtgccagtgctgagtggcctggccgcactgcttctgcccgagacccagagcttgccgctgcccgacaccatccaagatgtgcagaaccaggcagtaaagaaggcaacacatggcacgctggggaactctgtcctaaaatccacacagttttagcctcctggggaacctgcgatgggacggtcagaggaagagacttcttctgttctctggagaaggcaggaggaaagcaaagacctccatttccagaggcccagaggctgccctctgaggtccccactctcccccagggctgcccctccaggtgagccctgcccctctcacagtccaaggggcccccttcaatactgaaggggaaaaggacagtttgattggcaggaggtgacccagtgcaccatcaccctgccctgccctcgtggcttcggagagcagaggggtcaggcccaggggaacgagctggccttgccaaccctctgcttgactccgcactgccacttgtccccccacacccgtccacctgcccagagctcagagctaaccaccatccatggtcaagacctctcctagctccacacaagcagtagagtctcagctccacagctttacccagaagccctgtaagcctggcccctggcccctccccatgtccctccaggcctcagccacctgcccgccacatcctctgcctgctgtccccttcccaccctcatccctgaccgactccacttaacccccaaacccagccccccttccaggggtccagggccagcctgagatgcccgtgaaactcctacccacagttacagccacaagcctgcctcctcccaccctgccagcctatgagttcccagagggttggggcagtcccatgaccccatgtcccagctccccacacagcgctgggccagagaggcattggtgcgagggattgaataaagaaacaaatgaatggc

SEQ ID NO: 28731 - DNA, 2522 bp, Homo sapiens
  source 1..2522: mol_type = unassigned DNA
attaaagtcttcagtctccacattccctactttccaaattcagctttcccgggaggtctggagcagctgcctctctggggagatgctggaggtctcggaatcacctcacgcggcctcagggcccagttggagccaccccaagtgacaccagcaggcagatgaccagagagcctgagcctccggccccgagtctgtgaagcctagccgctgggctggagaagccactgtgggcaccaccgtgggggaaacaggcccgttgccctggcctctttgccctgggccagcctttgtgaagtgggcccctcttctgggccccttgaagcatgctggagaacttctcggccgccgtgcccagccaccgctgctgggcacccctcctggacaacagcacggctcaggccagcatcctagggagcttgagtcctgaggccctcctggctatttccatcccgccgggccccaaccagaggccccaccagtgccgccgcttccgccagccacagtggcagctcttggaccccaatgccacggccaccagctggagcgaggccgacacggagccgtgtgtggatggctgggtctatgaccgcagcatcttcacctccacaatcgtggccaagtggaacctcgtgtgtgactctcatgctctgaagcccatggcccagtccatctacctggctgggattctggtgggagctgctgcgtgcggccctgcctcagacagtgatggagtggacggcggcacgggcccgacccttggtgatgaccttgaactctctgggcttcagcttcggccatggcctgacagctgcagtggcctacggtgtgcgggactggacactgctgcagctggtggtctcggtccccttcttcctctgctttttgtactcctggtggctggcagagtcggcacgatggctcctcaccacaggcaggctggattggggcctgcaggagctgtggagggtggctgccatcaacggaaagggggcagtgcaggacaccctgacccctgaggtcttgctttcagccatgcgggaggagctgagcatgggccagcctcctgccagcctgggcaccctgctccgcatgcccggactgcgcttccggacctgtatctccacgttgtgctggttcgcctttggcttcaccttcttcggcctggccctggacctgcaggccctgggcagcaacatcttcctgctccaaatgttcattggtgtcgtggacatcccagccaagatgggcgccctgctgctgctgagccacctgggccgccgccccacgctggccgcatccctgttgctggcagggctctgcattctggccaacacgctggtgccccacgaaatgggggctctgcgctcagccttggccgtgctggggctgggcggggtgggggctgccttcacctgcatcaccatctacagcagcgagctcttccccactgtgctcaggatgacggcagtgggcttgggccagatggcagcccgtggaggagccatcctggggcctctggtccggctgctgggtgtccatggcccctggctgcccttgctggtgtatgggacggtgccagtgctgagtggcctggccgcactgcttctgcccgagacccagagcttgccgctgcccgacaccatccaagatgtgcagaaccaggcagtaaagaaggcaacacatggcacgctggggaactctgtcctaaaatccacacagttttagcctcctggggaacctgcgatgggacggtcagaggaagagacttcttctgttctctggagaaggcaggaggaaagcaaagacctccatttccagaggcccagaggctgccctctgaggtccccactctcccccagggctgcccctccaggtgagccctgcccctctcacagtccaaggggcccccttcaatactgaaggggaaaaggacagtttgattggcaggaggtgacccagtgcaccatcaccctgccctgccctcgtggcttcggagagcagaggggtcaggcccaggggaacgagctggccttgccaaccctctgcttgactccgcactgccacttgtccccccacacccgtccacctgcccagagctcagagctaaccaccatccatggtcaagacctctcctagctccacacaagcagtagagtctcagctccacagctttacccagaagccctgtaagcctggcccctggcccctccccatgtccctccaggcctcagccacctgcccgccacatcctctgcctgctgtccccttcccaccctcatccctgaccgactccacttaacccccaaacccagccccccttccaggggtccagggccagcctgagatgcccgtgaaactcctacccacagttacagccacaagcctgcctcctcccaccctgccagcctatgagttcccagagggttggggcagtcccatgaccccatgtcccagctccccacacagcgctgggccagagaggcattggtgcgagggattgaataaagaaacaaatgaatggc

SEQ ID NO: 28732 - DNA, 1948 bp, Homo sapiens
  source 1..1948: mol_type = unassigned DNA
ctacttggttgccttccagatgtttcacacttggacagcaaactgatttcaaaccactccttttcaaagatctctgagggagacattgcacctggccactgcagcccagagcaggtctggccacggccatgagcatgctgagccatcatgcccaccgtggatgacattctggagcaggttggggagtctggctggttccagaagcaagccttcctcatcttatgcctgctgtcggctgcctttgcgcccatctgtgtgggcatcgtcttcctgggtttcacacctgaccaccactgccagagtcctggggtggctgagctgagccagcgctgtggctggagccctgcggaggagctgaactatacagtgccaggcctggggcccgcgggcgaggccttccttggccagtgcaggcgctatgaagtggactggaaccagagcgccctcagctgtgtagaccccctggctagcctggccaccaacaggagccacctgccgctgggtccctgccaggatggctgggtgtatgacacgcccggctcttccatcgtcactgagttcaacctggtgtgtgctgactcctggaagctggacctctttcagtcctgtttgaatgcgggcttcttgtttggctctctcggtgttggctactttgcagacaggtttggccgtaagctgtgtctcctgggaactgtgctggtcaacgcggtgtcgggcgtgctcatggccttctcgcccaactacatgtccatgctgctcttccgcctgctgcagggcctggtcagcaagggcaactggatggctggctacaccctaatcacagaatttgttggctcgggctccagaagaacggtggcgatcatgtaccagatggccttcacggtggggctggtggcgcttaccgggctggcctacgccctgcctcactggcgctggctgcagctggcagtctccctgcccaccttcctcttcctgctctactactggtgtgtgccggagtcccctcggtggctgttatcacaaaaaagaaacactgaagcaataaagataatggaccacatcgctcaaaagaatgggaagttgcctcctgctgatttaaagatgctttccctcgaagaggatgtcaccgaaaagctgagcccttcatttgcagacctgttccgcacgccgcgcctgaggaagcgcaccttcatcctgatgtacctgtggttcacggactctgtgctctatcaggggctcatcctgcacatgggcgccaccagcgggaacctctacctggatttcctttactccgctctggtcgaaatcccgggggccttcatagccctcatcaccattgaccgcgtgggccgcatctaccccatggccatgtcaaatttgttggcgggggcagcctgcctcgtcatgatttttatctcacctgacctgcactggttaaacatcataatcatgtgtgttggccgaatgggaatcaccattgcaatacaaatgatctgcctggtgaatgctgagctgtaccccacattcgtcaggaacctcggagtgatggtgtgttcctccctgtgtgacataggtgggataatcacccccttcatagtcttcaggctgagggaggtctggcaagccttgcccctcattttgtttgcggtgttgggcctgcttgccgcgggagtgacgctacttcttccagagaccaagggggtcgctttgccagagaccatgaaggacgccgagaaccttgggagaaaagcaaagcccaaagaaaacacgatttaccttaaggtccaaacctcagaaccctcgggcacctgagagagatgttttgcggcgatgtcgtgttggagggatgaagatggagttatcctctgcagaaattcctagacgccttcacttctctgtattcttcctcatacttgcctacccccaaattaatatcagtcctaaagaa

SEQ ID NO: 28733 - DNA, 3737 bp, Homo sapiens
  source 1..3737: mol_type = unassigned DNA
gctgaacagtgctctcgctgaggtcagggggagaagatggcaggggtgaatccttgacgatcacggagtaaggacgagaatgcagtttgcttcccacaggcccctccctcaacatgccaagattcctacctggggcatcaagactgcaggtggggccaagaaaagacatggacactcaaagtcaagctctttgacggggaacaggtgcagacagagcagccttggcttccggctcatgcactcacgatgctggctgcgaatgggaagtccctaaacagaactgagccccctcattcagctcagagcaaacggggctggcagcagcccagggcaccacgaagcagagtgcctctgtgtgcccaacacagccgcagtggaggtcaatggatgtccttgccggcgccctgctttttgcttttttaagaaaataagaagcctgcagctgcggcaaggagaaagaccccgtgggtcgctccttttagactacgctattacacctgctgactatccaatagaaaaaagaaggagaaggaaaatcgggttaactttctggtatttagtttgcagatatgtcagcaggccaccttctctacttggcaggatcacgatgtattaagaatccttttgtccaccaggaaagacaaatttcctgtttgtcttgcatttagatgcaacaacatcatcctaaagagatgcccctgatgtgtgagagcagaaaggggtgatccctttcttccttatcctaaggctcacggccaacacccctataacaaaagacaggttaacaagagaaaagcatgacaaatttatttgatcacgttttacatgacacaggagccttcattcagaatgaagacccacagatacagggaaaactggatggcagtatagaactgtagttggacaaaaagggcagcagcccatgttcgcaggctgaggggaaaacccagcaaggcctgtctgttcagatccgtcttggcccctctgtgcagcactccttcctccaggcaccggggacaagactcctctggaatgcgggtctggatttctttacggcccactgttacacagaaaggcagcggggaagttacagtggtatttctaggctttctggctggctttggggagaaaagagtctggtttccacgagctgctttgaggaagaaggattctcagttctatggcttgccccgggggagaatgatgggtgagagaagagacaggagggcaggagaaggtcagagagagagactttgcttctgaggcctccaccttggggcatggatttctgagccccaacagaccttgacagaaaaatctaggacacaaagatagtggcttggacacacctgcctgcatttacacttgacctgtctgcgacgtaaacactttcctctttccctccagatgggttaaggggaaggacacttcagggttgaaacgcaggaataccagattggatttcactttttccagaagcaaatgtttttcctcttggctctgctctcggctaccttcgcgcccatctacgtgggcatcgtcttcctgggcttcacccctgaccaccgctgccggagccccggagtggccgagctgagtctgcgctgcggctggagtcctgcagaggaactgaactacacggtgccgggcccaggacctgcgggcgaagcctccccaagacagtgtaggcgctacgaggtggactggaaccagagcaccttcgactgcgtggaccccctggccagcctggacaccaacaggagccgcctgccactgggcccctgccgggacggctgggtgtacgagacgcctggctcgtccatcgtcaccgagtttaacctggtatgtgccaactcctggatgttggacctattccagtcatcagtgaatgtaggattctttattggctctatgagtatcggctacatagcagacaggtttggccgtaagctctgcctcctaactacagtcctcataaatgctgcagctggagttctcatggccatttccccaacctatacgtggatgttaatttttcgcttaatccaaggactggtcagcaaagcaggctggttaataggctacatcctgattacagaatttgttgggcggagatatcggagaacagtggggattttttaccaagttgcctatacagttgggctcctggtgctagctggggtggcttacgcacttcctcactggaggtggttgcagttcacagtttctctgcccaacttcttcttcttgctctattactggtgcatacctgagtctcccaggtggctgatctcccagaataagaatgctgaagccatgagaatcattaagcacatcgcaaagaaaaatggaaaatctctacccgcctcccttcagcgcctgagacttgaagaggaaactggcaagaaattgaacccttcatttcttgacttggtcagaactcctcagataaggaaacatactatgatattgatgtacaactggtaaggaatatttttcactttgaaatgcctccaaattgttttaatcacagtcatccatagtaaggaagggaagaaaacatgacctcatcccggtattagcgctgacggtgggcagcaatgtgggttgtgtctggtaggttttcctgatcgtgtttttcttgggcaaatattaagatcggtgtagcccctaagcacagatcaaggcaatggcaacctcggcttcacattggaatcacctgggagcttacaaaataccaaagccaaaacccccagaaatactgatttaattgttctagggtagggcttggaaaccaatagttttttaattctccaggtgattcaaatgcatagcccaactagagaactattggtataacttaattgatgatgcatgtagatctctattgtagtacagaactggcaaaaaacaaacaaacaaaaaacagggttgtggggggattgccttttctttcctttttttcttttctacctggagaaaaaataaatttctgaacaagaataattccagtggcttcacagcccagtgacttgatctttattgtgtttgctacctacaggctgctctcagagcttcaagccatgctttctctagtggggaatgcatcttttcagggcacattggatctccacccaggcaaatggagatttacaatcactgacaaaagcaaagctcatgaggaattactttagcaacctttacaatagtgcacaggagaggcagctttgaaatttggcctcattatccttctttccttttctgagtaatcgtgacttttgttgattatcctcatattttccattacatgtaatgactatgtttagttaataaactagaaacattgtccaaatgttgttcgtaacaggccaggagagaagtcaccaagaagggaggccgtactcacttggtcttctggtttcctaaaatttgaattaagtagtcagttctttcgatcccaattgcactagaataccccaaagagagaaataactcacaaccactaataacttgatatagttttactaaataaatcattccattggccaggcacagtggctcacacctggaatcccagcatttcgggaggctgaggcaggcagatcacatgaagccaggagttcaagaccagcctggttaacatggcaaaaccccatgtctactaaaagcacaaaaattagcaggtggtacacgtctgtaatcccaactactagggaggctgaggcaggggaataact

SEQ ID NO: 28734 - DNA, 2597 bp, Homo sapiens
  source 1..2597: mol_type = unassigned DNA
gttataataaacacgacaggcatcctgggagtgagctcagggcatttgggaagtgcagaaggacatgcacccccgctggaggggtgcacctttgaagtcagctggaccaaggaaaggccctgccctgaaggctggtcacttgcagaggtaaactcccctctttgacttctggccagggtttgtgctgagctggctgcagccgctctcagcctcgctccgggcacgtcgggcagcctcgggccctcctgcctgcaggatcatgcccaccaccgtggacgatgtcctggagcatggaggggagtttcactttttccagaagcaaatgtttttcctcttggctctgctctcggctaccttcgcgcccatctacgtgggcatcgtcttcctgggcttcacccctgaccaccgctgccggagccccggagtggccgagctgagtctgcgctgcggctggagtcctgcagaggaactgaactacacggtgccgggcccaggacctgcgggcgaagcctccccaagacagtgtaggcgctacgaggtggactggaaccagagcaccttcgactgcgtggaccccctggccagcctggacaccaacaggagccgcctgccactgggcccctgccgggacggctgggtgtacgagacgcctggctcgtccatcgtcaccgagtttaacctggtatgtgccaactcctggatgttggacctattccagtcatcagtgaatgtaggattctttattggctctatgagtatcggctacatagcagacaggtttggccgtaagctctgcctcctaactacagtcctcataaatgctgcagctggagttctcatggccatttccccaacctatacgtggatgttaatttttcgcttaatccaaggactggtcagcaaagcaggctggttaataggctacatcctgattacagaatttgttgggcggagatatcggagaacagtggggattttttaccaagttgcctatacagttgggctcctggtgctagctggggtggcttacgcacttcctcactggaggtggttgcagttcacagtttctctgcccaacttcttcttcttgctctattactggtgcatacctgagtctcccaggtggctgatctcccagaataagaatgctgaagccatgagaatcattaagcacatcgcaaagaaaaatggaaaatctctacccgcctcccttcagcgcctgagacttgaagaggaaactggcaagaaattgaacccttcatttcttgacttggtcagaactcctcagataaggaaacatactatgatattgatgtacaactggttcacgagctctgtgctctaccagggcctcatcatgcacatgggccttgcaggtgacaatatctacctggatttcttctactctgccctggttgaattcccagctgccttcatgatcatcctcaccatcgaccgcatcggacgccgttacccttgggctgcatcaaatatggttgcaggggcagcctgtctggcctcagtttttatacctggtgatctacaatggctaaaaattattatctcatgcttgggaagaatggggatcacaatggcctatgagatagtctgcctggtcaatgctgagctgtaccccacattcattaggaatcttggcgtccacatctgttcctcaatgtgtgacattggtggcatcatcacgccattcctggtctaccggctcactaacatctggcttgagctcccgctgatggttttcggcgtgcttggcttggttgctggaggtctggtgctgttgcttccagaaactaaagggaaagctttgcctgagaccatcgaggaagccgaaaatatgcaaagaccaagaaaaaataaagaaaagatgatttacctccaagttcagaaactagacattccattgaactaagaagagagaccgttgctgctgtcatgacctagctttgatggcagcaagaccaaaagtagaaatccctgcactcatcacaaagcccatacaactcaaccaaacttacccctgagccctatcaacctaggtctacagccagtggagtctattgtacactgtggaaaaatacccatgggaccagatcctgccaaattcttccagctcactttattctcagcattcctaggacattggacattggttttctggagggttttttttccatctttgtatttttttaaatttgattcttttctttgcaatgctatctaaccagaatacataggggaactgtgggctaggcaaacaaaatagaaaaaagtgtgaaaaacagtaaagttgggagaggagcatctattttcttaaagaaataaaacacccaaaacaatataaagttgtccagaatgtatgtcaagaattttagataggcctttcagtaacacaggtgaagaaatttttaaaaatacattgattattatctaggttagacttaaagtgaatctcaaataaaagaatcaggaatacaacttaagtgatcatgaggtccttccatatttagattgggtaagcatgaatgtgtattttctacaaaagaccttgagaagagttcaataaaaaatgttagcattat

SEQ ID NO: 28735 - DNA, 1774 bp, Homo sapiens
  source 1..1774: mol_type = unassigned DNA
atgaggactctgcatgcagtttctcatccttacagtaactcaatgagattccagagagtcctctatttcatatgtgccttccagaacatctcttgtggtattcactacttggcttctgtgttcatgggagtcacccctcatcatgtctgcaggcccccaggcaatttgcagaatggtgagatctgggagctctcaaggtgtagcaggaataagagggagaacacatcgagtttgggctatgaatacactggcagtaagaaagagtttccttgtgtggatggctacatatatgaccagaacacatggaaaagcactgcggtgacccagtggaacctggtctgtgaccgaaaatggcttgcaatgctgatccagcccctatttatgtttggagtcctactgggatcggtgacttttggctacttttctgacaggctaggacgccgggtggtcttgtgggccacaagcagtagcatgtttttgtttggaatagcagcggcgtttgcagttgattattacaccttcatggctgctcgcttttttcttgccatggttgcaagtggctatcttgtggtggggtttgtctatgtgatggaattcattggcatgaagtctcggacatgggcgtctgtccatttgcattccttttttgcagttggaaccctgctggtggctttgacaggatacttggtcaggacctggtggctttaccagatgatcctctccacagtgactgtcccctttatcctgtgctgttgggtgctcccagagacacctttttggcttctctcagagggacgatatgaagaagcacaaaaaatagttgacatcatggccaagtggaacagggcaagctcctgtaaactgtcagaacttttatcactggacctacaaggtcctgttagtaatagccccactgaagttcagaagcacaacctatcatatctgttttataactggagcattacgaaaaggacacttaccgtttggctaatctggttcactggaagtttgggattctactcgttttccttgaattctgttaacttaggaggcaatgaatacttaaacctcttcctcctgggtgtagtggaaattcccgcctacaccttcgtgtgcatcgccatggacaaggtcgggaggagaacagtcctggcctactctcttttctgcagtgcactggcctgtggtgtcgttatggtgatcccccagaaacattatattttgggtgtggtgacagctatggttggaaaatttgccatcggggcagcatttggcctcatttatctttatacagctgagctgtatccaaccattgtaagatcgctggctgtgggaagcggcagcatggtgtgtcgcctggccagcatcctggcgccgttctctgtggacctcagcagcatttggatcttcataccacagttgtttgttgggactatggccctcctgagtggagtgttaacactaaagcttccagaaacccttgggaaacggctagcaactacttgggaggaggctgcaaaactggagtcagagaatgaaagcaagtcaagcaaattacttctcacaactaataatagtgggctggaaaaaacggaagcgattacccccagggattctggtcttggtgaataaatgtgccatgcctgctgtctagcacctgaaatattatttaccctaatgcctttgtattagaggaatcttattctcatctcccatatgttgtttgtatgtctttttaataaattttgtaagaaaattttaaagcaaatatgtt

SEQ ID NO: 28736 - DNA, 1987 bp, Homo sapiens
  source 1..1987: mol_type = unassigned DNA
ggggcggggcgcgctacccgcagtccccggagctcggctaactcggcgcccagtgcacggccgcaccatggggtcccgccacttcgaggggatttatgaccacgtggggcacttcggcagattccagagagtcctctatttcatatgtgccttccagaacatctcttgtggtattcactacttggcttctgtgttcatgggagtcacccctcatcatgtctgcaggcccccaggcaatgtgagtcaggttgttttccataatcactctaattggagtttggaggacaccggggccctgttgtcttcaggccagaaagattatgttacggtgcagttgcagaatggtgagatctgggagctctcaaggtgtagcaggaataagagggagaacacatcgagtttgggctatgaatacactggcagtaagaaagagtttccttgtgtggatggctacatatatgaccagaacacatggaaaagcactgcggtgacccagtggaacctggtctgtgaccgaaaatggcttgcaatgctgatccagcccctatttatgtttggagtcctactgggatcggtgacttttggctacttttctgacaggctaggacgccgggtggtcttgtgggccacaagcagtagcatgtttttgtttggaatagcagcggcgtttgcagttgattattacaccttcatggctgctcgcttttttcttgccatggttgcaagtggctatcttgtggtggggtttgtctatgtgatggaattcattggcatgaagtctcggacatgggcgtctgtccatttgcattccttttttgcagttggaaccctgctggtggctttgacaggatacttggtcaggacctggtggctttaccagatgatcctctccacagtgactgtcccctttatcctgtgctgttgggtgctcccagagacacctttttggcttctctcagagggacgatatgaagaagcacaaaaaatagttgacatcatggccaagtggaacagggcaagctcctgtaaactgtcagaacttttatcactggacctacaaggtcctgttagtaatagccccactgaagttcagaagcacaacctatcatatctgttttataactggagcattacgaaaaggacacttaccgtttggctaatctggttcactggaagtttgggattctactcgttttccttgaattctgttaacttaggaggcaatgaatacttaaacctcttcctcctgggtgtagtggaaattcccgcctacaccttcgtgtgcatcgccatggacaaggtcgggaggagaacagtcctggcctactctcttttctgcagtgcactggcctgtggtgtcgttatggtgatcccccagaaacattatattttgggtgtggtgacagctatggttggaaaatttgccatcggggcagcatttggcctcatttatctttatacagctgagctgtatccaaccattgtaagatcgctggctgtgggaagcggcagcatggtgtgtcgcctggccagcatcctggcgccgttctctgtggacctcagcagcatttggatcttcataccacagttgtttgttgggactatggccctcctgagtggagtgttaacactaaagcttccagaaacccttgggaaacggctagcaactacttgggaggaggctgcaaaactggagtcagagaatgaaagcaagtcaagcaaattacttctcacaactaataatagtgggctggaaaaaacggaagcgattacccccagggattctggtcttggtgaataaatgtgccatgcctgctgtctagcacctgaaatattatttaccctaatgcctttgtattagaggaatcttattctcatctcccatatgttgtttgtatgtctttttaataaattttgtaagaaaattttaaagcaaatatgttataaaagaaataaaaactaagatgaaaattctcagttttaaaaa

SEQ ID NO: 28737 - DNA, 737 bp, Homo sapiens
  source 1..737: mol_type = unassigned DNA
gcgcagtcgggacacgggcgtccagacgccggcccctagctgggcttctcctctaggcctctggcagcgggacctggcatggtgagcagaggcgctgggctcgctcggagtgcgcctgttgccgggcaggagggacctgattccagagagtcctctatttcatatgtgccttccagaacatctcttgtggtattcactacttggcttctgtgttcatgggagtcacccctcatcatgtctgcaggcccccaggcaatgtgagtcaggttgttttccataatcactctaattggagtttggaggacaccggggccctgttgtcttcaggccagaaagattatgttacggtgcagttgcagaatggtgagatctgggagctctcaaggtgtagcaggaataagagggagaacacatcgagtttgggctatgaatacactggcagtaagaaagagtttccttgtgtggatggctacatatatgaccagaacacatggaaaagcactgcggtgacccagtggaacctggtctgtgaccgaaaatggcttgcaatgctgatccagcccctatttatgtttggagtcctactgggatcggtgacttttggctacttttctgacaggctaggacgccgggtggtcttgtgggccacaagcagtagcatgtttttgtttggaatagcagcggcgtttgcagttgattattacaccttcatggctgctcgcttttttcttgccatg

SEQ ID NO: 28738 - DNA, 1021 bp, Homo sapiens
  source 1..1021: mol_type = unassigned DNA
gcggcgctcgcgatccgaaaacatctccacttcctcctcaccccgcgcagtcgggacacgggcgtccagacgccggcccctagctgggcttctcctctaggcctctggcagcgggacctggcatgattccagagagtcctctatttcatatgtgccttccagaacatctcttgtggtattcactacttggcttctgtgttcatgggagtcacccctcatcatgtctgcaggcccccaggcaatgctaggacgccgggtggtcttgtgggccacaagcagtagcatgtttttgtttggaatagcagcggcgtttgcagttgattattacaccttcatggctgctcgcttttttcttgccatggttgcaagtggctatcttgtggtggggtttgtctatgtgatggaattcattggcatgaagtctcggacatgggcgtctgtccatttgcattccttttttgcagttggaaccctgctggtggctttgacaggatacttggtcaggacctggtggctttaccagatgatcctctccacagtgactgtcccctttatcctgtgctgttgggtgctcccagagacacctttttggcttctctcagagggacgatatgaagaagcacaaaaaatagttgacatcatggccaagtggaacagggcaagctcctgtaaactgtcagaacttttatcactggacctacaaggtcctgttagtaatagccccactgaagttcagaagcacaacctatcatatctgttttataactggagcattacgaaaaggacacttaccgtttggctaatctggttcactggaagtttgggattctactcgttttccttgaattctgttaacttaggaggcaatgaatacttaaacctcttcctcctgggtgtagtggaaattcccgcctacaccttcgtgtgcatcgccatggacaaggtcgggaggagaacagtcctggcctactctcttttctgcagtgcactggcctgtggtgtcgttatggtgatcccccag

SEQ ID NO: 28739 - DNA, 1213 bp, Homo sapiens
  source 1..1213: mol_type = unassigned DNA
ccgcgcagtcgggacacgggcgtccagacgccggcccctagctgggcttctcctctaggcctctggcagcgggacctggcatgattccagagagtcctctatttcatatgtgccttccagaacatctcttgtggtattcactacttggcttctgtgttcatgggagtcacccctcatcatgtctgcaggcccccaggcaatgtgagtcaggttgttttccataatcactctaattggagtttggaggacaccggggccctgttgtcttcaggccagaaagattatgttacggtgcagttgcagaatggtgagatctgggagctctcaaggtgtagcaggaataagagggagaacacatcgagtttgggctatgaatacactggcagtaagaaagagtttccttgtgtggatggctacatatatgaccagaacacatggaaaagcactgcggtgacccagtggaacctggtctgtgaccgaaaatggcttgcaatgctgatccagcccctatttatgtttggagtcctactgggatcggtgacttttggctacttttctgacaggctaggacgccgggtggtcttgtgggccacaagcagtagcatgtttttgtttggaatagcagcggcgtttgcagttgattattacaccttcatggctgctcgcttttttcttgccatggttgcaagtggctatcttgtggtggggtttgtctatgtgatggaattcattggcatgaagtctcggacatgggcgtctgtccatttgcattccttttttgcagttggaaccctgctggtggctttgacaggatacttggtcaggacctggtggctttaccagatgatcctctccacagtgactgtcccctttatcctgtgctgttgggtgctcccagagacacctttttggcttctctcagagggacgatatgaagaagcacaaaaaatagttgacatcatggccaagtggaacagggcaagctcctgtaaactgtcagaacttttatcactggacctacaaggtcctgttagtaatagccccactgaagttcagaagcacaacctatcatatctgttttataactggagcattacgaaaaggacacttaccgtttggctaatctggttcactggaagtttgggattctactcgttttccttgaattctgttaacttaggaggcaatgaatacttaaacctcttcctcctgg

SEQ ID NO: 28740 - DNA, 1615 bp, Homo sapiens
  source 1..1615: mol_type = unassigned DNA
ggggcggggcgcgctacccgcagtccccggagctcggctaactcggcgcccagtgcacggccgcaccatggggtcccgccacttcgaggggatttatgaccacgtggggcacttcggcagattccagagagtcctctatttcatatgtgccttccagaacatctcttgtggtattcactacttggcttctgtgttcatgggagtcacccctcatcatgtctgcaggcccccaggcaatgtgagtcaggttgttttccataatcactctaattggagtttggaggacaccggggccctgttgtcttcaggccagaaagattatgttacggtgcagttgcagaatggtgagatctgggagctctcaaggtgtagcaggaataagagggagaacacatcgagtttgggctatgaatacactggcagtaagaaagagtttccttgtgtggatggctacatatatgaccagaacacatggaaaagcactgcggtgacccagtggaacctggtctgtgaccgaaaatggcttgcaatgctgatccagcccctatttatgtttggagtcctactgggatcggtgacttttggctacttttctgacaggctaggacgccgggtggtcttgtgggccacaagcagtagcatgtttttgtttggaatagcagcggcgtttgcagttgattattacaccttcatggctgctcgcttttttcttgccatggttgcaagtggctatcttgtggtggggtttgtctatgtgatggaattcattggcatgaagtctcggacatgggcgtctgtccatttgcattccttttttgcagttggaaccctgctggtggctttgacaggatacttggtcaggacctggtggctttaccagatgatcctctccacagtgactgtcccctttatcctgtgctgttgggtgctcccagagacacctttttggcttctctcagagggacgatatgaagaagcacaaaaaatagttgacatcatggccaagtggaacagggcaagctcctgtaaactgtcagaacttttatcactggacctacaaggtcctgttagtaatagccccactgaagttcagaagcacaacctatcatatctgttttataactggagcattacgaaaaggacacttaccgtttggctaatctggttcactggaagtttgggattctactcgttttccttgaattctgttaacttaggaggcaatgaatacttaaacctcttcctcctgggtgtagtggaaattcccgcctacaccttcgtgtgcatcgccatggacaaggtcgggaggagaacagtcctggcctactctcttttctgcagtgcactggcctgtggtgtcgttatggtgatcccccagaaacattatattttgggtgtggtgacagctatggttggaaaatttgccatcggggcagcatttggcctcatttatctttatacagctgagctgtatccaaccattgtaagatcgctggctgtgggaagcggcagcatggtgtgtcgcctggccagcatcctggcgccgttctctgtggacctcagcagcatttggatcttcataccacagctcctaggacagcaccttcaggagtaa

SEQ ID NO: 28741 - DNA, 1968 bp, Homo sapiens
  source 1..1968: mol_type = unassigned DNA
gattatgttacggtgcagttgcagaatggtgagatctgggagctctcaaggtgtagcaggaataagagggagaacacatcgagtttgggctatgaatacactggcagtaagaaagagtttccttgtgtggatggctacatatatgaccagaacacatggaaaagcactgcggtgacccagtggaacctggtctgtgaccgaaaatggcttgcaatgctgatccagcccctatttatgtttggagtcctactgggatcggtgacttttggctacttttctgacaggctaggacgccgggtggtcttgtgggccacaagcagtagcatgtttttgtttggaatagcagcggcgtttgcagttgattattacaccttcatggctgctcgcttttttcttgccatggttgcaagtggctatcttgtggtggggtttgtctatgtgatggaattcattggcatgaagtctcggacatgggcgtctgtccatttgcattccttttttgcagttggaaccctgctggtggctttgacaggatacttggtcaggacctggtggctttaccagatgatcctctccacagtgactgtcccctttatcctgtgctgttgggtgctcccagagacacctttttggcttctctcagagggacgatatgaagaagcacaaaaaatagttgacatcatggccaagtggaacagggcaagctcctgtaaactgtcagaacttttatcactggacctacaaggtcctgttagtaatagccccactgaagttcagaagcacaacctatcatatctgttttataactggagcattacgaaaaggacacttaccgtttggctaatctggttcactggaagtttgggattctactcgttttccttgaattctgttaacttaggaggcaatgaatacttaaacctcttcctcctgggtgtagtggaaattcccgcctacaccttcgtgtgcatcgccatggacaaggtcgggaggagaacagtcctggcctactctcttttctgcagtgcactggcctgtggtgtcgttatggtgatcccccagaaacattatattttgggtgtggtgacagctatggttggaaaatttgccatcggggcagcatttggcctcatttatctttatacagctgagctgtatccaaccattgtaagatcgctggctgtgggaagcggcagcatggtgtgtcgcctggccagcatcctggcgccgttctctgtggacctcagcagcatttggatcttcataccacagctcctaggacagcaccttcaggagtaataatgcaggcagtagctggcaattaaggaggcactccatggtgggtcatgaaggaatgaatgagtgagtgatgagattaaacctcgttgatgaggaaaagaactcgaagtccagcacaagtaaccaaagatctcaccgagtaatcacagtgacaactgttatgtcaaattcaaatccattaccctctgaaaacagttaggaaattctattctccgaagggttcgttcctttcttgatgtgtcacttatcattatttttaattccttctagttgtttgttgggactatggccctcctgagtggagtgttaacactaaagcttccagaaacccttgggaaacggctagcaactacttgggaggaggctgcaaaactggagtcagagaatgaaagcaagtcaagcaaattacttctcacaactaataatagtgggctggaaaaaacggaagcgattacccccagggattctggtcttggtgaataaatgtgccatgcctgctgtctagcacctgaaatattatttaccctaatgcctttgtattagaggaatcttattctcatctcccatatgttgtttgtatgtctttttaataaattttgtaagaaaattttaaagcaaatatgttataaaagaaataaaaactaagatgaaaattctcagttttaaaaa

SEQ ID NO: 28742 - DNA, 1233 bp, Homo sapiens
  source 1..1233: mol_type = unassigned DNA
ggagctcggctaactcggcgcccagtgcacggccgcaccatggggtcccgccacttcgaggggatttatgaccacgtggggcacttcggcagattccagagagtcctctatttcatatgtgccttccagaacatctcttgtggtattcactacttggcttctgtgttcatgggagtcacccctcatcatgtctgcaggcccccaggcaatgtgagtcaggttgttttccataatcactctaattggagtttggaggacaccggggccctgttgtcttcaggccagaaagattatgttacggtgcagttgcagaatggtgagatctgggagctctcaaggtgtagcaggaataagagggagaacacatcgagtttgggctatgaatacactggcagtaagaaagagtttccttgtgtggatggctacatatatgaccagaacacatggaaaagcactgcggtgacccagtggaacctggtctgtgaccgaaaatggcttgcaatgctgatccagcccctatttatgtttggagtcctactgggatcggtgacttttggctacttttctgacagagtaggcttcctaactgcttggtacaaaaccagtggattccccacatccagtgctcctcctctctaattcaacccactatctgtgaagtgtcatctggactcattgtgggacttggggattagaggacctgagacaaagatgctgctgccctactgcttgctaacgaagctaggacgccgggtggtcttgtgggccacaagcagtagcatgtttttgtttggaatagcagcggcgtttgcagttgattattacaccttcatggctgctcgcttttttcttgccatggttgcaagtggctatcttgtggtggggtttgtctatgtgatggaattcattggcatgaagtctcggacatgggcgtctgtccatttgcattccttttttgcagttggaaccctgctggtggctttgacaggatacttggtcaggacctggtggctttaccagatgatcctctccacagtgactgtcccctttatcctgtgctgttgggtgctcccagagacacctttttggcttctctcagagggacgatatgaagaagcacaaaaaatagttgacatcatggccaagtggaacagggcaagctcctgtaaactgtcagaacttttatcactggacctacaaggtcctgttagtaatagccccactgaagttcag

SEQ ID NO: 28743 - DNA, 3237 bp, Homo sapiens
  source 1..3237: mol_type = unassigned DNA
gcggcccaggcccgcaaccttccctggtcgtgcgccctatgtaaggccagccgcggcaggaccaaggcggcggtgtcagctcgcgagcctaccctccgcggacggtcttgggtcgcctgctgcctggcttgcctggtcggcggcgggtgccccgcgcgcacgcgcaaagcccgccgcgttccccgaccccaggccgcgctctgtgggcctctgagggcggcatgcgggactacgacgaggtgaccgccttcctgggcgagtgggggcccttccagcgcctcatcttcttcctgctcagcgccagcatcatccccaatggcttcaccggcctgtcctccgtgttcctgatagcgaccccggagcaccgctgccgggtgccggacgccgcgaacctgagcagcgcctggcgcaaccacactgtcccactgcggctgcgggacggccgcgaggtgccccacagctgccgccgctaccggctcgccaccatcgccaacttctcggcgcttgggctggagccggggcgcgacgtggacctggggcagctggagcaggagagctgtctggatggctgggagttcagtcaggacgtctacctgtccaccattgtgaccgagtggaacctggtgtgtgaggacgactggaaggccccactcacaatctccttgttcttcgtgggtgtgctgttgggctccttcatttcagggcagctgtcagacaggtttggccggaagaatgtgctgttcgtgaccatgggcatgcagacaggcttcagcttcctgcagatcttctcgaagaattttgagatgtttgtcgtgctgtttgtccttgtaggcatgggccagatctccaactatgtggcagcatttgtcctggggacagaaattcttggcaagtcagttcgtataatattctctacgttaggagtgtgcatattttatgcatttggctacatggtgctgccactgtttgcttacttcatccgagactggcggatgctgctggtggcgctgacgatgccgggggtgctatgcgtggcactctggtggttcatccctgagtccccccgatggctcatctctcagggacgatttgaagaggcagaggtgatcatccgcaaggctgccaaagccaatgggattgttgtgccttccactatctttgacccgagtgagttacaagacctaagttccaagaagcagcagtcccacaacattctggatctgcttcgaacctggaatatccggatggtcaccatcatgtccataatgctgtggatgaccatatcagtgggctattttgggctttcgcttgatactcctaacttgcatggggacatctttgtgaactgcttcctttcagcgatggttgaagtcccagcatatgtgttggcctggctgctgctgcaatatttgccccggcgctattccatggccactgccctcttcctgggtggcagtgtccttctcttcatgcagctggtacccccagacttgtattatttggctacagtcctggtgatggtgggcaagtttggagtcacggctgccttttccatggtctacgtgtacacagccgagctgtatcccacagtggtgagaaacatgggtgtgggagtcagctccacagcatcccgcctgggcagcatcctgtctccctacttcgtttaccttggtgcctacgaccgcttcctgccctacattctcatgggaagtctgaccatcctgacagccatcctcaccttgtttctcccagagagcttcggtaccccactcccagacaccattgaccagatgctaagagtcaaaggaatgaaacacagaaaaactccaagtcacacaaggatgttaaaagatggtcaagaaaggcccacaatccttaaaagcacagccttctaacatcgcttccagtaagggagaaactgaagaggaaagactgtcttgccagaaatggccagcttgtgcagactccgagtccttcagtgacaaaaggcctttgctgtttgtcctcttgacctgtgtctgacttgctcctggatgggcacccacactcagaggctacatatggccctagagcaccaccttcctctagggacactggggctacctacagacaacttcatctaagtcctaactattacaatgatggactcagcacctccaaagcagttaatttttcactagaaccagtgagatctggaggaatgtgagaagcatatgctaaatgtacattttaattttagactacttgaaaaggcccctaataaggctagaggtctaagtcccccacccctttccccactcccctctagtggtgaactttagaggaaaaggaagtaattgcacaaggagtttgattcttaccttttctcagttacagaggacattaactggatcattgcttccccagggcaggagagcgcagagctagggaaagtgaaaggtaatgaagatggagcagaatgagcagatgcagatcaccagcaaagtgcactgatgtgtgagctcttaagaccactcagcatgacgactgagtagacttgtttacatctgatcaaagcactgggcttgtccaggctcataataaatgctccattgaatctactattcttgttttccactgctgtggaaacctccttgctactatagcgtcttatgtatggtttaaaggaaatttatcaggtgagagagatgagcaacgttgtcttttctctcaaagctgtaatgtgggttttgttttattgtttatttgtttgttgttgtatccttttctccttgttatttgcccttcagaatgcacttgggaaaggctggttccttagcctcctggtttgtgtctttttttttttttttttaaaacagaatcactctggcaattgtctgcagctgccactggtgcaaggccttaccagccctagcctctagcacttctctaagtgccaaaaacagtgtcattgtgtgtgttcctttcttgatacttagtcatgggaggatattacaaaaaagaaatttaaattgtgttcatagtctttcagagtagctcactttagtcctgtaactttattgggtgatattttgtgttcagtgtaattgtcttctctttgctgattatgttaccatggtactcctaaagcatatgcctcacctggttaaaaaagaacaaacatgtttttgtgaaagctactgaagtgccttgggaaatgagaaagttttaataagtaaaatgattttttaaataaca

SEQ ID NO: 28744 - DNA, 1746 bp, Homo sapiens
  source 1..1746: mol_type = unassigned DNA
atgcgggactacgacgaggtgaccgccttcctgggcgagtgggggcccttccagcgcctcatcttcttcctgctcagcgccagcatcatccccaatggcttcaccggcctgtcctccgtgttcctgatagcgaccccggagcaccgctgccgggtgccggacgccgcgaacctgagcagcgcctggcgcaaccacactgtcccactgcggctgcgggacggccgcgaggtgccccacagctgccgccgctaccggctcgccaccatcgccaacttctcggcgcttgggctggagccggggcgcgacgtggacctggggcagctggagcaggagagctgtctggatggctgggagttcagtcaggacgtctacctgtccaccattgtgaccgagcaagacagtggggcctacaatgctatgaaaaacaggatgggaaagaagcctgctctctgccttcctgcccagtggaacctggtgtgtgaggacgactggaaggccccactcacaatctccttgttcttcgtgggtgtgctgttgggctccttcatttcagggcagctgtcagacaggtttggccggaagaatgtgctgttcgtgaccatgggcatgcagacaggcttcagcttcctgcagatcttctcgaagaattttgagatgtttgtcgtgctgtttgtccttgtaggcatgggccagatctccaactatgtggcagcatttgtcctggggacagaaattcttggcaagtcagttcgtataatattctctacgttaggagtgtgcatattttatgcatttggctacatggtgctgccactgtttgcttacttcatccgagactggcggatgctgctggtggcgctgacgatgccgggggtgctatgcgtggcactctggtggttcatccctgagtccccccgatggctcatctctcagggacgatttgaagaggcagaggtgatcatccgcaaggctgccaaagccaatgggattgttgtgccttccactatctttgacccgagtgagttacaagacctaagttccaagaagcagcagtcccacaacattctggatctgcttcgaacctggaatatccggatggtcaccatcatgtccataatgctgtggatgaccatatcagtgggctattttgggctttcgcttgatactcctaacttgcatggggacatctttgtgaactgcttcctttcagcgatggttgaagtcccagcatatgtgttggcctggctgctgctgcaatatttgccccggcgctattccatggccactgccctcttcctgggtggcagtgtccttctcttcatgcagctggtacccccagacttgtattatttggctacagtcctggtgatggtgggcaagtttggagtcacggctgccttttccatggtctacgtgtacacagccgagctgtatcccacagtggtgagaaacatgggtgtgggagtcagctccacagcatcccgcctgggcagcatcctgtctccctacttcgtttaccttggtgcctacgaccgcttcctgccctacattctcatgggaagtctgaccatcctgacagccatcctcaccttgtttctcccagagagcttcggtaccccactcccagacaccattgaccagatgctaagagtcaaaggaatgaaacacagaaaaactccaagtcacacaaggatgttaaaagatggtcaagaaaggcccacaatccttaaaagcacagccttctaa

SEQ ID NO: 28745 - DNA, 2201 bp, Homo sapiens
  source 1..2201: mol_type = unassigned DNA
cgccttcagcctgtttcccaggaacggtccccggcttcgcgccccaatttctaacagcctgcctgtcccccgggaacgttctaacatccttggggagcgccccagctacaagacactgtcctgagaacgctgtcatcacccgtagttgcaagtttcggagcggcagtgggaagcatgcgggactacgacgaggtgatcgccttcctgggcgagtgggggcccttccagcgcctcatcttcttcctgctcagcgccagcatcatccccaatggcttcaatggtatgtcagtcgtgttcctggcggggaccccggagcaccgctgtcgagtgccggacgccgcgaacctgagcagcgcctggcgcaacaacagtgtcccgctgcggctgcgggacggccgcgaggtgccccacagctgcagccgctaccggctcgccaccatcgccaacttctcggcgctcgggctggagccggggcgcgacgtggacctggggcagctggagcaggagagctgcctggatggctgggagttcagccaggacgtctacctgtccaccgtcgtgaccgagtggaatctggtgtgtgaggacaactggaaggtgcccctcaccacctccctgttcttcgtaggcgtgctcctcggctccttcgtgtccgggcagctgtcagacaggtttggcaggaagaacgttctcttcgcaaccatggctgtacagactggcttcagcttcctgcagattttctccatcagctgggagatgttcactgtgttatttgtcatcgtgggcatgggccagatctccaactatgtggtagccttcatactaggaacagaaattcttggcaagtcagttcgtattatattctctacattaggagtgtgcacattttttgcagttggctatatgctgctgccactgtttgcttacttcatcagagactggcggatgctgctgctggcgctgacggtgccgggagtgctgtgtgtcccgctgtggtggttcattcctgaatctccccgatggctgatatcccagagaagatttagagaggctgaagatatcatccaaaaagctgcaaaaatgaacaacatagctgtaccagcagtgatatttgattctgtggaggagctaaatcccctgaagcagcagaaagctttcattctggacctgttcaggactcggaatattgccataatgaccattatgtctttgctgctatggatgctgacctcagtgggttactttgctctgtctctggatgctcctaatttacatggagatgcctacctgaactgtttcctctctgccttgattgaaattccagcttacattacagcctggctgctattgcgaaccctgcccaggcgttatatcatagctgcagtactgttctggggaggaggtgtgcttctcttcattcaactggtacctgtggattattacttcttatccattggtctggtcatgctgggaaaatttgggatcacctctgctttctccatgctgtatgtcttcactgctgagctctacccaaccctggtcaggaacatggcggtgggggtcacatccacggcctccagagtgggcagcatcattgccccctactttgtttacctcggtgcttacaacagaatgctgccctacatcgtcatgggtagtctgactgtcctgattggaatcctcaccctttttttccctgaaagtttgggaatgactcttccagaaaccttagagcagatgcagaaagtgaaatggttcagatctgggaaaaaaacaagagactcaatggagacagaagaaaatcccaaggttctaataactgcattctgaaaaaatatctaccccatttggtgaagtgaaaaacagaaaaataagaccctgtggagaaattcgttgttcccactgaaatggactgactgtaacgattgacaccaaaatgaaccttgctatcaagaaatgctcgtcatacagtaaactctggatgattcttccagataatgtccttgctttacaaaccaaccatttctagagagtctccttactcattaattcaatgaaatggattggtaagatgtcttgaaaacatgttagtcaaggactggtaaaatacatataaagattaacactcatttccaatcatacaaatactatccaaataaaaataacatcattgtattaacgcaaatattaggtgacaacaa

SEQ ID NO: 28746 - DNA, 2098 bp, Homo sapiens
  source 1..2098: mol_type = unassigned DNA
gcaattcactttggattttctaatatcccatttctaagaagaatggcagactattgaacaggtgtattttaggtcacgtggggactgcatccacctgaaaatccaccgttgacttatcaggaaactcagagatcaggatctttcacagagtagtcttttaagaagattcagttgtcaacagctagcagtctctttgccaaataattatatctgtgacttctgaaactatttggctgcctaaagttaaaggacttggggaaagtccttccactgctcttctgcagtagtgtcacaccactcagtgcagggcccaccaagaagaaagcagtgtcaggatccacatggcactatggtaactttgtgaaaggggacattttctccctctgaacttctcttcataaagtcattgtgcttcctcttggggatcacctgttcagtctcaatgggctttgatgtgctcctggatcaagtgggtggcatggggagattccagatttgtctgatagctttcttttgcatcaccaacatcctactgttccctaatattgtgttggagaacttcactgcattcacccctagtcatcgctgctgggtccccctcctggacaatgacactgtgtctgacaatgataccgggaccctcagcaaggatgacctcctgagaatctccatcccactggactcaaacctgaggccacagaagtgtcagcgctttatccatccccagtggcagctccttcacctgaacgggaccttccccaacacaaatgagccagacacggagccctgtgtggatggctgggtgtacgacagaagctctttcctctccaccatcgtgactgagtgggacctggtatgtgaatctcagtcactaaaatcaatggttcaatccctatttatggctgggtcacttctgggaggtctaatatatggccatctttcagacagggttggacggaagatcatatgcaaattgtgtttcctccagctggccatctctaacacctgtgcggccttcgctcccaccttccttgtttactgcatactgcgcttcttggcagggttctccaccatgactattttgggaaacacttttattctcagcttagagtggacattgccccggtcacgatctatgacaataatggtgctattatgttcctacagtgttgggcagatgctcctaggagggctggcttttgccattcaggactggcacatattgcaactgactgtgtctacacccataattgtcctcttcttgtcctcttggaagatggtggagtctgctcggtggctgattatcaacaatcagctagatgagggcttaaaggagcttagaagagttgcacacataaatggaaaaaagaatactgaagagacactgaccactgagcttgtgagatccaccatgaagaaggagttggatgcagtccgaattaaaacatccattttttccctgttccgtgcacccaaattgcgaatgagagtcttcggcctgtgctttgtgagattcgcaatcactgtacccttttatggcctgatactcaacttgcagcacttagggagcaatgtctccctgttccagattctctgtggagctgtcacattcacagccagatgtgtttcccttttgacactgaatcatatgggtcgtcgaataagccagatattgttcacgttcccggtgggacttttcattctggtcaacacctttttgccccaagaaatgcagatcctgcgtgtggttttagcaactttgggaattggtagtgtttctgctgctagcaacagtgcttctgtccaccacaacgagctcgtccccaccatattgaggtcaacagttgcaggaatcaatgcagtgtccggtaggactggggcagcactggctcctctgttgatgaccttaatggcgtattctccccacctaccctggatttcctatggagtcttccccatccttgctgtccctgttatcctcctccttccagaaaccagggatctacctcttcctaacaccatccaggatgtggaaaatgaaaaagattcaagaaacataaagcaggaagatacttgcatgaaagtaacacagttttaa

SEQ ID NO: 28747 - DNA, 1230 bp, Homo sapiens
  source 1..1230: mol_type = unassigned DNA
gcgcgcggcccgccatggaggtggaggaggcgttccaggcggtgggggagatgggcatctaccagatgtacttgtgcttcctgctggccgtgctgctgcagctctacgtggccacggaggccatcctcattgcactggttggggccacgccatcctaccactgggacctggcagagctcctgccaaatcagagccacggtaaccagtcagctggtgaagaccaggcctttggggactggctcctgacagccaacggcagtgagatccataagcacgtgcatttcagcagcagcttcacctccatcgcctcggagtggtttttaattgccaacagatcctacaaagtcagtgcagcaagctcttttttcttcagtggtgtatttgttggagttatctcttttggtcagctttcagatcgcttcggaaggaaaaaagtctatctcacaggttttgctcttgacatcttatttgcaattgcaaatggattttccccctcatatgagttctttgcagtaactcgcttcctggtgggcatgatgaatggagggatgtcgctggtggcctttgtcttgcttaatgaatgtgtgggcaccgcctactgggcacttgcaggatcgattggcggcctgttctttgcagttggcattgcccaatatgccctgttaggatacttcatccgctcctggaggaccctagccattctggttaacctgcagggaacggtggtctttctcttatctttggtcgactgagtgaggctgaagaggcgctgtacctcattgccaagaggaaccgcaaactcaagtgcacgttctcactaacacacccagccaacaggagctgcagggagactggaagtttcctggatctctttcgttaccgggtcctgttaggacacactttgatcctgatgttcatctggtaattatactaaggcgtgttctgttgctctttaactaaggttgctcgagcttctcttgatatcctgctccttcttcagggtacagggaattttacctcttttgttagcttgaggttgttttctcaacagcaagtctcctgatccttagcgcctggttttctgcttgcgcagccccgtctttctcaagtagcagatgatagtgcctgatgggcaggtccactgagcttgagtaagtagacatcagaagcacatctttgcttttgaggtatttatcataaatatttaagccttcctgccccttcccctgc

SEQ ID NO: 28748 - DNA, 4720 bp, Homo sapiens
  source 1..4720: mol_type = unassigned DNA
gccgccagcgcttccatccccgccccggcgggtccaagccggtgccgggcgcccaggggttgccgcgctgggcgggagggcagcgcctgagagggcggtggggtggcggggttcctgcgcgcggcccgccatggaggtggaggaggcgttccaggcggtgggggagatgggcatctaccagatgtacttgtgcttcctgctggccgtgctgctgcagctctacgtggccacggaggccatcctcattgcactggttggggccacgccatcctaccactgggacctggcagagctcctgccaaatcagagccacggtaaccagtcagctggtgaagaccaggcctttggggactggctcctgacagccaacggcagtgagatccataagcacgtgcatttcagcagcagcttcacctccatcgcctcggagtggtttttaattgccaacagatcctacaaagtcagtgcagcaagctcttttttcttcagtggtgtatttgttggagttatctcttttggtcagctttcagatcgcttcggaaggaaaaaagtctatctcacaggttttgctcttgacatcttatttgcaattgcaaatggattttccccctcatatgagttctttgcagtaactcgcttcctggtgggcatgatgaatggagggatgtcgctggtggcctttgtcttgcttaatgaatgtgtgggcaccgcctactgggcacttgcaggatcgattggcggcctgttctttgcagttggcattgcccaatatgccctgttaggatacttcatccgctcctggaggaccctagccattctggttaacctgcagggaacggtggtctttctcttatctttattcattcctgaatcacctcgttggttatactcccagggtcgactgagtgaggctgaagaggcgctgtacctcattgccaagaggaaccgcaaactcaagtgcacgttctcactaacacacccagccaacaggagctgcagggagactggaagtttcctggatctctttcgttaccgggtcctgttaggacacactttgatcctgatgttcatctggtttgtgtgcagcttggtgtattatggcctaactctgagtgcgggtgatctaggtggaagtatttatgccaacctggccctgtctggcctcatagagattccatcttaccctctctgtatctacttgattaaccaaaaatggtttggtcggaagcgaacattatcagcatttctgtgcctaggaggactggcttgtcttattgtaatgtttcttccagaaaagaaagacacaggtgtgtttgcagtggtgaacagccattccttgtccttgctggggaagctgaccatcagtgctgcctttaacattgtttatatctacacctctgagctttaccctacagtcatcaggaatgttgggcttggaacttgttccatgttctcccgagttggtgggattattgctcccttcatcccctcactgaaatatgtgcaatggtctttaccattcattgtcttcggagccacgggtctgacctccggcctcctgagtttgttattgccggagacccttaacagtccgctgctagaaacattctccgaccttcaggtgtattcgtatcgcaggctgggagaagaagcattatctttacaggctttggacccccaacagtgtgtggacaaggagagctctttagggagtgagagtgaggaagaggaagaattttatgatgcagatgaagagactcagatgatcaagtgaagagccccagattccccctaagaagcaaaggatcgtcttttatgcctctggctaaggcaggttcttccatgactcctaagagagttgtaaaaatagaggcttggcttgaatgtacatagatggtacctggcatggactgatgtttttaggcacagaagttggagaagagatttcatgaaagacaacatcactgcattgagagaatagttgttaatttgtttagaatttaagttctactcagaatcataacatctggcagaacagcccaaacccacattccaaagtggtaggctcatttgtttctagagatttcatcatgtcgcttttccttcatcatgatctaaataaaggcagatatgtaaaatttctcaccattttggtggggtaagataagctattattaagatttaatccttataccatgttggacatttgcccctatcagttgctcctcaggaatcttctggtacaggttaacatcagcattttcattttgtgtccagggaaaagcacccagaggtcatctgtgtgtcccgagaccctccagctttttcttagctgatgaaatatgagtcctcagcttggttcccagcctgctgattgacttgggctgctggtgccttgagtcccacagatgattcattaggaaaagccagatataccaaagcggtttactcagagtcaggggtgtagctctggctgcctgtcagctcccttggatactatattgtatgatttcttcctttcccactaatatgcacatccagaaaaatttccatctgagattctagtacttcaaaatcatgcatagtaaatgagaaagctttaagtagagggcagttaaacagtgacatgttgagcacctggaggaaaaaaaaggtgcagtttttaataagagagaaaatgaaattatctttgataaatttttgtttgttttgctttcagcattgtgccatgagggatttggacaatatttaagaacttcttgtcctagatcagccccaatctgtttaatcaaaatggaaggttcagtaatttcatgggaaaccttggtttttcattaagtgctaccaactttcaagtgaatcttgtatttgatttcctaaaatcatgtcttgaaaacatgttttctcatgaaacttgaatactatctcaaataggaatataaacctggagtcaacaagcttaggcagcattgatttaggtcactttcccagtgaggaaaatttctgtgttttcagaatttccatttctactaacctcttggagaaaaagaaattgaattagaggtaaatagaagacgtcactgtggctgcttctggaagtgctggaagcatcaccccaattggctccaaatactgtcatgttttcttgcacactgacttctggtttccactgtatcagtatgtacctttgtaattgttatttttatgtcttttatgcccttgattattagttgggctcttcataaacagaggccatctctactactgtttatttttccctgctgtgcccagaacattggcgtagacacagtaagaacctagtaaatattactgtttctagccatcagggagattgtggaactcctcccagtataatttttacaaactccaagcaaatctgacccaaactcccaaattgtcaagtcctgcttaactttctctggaaaatagaccccttctcaacatcagaataggaagagaggaagaacttacaaagacacttaaaagttattcttaaatggtggttgggcatttaaaacagtgaactaacatatatataatttttgattagttggagctttctttgtattataagagtaatatatctcattacagaaaatttggaaactataaatttagaaacgtatcacccatacgtccaacatcgaaagaaaaccagtgttatgactttgttccatttgaagactaattgggagtccatctctctattggcactgggttcgattgcctctggctaatagagttcaattagttctatccctgggtttcctttcttagctatggggtggaagataggagggggagatctacaatttgaatatgtgttacttaataaggctaggctggccatcagttgcttatttcagatgtgtcactaaattttccttctagatggtccttgagcaaaacttaataattactgttttttatttccactgcctttataaaatcaaaattttctccttttgataaaaactgttgaatactattgatgtagagaatgtgtatatgtgtatatttgcattgattaaattattggaaaacttttcattgacaggtaatgtattttggttgtgcggatggtttgtaaaaagtatcctgtttttttaattctattcaaaattaaaaattttttttcctaaaataaagcaagaaaaataaatgtaagatatataagaaaccccagagtttccagggtgaaagttcacattagcagcttgtccaaaatatttacacctcacaaatattttgaaagaaaccatgttgaaattttctgattttgtgagttacaaccacagcccagtaaaaccaatacttgttatttggctactttcaagcaatgcagatattctttagtatttaaaaatgagcaaataaacaaaatgaggcaaataaatgaagaaaatgagtttctgagacactgtttaggtaaccataaatcagacagatatttttatggtgggcaaattgatgaagatacttttagtaggtgatttatattcataacaaatacatattgaaataattgtcactactgtatcagaattaaaaaccagcttcacattaggacttctccatacaaatgctttatcattggttcttaaattggaaaaatatctataaatgattacatttttaagctaaataaaatgcagatattttggcttcttgtgaatgtaataaagaatcataaaacata

SEQ ID NO: 28749 - DNA, 2284 bp, Homo sapiens
  source 1..2284: mol_type = unassigned DNA
cctgactgccttcctagccctccctcccacctgccccctgcccttgctctgcggtttcctccgcttcacccttctcctgccaccccctgccccccaacagcaggtcgggaccctcggagatgcggtgcccacggagcagctgcagggtgagcgggagcgcgagcgggagggggagggagacgcgggcggcgacggactgggcagcagcctgtcgctggccgtgcccccaggccccctcagctttgaggcgctgctcgcccaggtgggggcgctgggcggcggccagcagctgcagctcggcctctgctgcctgccggtgctcttcgtggctctgggcatggcctcggaccccatcttcacgctggcgcccccgctgcattgccactacggggccttcccccctaatgcctctggctgggagcagcctcccaatgccagcggcgtcagcgtcgccagcgctgccctagcagccagcgccgccagccgtgtcgccaccagtaccgacccctcgtgcagcggcttcgccccgccggacttcaaccattgcctcaaggattgggactataatggccttcctgtgctcaccaccaacgccatcggccagtgggatctggtgtgtgacctgggctggcaggtgatcctggagcagatcctcttcatcttgggctttgcctccggctacctgttcctgggttaccccgcagacagatttggccgtcgcgggattgtgctgctgaccttggggctggtgggcccctgtggagtaggaggggctgctgcaggctcctccacaggcgtcatggccctccgattcctcttgggctttctgcttgccggtgttgacctgggtgtctacctgatgcgcctggagctgtgcgacccaacccagaggcttcgggtggccctggcaggggagttggtgggggtgggagggcacttcctgttcctgggcctggcccttgtctctaaggattggcgattcctacagcgaatgatcaccgctccctgcatcctcttcctgttttatggctggcctggtttgttcctggagtccgcacggtggctgatagtgaagcggcagattgaggaggctcagtctgtgctgaggatcctggctgagcgaaaccggccccatgggcagatgctgggggaggaggcccaggaggccctgcaggacctggagaatacctgccctctccctgcaacatcctccttttcctttgcttccctcctcaactaccgcaacatctggaaaaatctgcttatcctgggcttcaccaacttcattgcccatgccattcgccactgctaccagcctgtgggaggaggagggagcccatcggacttctacctgtgctctctgctggccagcggcaccgcagccctggcctgtgtcttcctgggggtcaccgtggaccgatttggccgccggggcatccttcttctctccatgacccttaccggcattgcttccctggtcctgctgggcctgtgggattgtgagcatcctatcttccccacagtgtgggctcaacaagggaaccccaacagagatctgaacgaggctgccatcaccactttctctgtccttgggctcttctcctcccaagctgccgccatcctcagcaccctccttgctgctgaggtcatccccaccactgtccggggccgtggcctgggcctgatcatggctctaggggcgcttggaggactgagcggcccggcccagcgcctccacatgggccatggagccttcctgcagcacgtggtgctggcggcctgcgccctcctctgcattctcagcattatgctgctgccggagaccaagcgcaagctcctgcccgaggtgctccgggacggggagctgtgtcgccggccttccctgctgcggcagccaccccctacccgctgtgaccacgtcccgctgcttgccacccccaaccctgccctctgagcggcctctgagtaccctggcgggaggctggcccacacagaaaggtggcaagaagatcgggaagactgagtagggaaggcagggctgcccagaagtctcagaggcacctcacgccagccatcgcggagagctcagagggccgtccccaccctgcctcctccctgctgctttgcattcacttccttggccagagtcaggggacagggagagagctccacactgtaaccactgggtctgggctccatcctgcgcccaaagacatccacccagacctcattatttcttgctctatcattctgtttcaataaagacatttggaataaacgagca

SEQ ID NO: 28750 - DNA, 2409 bp, Homo sapiens
  source 1..2409: mol_type = unassigned DNA
gggaggggaaagcagcgcagagatcgcagagaccaaggaggcgcccgcggctgcagagctgcagagcgggatctcttcgagctgtctgtgtccgggcagccggcgcgcaactgagccagaggacagcgcatcctttcggcgcgggccggcagggcccctgcggtcggcaagctggctccccgggtggccaccgggacccccgagcccaatggcgggggcggcggcaaaatcgacaacactgtagagatcacccccacctccaacggacaggtcgggaccctcggagatgcggtgcccacggagcagctgcagggtgagcgggagcgcgagcgggagggggagggagacgcgggcggcgacggactgggcagcagcctgtcgctggccgtgcccccaggccccctcagctttgaggcgctgctcgcccaggtgggggcgctgggcggcggccagcagctgcagctcggcctctgctgcctgccggtgctcttcgtggctctgggcatggcctcggaccccatcttcacgctggcgcccccgctgcattgccactacggggccttcccccctaatgcctctggctgggagcagcctcccaatgccagcggcgtcagcgtcgccagcgctgccctagcagccagcgccgccagccgtgtcgccaccagtaccgacccctcgtgcagcggcttcgccccgccggacttcaaccattgcctcaaggattgggactataatggccttcctgtgctcaccaccaacgccatcggccagtgggatctggtgtgtgacctgggctggcaggtgatcctggagcagatcctcttcatcttgggctttgcctccggctacctgttcctgggttaccccgcagacagatttggccgtcgcgggattgtgctgctgaccttggggctggtgggcccctgtggagtaggaggggctgctgcaggctcctccacaggcgtcatggccctccgattcctcttgggctttctgcttgccggtgttgacctgggtgtctacctgatgcgcctggagctgtgcgacccaacccagaggcttcgggtggccctggcaggggagttggtgggggtgggagggcacttcctgttcctgggcctggcccttgtctctaaggattggcgattcctacagcgaatgatcaccgctccctgcatcctcttcctgttttatggctggcctggtttgttcctggagtccgcacggtggctgatagtgaagcggcagattgaggaggctcagtctgtgctgaggatcctggctgagcgaaaccggccccatgggcagatgctgggggaggaggcccaggaggccctgcaggacctggagaatacctgccctctccctgcaacatcctccttttcctttgcttccctcctcaactaccgcaacatctggaaaaatctgcttatcctgggcttcaccaacttcattgcccatgccattcgccactgctaccagcctgtgggaggaggagggagcccatcggacttctacctgtgctctctgctggccagcggcaccgcagccctggcctgtgtcttcctgggggtcaccgtggaccgatttggccgccggggcatccttcttctctccatgacccttaccggcattgcttccctggtcctgctgggcctgtgggattatctgaacgaggctgccatcaccactttctctgtccttgggctcttctcctcccaagctgccgccatcctcagcaccctccttgctgctgaggtcatccccaccactgtccggggccgtggcctgggcctgatcatggctctaggggcgcttggaggactgagcggcccggcccagcgcctccacatgggccatggagccttcctgcagcacgtggtgctggcggcctgcgccctcctctgcattctcagcattatgctgctgccggagaccaagcgcaagctcctgcccgaggtgctccgggacggggagctgtgtcgccggccttccctgctgcggcagccaccccctacccgctgtgaccacgtcccgctgcttgccacccccaaccctgccctctgagcggcctctgagtaccctggcgggaggctggcccacacagaaaggtggcaagaagatcgggaagactgagtagggaaggcagggctgcccagaagtctcagaggcacctcacgccagccatcgcggagagctcagagggccgtccccaccctgcctcctccctgctgctttgcattcacttccttggccagagtcaggggacagggagagagctccacactgtaaccactgggtctgggctccatcctgcgcccaaagacatccacccagacctcattatttcttgctctatcattctgtttcaataaagacatttggaataaacgagcatatcatagcctg

SEQ ID NO: 28751 - DNA, 2398 bp, Homo sapiens
  source 1..2398: mol_type = unassigned DNA
cgcccgcggctgcagagctgcagagcgggatctcttcgagctgtctgtgtccgggcagccggcgcgcaactgagccagaggacagcgcatcctttcggcgcgggccggcagggcccctgcggtcggcaagctggctccccgggtggccaccgggacccccgagcccaatggcgggggcggcggcaaaatcgacaacactgtagagatcacccccacctccaacggacaggtcgggaccctcggagatgcggtgcccacggagcagctgcagggtgagcgggagcgcgagcgggagggggagggagacgcgggcggcgacggactgggcagcagcctgtcgctggccgtgcccccaggccccctcagctttgaggcgctgctcgcccaggtgggggcgctgggcggcggccagcagctgcagctcggcctctgctgcctgccggtgctcttcgtggctctgggcatggcctcggaccccatcttcacgctggcgcccccgctgcattgccactacggggccttcccccctaatgcctctggctgggagcagcctcccaatgccagcggcgtcagcgtcgccagcgctgccctagcagccagcgccgccagccgtgtcgccaccagtaccgacccctcgtgcagcggcttcgccccgccggacttcaaccattgcctcaaggattgggactataatggccttcctgtgctcaccaccaacgccatcggccagtgggatctggtgtgtgacctgggctggcaggtgatcctggagcagatcctcttcatcttgggctttgcctccggctacctgttcctgggttaccccgcagacagatttggccgtcgcgggattgtgctgctgaccttggggctggtgggcccctgtggagtaggaggggctgctgcaggctcctccacaggcgtcatggccctccgattcctcttgggctttctgcttgccggtgttgacctgggtgtctacctgatgcgcctggagctgtgcgacccaacccagaggcttcgggtggccctggcaggggagttggtgggggtgggagggcacttcctgttcctgggcctggcccttgtctctaaggattggcgattcctacagcgaatgatcaccgctccctgcatcctcttcctgttttatggctggcctggtttgttcctggagtccgcacggtggctgatagtgaagcggcagattgaggaggctcagtctgtgctgaggatcctggctgagcgaaaccggccccatgggcagatgctgggggaggaggcccaggaggccctgcaggacctggagaatacctgccctctccctgcaacatcctccttttcctttgcttccctcctcaactaccgcaacatctggaaaaatctgcttatcctgggcttcaccaacttcattgcccatgccattcgccactgctaccagcctgtgggaggaggagggagcccatcggacttctacctgtgctctctgctggccagcggcaccgcagccctggcctgtgtcttcctgggggtcaccgtggaccgatttggccgccggggcatccttcttctctccatgacccttaccggcattgcttccctggtcctgctgggcctgtgggattgtgagcatcctatcttccccacagtgtgggctcaacaagggaaccccaacagagatctgaacgaggctgccatcaccactttctctgtccttgggctcttctcctcccaagctgccgccatcctcagcaccctccttgctgctgaggtcatccccaccactgtccggggccgtggcctgggcctgatcatggctctaggggcgcttggaggactgagcggcccggcccagcgcctccacatgggccatggagccttcctgcagcacgtggtgctggcggcctgcgccctcctctgcattctcagcattatgctgctgccggagaccaagcgcaagctcctgcccgaggtgctccgggacggggagctgtgtcgccggccttccctgctgcggcagccaccccctacccgctgtgaccacgtcccgctgcttgccacccccaaccctgccctctgagcggcctctgagtaccctggcgggaggctggcccacacagaaaggtggcaagaagatcgggaagactgagtagggaaggcagggctgcccagaagtctcagaggcacctcacgccagccatcgcggagagctcagagggccgtccccaccctgcctcctccctgctgctttgcattcacttccttggccagagtcaggggacagggagagagctccacactgtaaccactgggtctgggctccatcctgcgcccaaagacatccacccagacctcattatttcttgctctatcattctgtttcaataaagacatttgg

SEQ ID NO: 28752 - DNA, 1574 bp, Homo sapiens
  source 1..1574: mol_type = unassigned DNA
atggccatagaccggcggcgcgaggcggcgggcggcgggcctgggcggcagccggccccggccgaggagaacggctccctgccgcccggggacgcggcggcctcggcgcccctcgggggacgcgcgggccccggcggcggcgcggagatccagccgctgcccccactgcatcctggaggcggcccgcacccgagctgctgctccgcggctgcggccccgagcctcttgttgctggactatgacgggtcggtgctgcccttcctcgggggcctgggcgggggctatcagaagaccctcgtgctgctcacctggatcccggcgctgttcatcggcttcagccagttctcggactcgttcctcctggaccagcccaacttctggtgccgcggggccggcaaaggcaccgagctggcaggggtcaccaccacaggccggggcggggacatgggcaactggaccagcctccccaccacccccttcgccactgccccctgggaggctgcgggcaaccggagcaacagcagcggcgcggacggaggcgacacaccacccctgccatcccctccggacaagggggacaacgcctccaactgtgactgccgcgcatgggactacggcatccgcgccggcctcgtccagaacgtggtcagcaagtgggatcttgtgtgtgataatgcctggaaggtccatatcgctaagttctccttactggttggattaatctttggctacctaataactggatgcattgctgactgggtcggccggcggcctgtgctgctgttttccatcatcttcattctgatctttggactgactgtggcactgtcagtgaatgtgacaatgttcagcacactcaggttctttgaaggattttgcctggctggaatcattctcaccttgtatgctttacgaatagagctgtgcccccctggaaaacggttcatgattacgatggtggcgagcttcgtggccatggcgggccagttcctcatgcctgggctagccgccctgtgccgggattggcaggtgctgcaggccctcatcatctgccccttcctgctcatgctgctctactggtcgtgagtacactctgcacagcgccctgggctggtgcgactgcacatgcttcctgaaggcccggccccgggcaggacacacaatccccacacttcccactagttgcagcttgtggttctgtctgagaaggttttcctctctttttaaaaaattttattgtttaaactttctgtcttggaaaactgttcaaatatacacaaaaatagaagagtggaatgagcccatcacccagctccaaaaatctgcaaatgcactggccagtctggctcaccccttcttgctacccaccccacggggttattctgacatgaatttttatgaatggattgcagggaggtggaggtcttgtgttaggaggggggatttggagatattaaaggagtgatttacaaaagtccccctatctcttctaggcgaggggtgggcaaccttcagcctgtgggccacatcaggcccactgtctgtttttgtaaataaagttttattggaacaca

SEQ ID NO: 28753 - DNA, 2883 bp, Homo sapiens
  source 1..2883: mol_type = unassigned DNA
aaacagcccccaccctggaagcctcaggtgccttccttcctccccttggtggggtgaggacgaccgggatgagtcgtctgagaagcactttgaggggggaggagctgaaggccacacctggaagggcgatttattccttgggcgctgccaggtgtctgccgccttcacccagaaaccgatgatgttcggagccagtgggatcttgtgtgtgataatgcctggaaggtccatatcgctaagttctccttactggttggattaatctttggctacctaataactggatgcattgctgactgggtcggccggcggcctgtgctgctgttttccatcatcttcattctgatctttggactgactgtggcactgtcagtgaatgtgacaatgttcagcacactcaggttctttgaaggattttgcctggctggaatcattctcaccttgtatgctttacgaatagagctgtgcccccctggaaaacggttcatgattacgatggtggcgagcttcgtggccatggcgggccagttcctcatgcctgggctagccgccctgtgccgggattggcaggtgctgcaggccctcatcatctgccccttcctgctcatgctgctctactggtcgatattccccgagtccctccggtggctaatggccacccagcagtttgagtctgcaaagaggctgatcctccacttcacacagaagaatcgcatgaaccctgagggcgacatcaagggtgtgataccagagctggagaaagagctttcccggaggcccaagaaggtctgcatcgtgaaggtggtggggacacggaacctgtggaagaacattgtggtcctgtgtgtgaactcgctgacggggtacgggatccaccactgctttgccaggagcatgatgggccacgaggtgaaggtgccgctcctggagaacttctatgctgactactataccacggccagcatcgcgctggtgtcctgcctggccatgtgcgtggtggtccgattcctcgggcgcaggggagggctgctgctcttcatgatcctcaccgccctggcctcactcctgcagctcggcctcctcaacctgattggaaagtacagccagcacccagactcagggatgagtgacagcgtcaaggacaaattttccatcgcgttttccatcgtgggcatgtttgcctcccatgcggtggggagcctcagcgtgttcttctgtgcggagatcaccccgacggtgataaggtgtggcgggctggggctggtgctggccagcgcgggcttcggcatgctgacggcacccatcatcgagctgcacaaccagaaaggctacttcctgcaccacatcatctttgcctgctgcacgctcatctgcatcatctgcatcctcctgctgcccgagagcagggaccagaacctgcctgagaacatttctaacggggagcactacacgcgccagccgctgctgccgcacaagaagggggagcagccactgctgctcaccaacgccgagctcaaggactactcgggcctccacgatgccgcagccgcgggtgacacactgcccgagggtgccacggccaacggcatgaaggccatgtagcccggcctgcggaacccggggctccagggtctggggcagcttgggcacaggtttacagaccagggaccgaacacgcagccaggggtgggaaagctgcctcagccaagctgagcctctcaactggtgtggggaaatcctgtctttccaaaagtccaaggagcgcgggtcggaggagacaaactctttggaaataaccctttcaagactttcttttctgccgttaaatgtgtgtatttattttggtcatttttacgagaagcactttattccctctccctctcactgatcacaaatggaatcacctccctgggcagcgagacgcagttgctctgggaagatgccacagtgaccagggccatggccggtccctctggggagatgggacacggctcctggcagcacccaggagccccccaggctgcctgcctgcgtgcagaggcaggagaggaccgtggagcgtttccgggactgcattttagacggagtgaaatgtacatgaatttggcttttgctagagtctgtgtatggttttttaaggtcctttttccctttctgtttgtaaggtaagagcttctgttcgtgtgcagggaaagcagctcacagacgccgttaaaaccagcttcatctttccttcaggatcatccttttgtacttgatgctggaagctcttggagaaaaagcttaaacatttcaccagaaatcttaattgagcagcagtcatatcgccacagctttgtgagtacacagctaacagatgcgtcgagacctgagatgtgctcgtttttattcctcctctcccagattggctccagcagaaaagtccctcgtgcacaggcagctcttgtgccggcactacttgaaaacatggctactttctaagctacaaaccattagaaaataactcaaaaagatggcagaggcaaatccacagaaggggggctgccctccacacacacacgcccgtcacccacaccttgagcacacaccatgaagatcaccagcttggatggccgtcacctcagacatcactccagggagcacccgcaggagctgggccccctcacgcctgccttcctgggccagcttcctgcttgcagtcactcgcatagcacagaggtggggcttcgggcagggagcggagattcctcataggtgagtccaaatgacctccagcctctcgaaggcatcaagacaaattgaaagaaagcaataactcaccaaagctcaacgctgcccctgcctcgacctccatgggtctcttcgtgttcctcgtttcacccc

SEQ ID NO: 28754 - DNA, 5658 bp, Homo sapiens
  source 1..5658: mol_type = unassigned DNA
atggccatagaccggcggcgcgaggcggcgggcggcgggcctgggcggcagccggccccggccgaggagaacggctccctgccgcccggggacgcggcggcctcggcgcccctcgggggacgcgcgggccccggcggcggcgcggagatccagccgctgcccccactgcatcctggaggcggcccgcacccgagctgctgctccgcggctgcggccccgagcctcttgttgctggactatgacgggtcggtgctgcccttcctcgggggcctgggcgggggctatcagaagaccctcgtgctgctcacctggatcccggcgctgttcatcggcttcagccagttctcggactcgttcctcctggaccagcccaacttctggtgccgcggggccggcaaaggcaccgagctggcaggggtcaccaccacaggccggggcggggacatgggcaactggaccagcctccccaccacccccttcgccactgccccctgggaggctgcgggcaaccggagcaacagcagcggcgcggacggaggcgacacaccacccctgccatcccctccggacaagggggacaacgcctccaactgtgactgccgcgcatgggactacggcatccgcgccggcctcgtccagaacgtggtcagcaagtgggatcttgtgtgtgataatgcctggaaggtccatatcgctaagttctccttactggttggattaatctttggctacctaataactggatgcattgctgactgggtcggccggcggcctgtgctgctgttttccatcatcttcattctgatctttggactgactgtggcactgtcagtgaatgtgacaatgttcagcacactcaggttctttgaaggattttgcctggctggaatcattctcaccttgtatgctttacgaatagagctgtgcccccctggaaaacggttcatgattacgatggtggcgagcttcgtggccatggcgggccagttcctcatgcctgggctagccgccctgtgccgggattggcaggtgctgcaggccctcatcatctgccccttcctgctcatgctgctctactggtcgatattccccgagtccctccggtggctaatggccacccagcagtttgagtctgcaaagaggctgatcctccacttcacacagaagaatcgcatgaaccctgagggcgacatcaagggtgtgataccagagctggagaaagagctttcccggaggcccaagaaggtctgcatcgtgaaggtggtggggacacggaacctgtggaagaacattgtggtcctgtgtgtgaactcgctgacggggtacgggatccaccactgctttgccaggagcatgatgggccacgaggtgaaggtgccgctcctggagaacttctatgctgactactataccacggccagcatcgcgctggtgtcctgcctggccatgtgcgtggtggtccgattcctcgggcgcaggggagggctgctgctcttcatgatcctcaccgccctggcctcactcctgcagctcggcctcctcaacctgattggaaagtacagccagcacccagactcagggatgagtgacagcgtcaaggacaaattttccatcgcgttttccatcgtgggcatgtttgcctcccatgcggtggggagcctcagcgtgttcttctgtgcggagatcaccccgacggtgataaggtgtggcgggctggggctggtgctggccagcgcgggcttcggcatgctgacggcacccatcatcgagctgcacaaccagaaaggctacttcctgcaccacatcatctttgcctgctgcacgctcatctgcatcatctgcatcctcctgctgcccgagagcagggaccagaacctgcctgagaacatttctaacggggagcactacacgcgccagccgctgctgccgcacaagaagggggagcagccactgctgctcaccaacgccgagctcaaggactactcgggcctccacgatgccgcagccgcgggtgacacactgcccgagggtgccacggccaacggcatgaaggccatgtagcccggcctgcggaacccggggctccagggtctggggcagcttgggcacaggtttacagaccagggaccgaacacgcagccaggggtgggaaagctgcctcagccaagctgagcctctcaactggtgtggggaaatcctgtctttccaaaagtccaaggagcgcgggtcggaggagacaaactctttggaaataaccctttcaagactttcttttctgccgttaaatgtgtgtatttattttggtcatttttacgagaagcactttattccctctccctctcactgatcacaaatggaatcacctccctgggcagcgagacgcagttgctctgggaagatgccacagtgaccagggccatggccggtccctctggggagatgggacacggctcctggcagcacccaggagccccccaggctgcctgcctgcgtgcagaggcaggagaggaccgtggagcgtttccgggactgcattttagacggagtgaaatgtacatgaatttggcttttgctagagtctgtgtatggttttttaaggtcctttttccctttctgtttgtaaggtaagagcttctgttcgtgtgcagggaaagcagctcacagacgccgttaaaaccagcttcatctttccttcaggatcatccttttgtacttgatgctggaagctcttggagaaaaagcttaaacatttcaccagaaatcttaattgagcagcagtcatatcgccacagctttgtgagtacacagctaacagatgcgtcgagacctgagatgtgctcgtttttattcctcctctcccagattggctccagcagaaaagtccctcgtgcacaggcagctcttgtgccggcactacttgaaaacatggctactttctaagctacaaaccattagaaaataactcaaaaagatggcagaggcaaatccacagaaggggggctgccctccacacacacacgcccgtcacccacaccttgagcacacaccatgaagatcaccagcttggatggccgtcacctcagacatcactccagggagcacccgcaggagctgggccccctcacgcctgccttcctgggccagcttcctgcttgcagtcactcgcatagcacagaggtggggcttcgggcagggagcggagattcctcataggtgagtccaaatgacctccagcctctcgaaggcatcaagacaaattgaaagaaagcaataactcaccaaagctcaacgctgcccctgcctcgacctccatgggtctcttcgtgttcctcgtttcaccccagaaagtggaggtttcctcttggcattttcggaggaaacttgtaggacacccaaggcgactaagagacagcctccttggcaagggcaggcaccactttgtagcaacttgggcaccagcttttctggacagcctggcttcttactggcattgtccaactcatcccttctcgaagcatgtctttgccatgggctgtgtccttccagggaaattgtggtctcgggcctgggtgagacaatgaagtgacttccaaccgacagttgctagaattcacagggcagaaaaggggttgaccttctccccttctggctttccacccggcctgctgcttgctgtcgccactcatgtctcctccacatgcggtccacacatcagtaagggcctggagatgtgtaaagacacagcaaggggcaagcagactcttggccacgtgtttccagtggctggaccacgccgacacctgggatcttgagatacccaggaagggaggctgtctggccagcctctccctgcctccacttgctccacgtccagctcctcaccttccctcttttttaaagtcacatttccatgtttcaacattagtttgcattcacctttacaaaggcctttctttagatctgtgcagcctttgcgtgccaaacttgtgaaattccttttaccttttttggagtacttgctataaagccacctgtcaacaaacccccattatgtacagaataggacctatccagtagccaggccagtaggcagttggggaaggtgggaaggatccagcgaggcccctgagcctgcacctggacaggtgtacgtctgcacccatcaccctcagcaccaggccaccctgcagtccacttactgtactgtgttgtggaaggatatgctaagtgatgaaagttgcgagcagtctcactggtcgtgtaaacttttttttttttttggaaattgaagctgtagagtgctgcccgaaatctctaggaagttggtggcaagggacagcactcacactcttctggtcatgatctctgatctccacctcaaatgacaataaaaaactggtccaacgaagacactgctcagcacttcagccatcaggactaatccatcgatgactggaaaagaggctagctttgaggaaaacagcctgggctcttgggagcagagtccagtgggtgtgaggctgacttgccgacggtcggcaggtaatggctctcagccggcgaggcggtcccacagctctcctcccagggcagcctgaggaggaggaggccgggtgcctgtttggtggcagcttcagcctagggatacctgaagctgttgagcaacacctttatgaaatgttgccagagcagcaacacttccctgtgggcacagccccgggaaatccggtaccaagtgagcaaggtggcaggacccacccaagcctgatacgcatctgggcccgccgggctcagcaggggaggctgctacggctgcccacttcccagcaccgtctgtcacgcttgaacccctctgtgctgttcccttcctggctaatagggagacccttcgcaggcacccactgtttcaacttgaccctcccaccccctgctactctcctccacacacccctccgttccgctagcctaccctgtcagcctttcaataaaagttatgcacaaatgtgaacacctgagatggagctgaacatttcttcactttgttctttttctgaagtcaaactcttatcaaatgccctaaaattattaccacccaagagaaacaggaaaaaggttacatgtttttgtttactgagagtaagatcacctgcatctggaagacgggctggtaaattggtttggctacagaacagaaagaaaacaaaaacaaacctcgtaagggaagtatcacactcagacaccaccgcttcctagagccaaatgagcaatcccaaactgcaagtgccataagtgggcctgtgaggtcacaccgcccggcccgaggtatcgcatgtgcgggggaggtccacactacagctgtcctctcgtctagaaggcaccacctcgctttcatgtcccgtgtgttttggaaaagcagtatggtgtgtcatgtctagcggcgaacacttccctccctgtccttgaggttgtaatataaaaactgtgtttctgtacgtgtgggtgggaattctctgacggtgctcgttcatagcacaagcttacgctgagttctgaactgtcgttcacagctgcgtgtctgcatggtgtcgcatctgttgtacctttggggaaaatttgtatgtaaatgtacagaaataaaaacgttgccccattaacaga

SEQ ID NO: 28755 - DNA, 2043 bp, Homo sapiens
  source 1..2043: mol_type = unassigned DNA
gccttccttcctccccttggtggggtgaggacgaccgggatgagtcgtctgagaagcactttgaggggggaggagctgaaggccacacctggaagggcgatttattccttgggcgctgccaggtgtctgccgccttcacccagaaaccgatgatgttcggagccaggcttcttcaaagtctcacagccagcctaccctcaaagcctgagtgattgtggaaggagccagcgttcactcagcagaggaacagagctttcctgccgcaggctctcagtgaagatccagggagcagaggcgtgggcaaggagcactgggctcagatgcaggagaaccggtttgaaccctagcactaccgcctctacactgaggaaccttggggattactcagccccctggaacctaatttccaagtgggatcttgtgtgtgataatgcctggaaggtccatatcgctaagttctccttactggttggattaatctttggctacctaataactggatgcattgctgactgggtcggccggcggcctgtgctgctgttttccatcatcttcattctgatctttggactgactgtggcactgtcagtgaatgtgacaatgttcagcacactcaggttctttgaaggattttgcctggctggaatcattctcaccttgtatgctttacgaatagagctgtgcccccctggaaaacggttcatgattacgatggtggcgagcttcgtggccatggcgggccagttcctcatgcctgggctagccgccctgtgccgggattggcaggtgctgcaggccctcatcatctgccccttcctgctcatgctgctctactggtcgatattccccgagtccctccggtggctaatggccacccagcagtttgagtctgcaaagaggctgatcctccacttcacacagaagaatcgcatgaaccctgagggcgacatcaagggtgtgataccagagctggagaaagagctttcccggaggcccaagaaggtctgcatcgtgaaggtggtggggacacggaacctgtggaagaacattgtggtcctgtgtgtgaactcgctgacggggtacgggatccaccactgctttgccaggagcatgatgggccacgaggtgaaggtgccgctcctggagaacttctatgctgactactataccacggccagcatcgcgctggtgtcctgcctggccatgtgcgtggtggtccgattcctcgggcgcaggggagggctgctgctcttcatgatcctcaccgccctggcctcactcctgcagctcggcctcctcaacctgattggaaagtacagccagcacccagactcagggatgagtgacagcgtcaaggacaaattttccatcgcgttttccatcgtgggcatgtttgcctcccatgcggtggggagcctcagcgtgttcttctgtgcggagatcaccccgacggtgataaggtgtggcgggctggggctggtgctggccagcgcgggcttcggcatgctgacggcacccatcatcgagctgcacaaccagaaaggctacttcctgcaccacatcatctttgcctgctgcacgctcatctgcatcatctgcatcctcctgctgcccgagagcagggaccagaacctgcctgagaacatttctaacggggagcactacacgcgccagccgctgctgccgcacaagaagggggagcagccactgctgctcaccaacgccgagctcaaggactactcgggcctccacgatgccgcagccgcgggtgacacactgcccgagggtgccacggccaacggcatgaaggccatgtagcccggcctgcggaacccggggctccagggtctggggcagcttgggcacaggtttacagaccagggaccgaacacgcagccaggggtgggaaagctgcctcagccaagctgagcctctcaactggtgtggggaaatcctgtctttccaaaagtccaaggagcgcgggtcggaggagacaaactctttggaaataaccctttcaagactttcttttctgccgttaaa

SEQ ID NO: 28756 - DNA, 1663 bp, Homo sapiens
  source 1..1663: mol_type = unassigned DNA
gcaattcactttggattttctaatatcccatttctaagaagaatggcagactattgaacaggtgtattttaggtcacgtggggactgcatccacctgaaaatccaccgttgacttatcaggaaactcagagatcaggatctttcacagagtagtcttttaagaagattcagttgtcaacagctagcagtctctttgccaaataattatatctgtgacttctgaaactatttggctgcctaaagttaaaggacttggggaaagtccttccactgctcttctgcagtagtgtcacaccactcagtgcagggcccaccaagaagaaagcagtgtcaggatccacatggcactatggtaactttgtgaaaggggacattttctccctctgaacttctcttcataaagtcattgtgcttcctcttggggatcacctgttcagtctcaatgggctttgatgtgctcctggatcaagtgggtggcatggggagattccagatttgtctgatagctttcttttgcatcaccaacatcctactgttccctaatattgtgttggagaacttcactgcattcacccctagtcatcgctgctgggtccccctcctggacaatgacactgtgtctgacaatgataccgggaccctcagcaaggatgacctcctgagaatctccatcccactggactcaaacctgaggccacagaagtgtcagcgctttatccatccccagtggcagctccttcacctgaacgggaccttccccaacacaaatgagccagacacggagccctgtgtggatggctgggtgtacgacagaagctctttcctctccaccatcgtgactgagtgggacctggtatgtgaatctcagtcactaaaatcaatggttcaatccctatttatggctgggtcacttctgggaggtctaatatatggccatctttcagacagggttggacggaagatcatatgcaaattgtgtttcctccagctggccatctctaacacctgtgcggccttcgctcccaccttccttgtttactgcatactgcgcttcttggcagggttctccaccatgactattttgggaaacacttttattctcagcttagagtggacattgccccggtcacgatctatgacaataatggtgctattatgttcctacagtgttgggcagatgctcctaggagggctggcttttgccattcaggactggcacatattgcaactgactgtgtctacacccataattgtcctcttcttgtcctcttggtatgaacaatctccacattctttgcctgtaagcgaggctatggtagacatagaaaggaaaattctgacacctgggatctgttcggtctctggcctagtcctgagccatgatgtccatagtacctattgtgtcacctgagaagcaaacaatggaataggatgacactatatgtggggaggctggcactttgcattcattattttagacatggaattatcatgaaattatttttcttaatagaaaaaatacccacttatttttgaagcaaatgtattatttatctaacttttggaatattatgtgatggagataatttgggggcttttgtcattgtaactgagattgaatataaggaaaacacaataaatttatctacataactatttaaaa

SEQ ID NO: 28757 - DNA, 1323 bp, Homo sapiens
  source 1..1323: mol_type = unassigned DNA
aaacaatgcctgatatgtggagtaaagtcctcctccttggcctttgtcaagtcatcccctcttctcctcaggaactgctcaaacctgtgccccaaagatgagggcccaggaggacctcgagggccggacacagcatgaaaccaccagggacccctcgaccccgctacccacagagcctaagtttgacatgttgtacaagatcgaggacgtgccaccttggtacctgtgcatcctgctgggcttccagcactacctgacatgcttcagtggtaccatcgccgtgcccttcctgctggctgaggcgctgtgtgtgggccacgaccagcacatggttagtcagctcatcggcaccatcttcacgtgcgtgggcatgttctgcactctctttggcatgattacagctgtggggctgtccaacctgcaatttgtggacatgaactcctctcgcaacctcttcgtgctgggattttccatgttcttcgggctcacgctgcccaattacctggagtccaaccctggcgccatcaatacaggcattcttgaagtggatcagattctgattgtgctgctgaccacggagatgtttgtgggcgggtgccttgctttcatacttgacaacacagtgccagggagcccagaggagcgtggtctgatacagtggaaagctggggctcatgccaacagtgacatgtcttccagcctcaagagctacgatttccccattgggatgggcatagtaaaaagaattacctttctgaaatacattcctatctgcccagtcttcaaaggattttcttcaagttcaaaagatcagattgcaattccagaagacactccagaaaatacagaaactgcatctgtgtgcaccaaggtctgaaaaatgacttccaggaaaggaagcatggtatataacaggaaaagaaaactacatggggaaccagaagacctaagcctgaaatcccagccctgcccctaactaacttctgtgtaaactcagataagtcacctttctctgggattcaaatttttgcatcagttaaaaaaaaaggggtgggggggaatgggccaaagtctgagtcttagagacttgtaccaatgttatgctatgtctctaaatctttactctcctaagtagacttgtcagcatctaggaagaacagctagaaattttcctctgtgatattttagactgcaagttgaaaaaaataaaaagaaatgagggcaggttccagggcctgaaatgtaggtatgctgcaaggcttttacattgaatttgaccctacatcacttcaagactaatgcataatattaaacatcatgttg

SEQ ID NO: 28758 - DNA, 2299 bp, Homo sapiens
  source 1..2299: mol_type = unassigned DNA
gtcatcccctcttctcctcaggaactgctcaaacctgtgccccaaagatgagggcccaggaggacctcgagggccggacacagcatgaaaccaccagggacccctcgaccccgctacccacagagcctaagtttgacatgttgtacaagatcgaggacgtgccaccttggtacctgtgcatcctgctgggcttccagcactacctgacatgcttcagtggtaccatcgccgtgcccttcctgctggctgaggcgctgtgtgtgggccacgaccagcacatggttagtcagctcatcggcaccatcttcacgtgcgtgggcatcaccactctcatccagaccaccgtgggcatccggctgccgctgttccaggccagtgcctttgcatttctggttccagccaaagccatactggctctggagagatggaaatgccccccggaagaggagatctacggtaactggagtctgcccctgaacacctctcatatttggcacccacggatacgggaggtccagggtgcaatcatggtgtccagcgtggtggaggtggtgattggcctgctggggctgcctggggccctgctcaactacattgggcctctcacagtcacccccactgtctccctcattggcctttctgtcttccaagctgctggcgaccgagctggctcccactggggcatctcagcttgctccattctcctgatcatcctcttctcccagtacctgcgcaacctcaccttcctgctgcctgtctaccgctggggcaagggcctcactctcctccgcatccagatcttcaaaatgtttcctatcatgctggccatcatgaccgtgtggctgctctgctatgtcctgaccttgacagacgtgctgcccacagacccaaaagcctatggcttccaggcacgaaccgatgcccgtggtgacatcatggctattgcaccctggatccgcatcccctacccctgtcagtggggcctgcccacggtgactgcggctgctgtcctgggaatgttcagcgccactctggcaggcatcattgagtccatcggagattactacgcctgtgcccgcctggctggtgcaccaccccctccagtacatgctatcaacaggggcatcttcaccgaaggcatttgctgcatcatcgcggggctattgggcacgggcaacgggtccacctcgtccagtcccaacattggcgtcctgggaattaccaaggtgggcagccggcgcgtggtgcagtatggtgcggctatcatgctggtcctgggcaccatcggcaagttcacggccctcttctcctcgctccctgaccccatcctggggggcatgttctgcactctctttggcatgattacagctgtggggctgtccaacctgcaatttgtggacatgaactcctctcgcaacctcttcgtgctgggattttccatgttcttcgggctcacgctgcccaattacctggagtccaaccctggcgccatcaatacaggcattcttgaagtggatcagattctgattgtgctgctgaccacggagatgtttgtgggcgggtgccttgctttcatacttgacaacacagtgccagggagcccagaggagcgtggtctgatacagtggaaagctggggctcatgccaacagtgacatgtcttccagcctcaagagctacgatttccccattgggatgggcatagtaaaaagaattacctttctgaaatacattcctatctgcccagtcttcaaaggattttcttcaagttcaaaagatcagattgcaattccagaagacactccagaaaatacagaaactgcatctgtgtgcaccaaggtctgaaaaatgacttccaggaaaggaagcatggtatataacaggaaaagaaaactacatggggaaccagaagacctaagcctgaaatcccagccctgcccctaactaacttctgtgtaaactcagataagtcacctttctctgggattcaaatttttgcatcagttaaaaaaaaaggggtgggggggaatgggccaaagtctgagtcttagagacttgtaccaatgttatgctatgtctctaaatctttactctcctaagtagacttgtcagcatctaggaagaacagctagaaattttcctctgtgatattttagactgcaagttgaaaaaaataaaaagaaatgagggcaggttccagggcctgaaatgtaggtatgctgcaaggcttttacattgaatttgaccctacatcacttcaagactaatgcataatattaaacatcatgttgaagaaataa

SEQ ID NO: 28759 - DNA, 2303 bp, Homo sapiens
  source 1..2303: mol_type = unassigned DNA
ctcttctcctcaggaactgctcaaacctgtgccccaaagatgagggcccaggaggacctcgagggccggacacagcatgaaaccaccagggacccctcgaccccgctacccacagagcctaagtttgacatgttgtacaagatcgaggacgtgccaccttggtacctgtgcatcctgctgggcttccagcactacctgacatgcttcagtggtaccatcgccgtgcccttcctgctggctgaggcgctgtgtgtgggccacgaccagcacatggttagtcagctcatcggcaccatcttcacgtgcgtgggcatcaccactctcatccagaccaccgtgggcatccggctgccgctgttccaggccagtgcctttgcatttctggttccagccaaagccatactggctctggagagatggaaatgccccccggaagaggagatctacggtaactggagtctgcccctgaacacctctcatatttggcacccacggatacgggaggtgggtttgcatgtccagggtgcaatcatggtgtccagcgtggtggaggtggtgattggcctgctggggctgcctggggccctgctcaactacattgggcctctcacagtcacccccactgtctccctcattggcctttctgtcttccaagctgctggcgaccgagctggctcccactggggcatctcagcttgctccattctcctgatcatcctcttctcccagtacctgcgcaacctcaccttcctgctgcctgtctaccgctggggcaagggcctcactctcctccgcatccagatcttcaaaatgtttcctatcatgctggccatcatgaccgtgtggctgctctgctatgtcctgaccttgacagacgtgctgcccacagacccaaaagcctatggcttccaggcacgaaccgatgcccgtggtgacatcatggctattgcaccctggatccgcatcccctacccctgtcagtggggcctgcccacggtgactgcggctgctgtcctgggaatgttcagcgccactctggcaggcatcattgagtccatcggagattactacgcctgtgcccgcctggctggtgcaccaccccctccagtacatgctatcaacaggggcatcttcaccgaaggcatttgctgcatcatcgcggggctattgggcacgggcaacgggtccacctcgtccagtcccaacattggcgtcctgggaattaccaaggtgggcagccggcgcgtggtgcagtatggtgcggctatcatgctggtcctgggcaccatcggcaagttcacggccctcttctcctcgctccctgaccccatcctggggggcatgttctgcactctctttggcatgattacagctgtggggctgtccaacctgcaatttgtggacatgaactcctctcgcaacctcttcgtgctgggattttccatgttcttcgggctcacgctgcccaattacctggagtccaaccctggcgccatcaatacaggcattcttgaagtggatcagattctgattgtgctgctgaccacggagatgtttgtgggcgggtgccttgctttcatacttgacaacacagtgccagggagcccagaggagcgtggtctgatacagtggaaagctggggctcatgccaacagtgacatgtcttccagcctcaagagctacgatttccccattgggatgggcatagtaaaaagaattacctttctgaaatacattcctatctgcccagtcttcaaaggattttcttcaagttcaaaagatcagattgcaattccagaagacactccagaaaatacagaaactgcatctgtgtgcaccaaggtctgaaaaatgacttccaggaaaggaagcatggtatataacaggaaaagaaaactacatggggaaccagaagacctaagcctgaaatcccagccctgcccctaactaacttctgtgtaaactcagataagtcacctttctctgggattcaaatttttgcatcagttaaaaaaaaaggggtgggggggaatgggccaaagtctgagtcttagagacttgtaccaatgttatgctatgtctctaaatctttactctcctaagtagacttgtcagcatctaggaagaacagctagaaattttcctctgtgatattttagactgcaagttgaaaaaaataaaaagaaatgagggcaggttccagggcctgaaatgtaggtatgctgcaaggcttttacattgaatttgaccctacatcacttcaagactaatgcataatattaaacatcatgttgaagaaataa

SEQ ID NO: 28760 - DNA, 2204 bp, Homo sapiens
  source 1..2204: mol_type = unassigned DNA
aaacaatgcctgatatgtggagtaaagtcctcctccttggcctttgtcaagtcatcccctcttctcctcaggaactgctcaaacctgtgccccaaagatgagggcccaggaggacctcgagggccggacacagcatgaaaccaccagggacccctcgaccccgctacccacagagcctaagtttgacatgttgtacaagatcgaggacgtgccaccttggtacctgtgcatcctgctgggcttccagcactacctgacatgcttcagtggtaccatcgccgtgcccttcctgctggctgaggcgctgtgtgtgggccacgaccagcacatggttagtcagctcatcggcaccatcttcacgtgcgtgggcatcaccactctcatccagaccaccgtgggcatccggctgccgctgttccaggccagtgcctttgcatttctggttccagccaaagccatactggctctggagagatggaaatgccccccggaagaggagatctacggtaactggagtctgcccctgaacacctctcatatttggcacccacggatacgggaggtgggtttgcatgtaagcatagaagaggccgggggctatatgggagtgagggtggccgctgagtttggggatttgaggaggtggtccaggagctttgttcctgctagcagcagccaggtccagggtgcaatcatggtgtccagcgtggtggaggtggtgattggcctgctggggctgcctggggccctgctcaactacattgggcctctcacagtcacccccactgtctccctcattggcctttctgtcttccaagctgctggcgaccgagctggctcccactggggcatctcagcttgctccattctcctgatcatcctcttctcccagtacctgcgcaacctcaccttcctgctgccttgcgcccagcagagtgcgccactctggcaggcatcattgagtccatcggagattactacgcctgtgcccgcctggctggtgcaccaccccctccagtacatgctatcaacaggggcatcttcaccgaaggcatttgctgcatcatcgcggggctattgggcacgggcaacgggtccacctcgtccagtcccaacattggcgtcctgggaattaccaaggtgggcagccggcgcgtggtgcagtatggtgcggctatcatgctggtcctgggcaccatcggcaagttcacggccctcttctcctcgctccctgaccccatcctggggggcatgttctgcactctctttggcatgattacagctgtggggctgtccaacctgcaatttgtggacatgaactcctctcgcaacctcttcgtgctgggattttccatgttcttcgggctcacgctgcccaattacctggagtccaaccctggcgccatcaatacaggcattcttgaagtggatcagattctgattgtgctgctgaccacggagatgtttgtgggcgggtgccttgctttcatacttgacaacacagtgccagggagcccagaggagcgtggtctgatacagtggaaagctggggctcatgccaacagtgacatgtcttccagcctcaagagctacgatttccccattgggatgggcatagtaaaaagaattacctttctgaaatacattcctatctgcccagtcttcaaaggattttcttcaagttcaaaagatcagattgcaattccagaagacactccagaaaatacagaaactgcatctgtgtgcaccaaggtctgaaaaatgacttccaggaaaggaagcatggtatataacaggaaaagaaaactacatggggaaccagaagacctaagcctgaaatcccagccctgcccctaactaacttctgtgtaaactcagataagtcacctttctctgggattcaaatttttgcatcagttaaaaaaaaaggggtgggggggaatgggccaaagtctgagtcttagagacttgtaccaatgttatgctatgtctctaaatctttactctcctaagtagacttgtcagcatctaggaagaacagctagaaattttcctctgtgatattttagactgcaagttgaaaaaaataaaaagaaatgagggcaggttccagggcctgaaatgtaggtatgctgcaaggcttttacattgaatttgaccctacatcacttcaagactaatgcataatattaaacatcatgttg

SEQ ID NO: 28761 - DNA, 6944 bp, Homo sapiens
  source 1..6944: mol_type = unassigned DNA
ggcggctgtcgcggggaccggaggcggaggctgcagcgggcactgcggcgccgaggcgcggcggcaggacgggaaccacgcgagctgcagccagctaggtcttgactccactaacggggacttctcatacggctttgaacttggaccttggtgcataagcaaatgtaactcagcgaattgtaatggaaagcatatggacaggtctacgccacatcacttaggtgctaagagatgccgtttgcaggcctcatctctgcttgagaatcgggggctccaggcactagaagagccggctgatcctgggctcctagcttgaataagccttcacttccagctgctctccccaacggctgtgtaaactactcgtttctcttaatgatgggtattggtaagaataccacatccaaatcaatggaggctggaagttcaacagaaggcaaatacgaagacgaggcaaagcacccagctttcttcactcttccggtggtgataaatggaggcgccacctccagcggtgagcaggacaatgaggacactgagctcatggcgatctacactacggaaaacggcattgcagaaaagagctctctcgctgagaccctggatagcactggcagtctggacccccagcgatcagacatgatttataccatagaagatgttcctccctggtacctgtgtatatttctggggctacagcactacctgacatgcttcagcggcacgatcgcagtgcccttcctgttggccgatgccatgtgtgtggggtacgaccagtgggccaccagccagctcattgggaccattttcttctgtgtgggaatcactactttgctacagacaacgtttggatgcaggttacccctgtttcaggccagtgcttttgcatttttggcccctgctcgagccatcctgtctttagataaatggaaatgtaacaccacagatgtttcagttgccaatggaacagcagagctgttgcacacagaacacatctggtatccccggatccgagagatccagggggccatcatcatgtcctcactgatagaagtagtcatcggcctcctcggcctgcctggggctctactgaagtacatcggtcccttgaccattacacccacggtggccctaattggcctctctggtttccaggcagcgggggagagagccgggaagcactggggcattgccatgctgacaatattcctagtattactgttttctcaatacgccagaaatgttaaatttcctctcccgatttataaatccaagaaaggatggactgcgtacaagttacagctgttcaaaatgttccctatcatcctggccatcctggtatcctggctgctctgcttcatcttcacggtgacagatgtcttccctcccgacagcacaaagtatggcttctatgctcgcacagatgccaggcaaggcgtgcttctggtagccccgtggtttaaggttccatacccatttcagtggggactgcccaccgtgtctgcggccggtgtcatcggcatgctcagtgccgtggtcgccagcatcatcgagtctattggtgactactacgcctgtgcacggctgtcctgtgccccacccccccccatccacgcaataaacaggggaattttcgtggaaggcctctcctgtgttcttgatggcatatttggtactgggaatggctctacttcatccagtcccaacattggagttttgggaattacaaaggtcggcagccgccgcgtgatacagtgcggagcagccctcatgctcgctctgggcatgatcgggaagttcagcgccctctttgcgtcccttccggatcctgtgctgggagccctgttctgcacgctctttggaatgatcacagctgttggcctctctaacctgcagttcattgatttaaattcttcccggaacctctttgtgcttggattttcgatcttctttgggctcgtccttccaagttacctcagacagaaccctctggtcacagggataacaggaatcgatcaagtgttgaacgtccttctcacaactgctatgtttgtagggggctgtgtggcttttatcctggataacaccatcccaggcactccagaggaaagaggaatccggaaatggaagaagggtgtgggcaaagggaacaaatcactcgacggcatggagtcgtacaatttgccatttggcatgaacattataaaaaaatacagatgcttcagctacttacccatcagcccaacctttgtgggctacacatggaaaggcctcaggaagagcgacaacagccggagttcagatgaagactcccaggccacgggatagcctttgctgtgccctgtggcctggccgcagtgaggcatgtatctgtagttccttgctgagtaacaagaagtaaaatacatgtttgtatatctacatttacattctgcgccccagagctaagacagactgcgaatcacttttctgctgtgagggtgatggtgcctgatgcggtgtctcgcctatctccttatttaagcccttaactccttgccctttgagagtgtccattgctggccatggtcactaaatttgaagttccagtcctccctttggagtggacatttaaaatctgcagccattccttgcttcagttcccttccaccacccagggctggctttcctataagccacctccagggtccaggggctttctctctctctccgaagcccctggacctgtttccttgtcatttgaccctcgtctgtgcccgcggagacctcctctgaccaaggggcactagtatgccttgcgctatcatgactgactggcccagtatgattctgttgtcgctgatctcccggaggaggaggctgttgacctgaaaacagtggcgtggctcccctgtgcccagatctggccatgggtgaggcctgcacagatgttgaatgaacatctgtttggggcattggagggaaaaggaaaggaccctgaagccaatatctgattctcggctgcaccttctcttggccaccctggccctgaccgggccagcacgtgcacactggcctcttttcatttcactagtggccgagacaccctctctggcatttatcactgttggccggtgtgatgagtatagagtgccacccaaggcaccagtcacacaagctgatgggcgtcttggctctgccgtcatgtggatgttattgtcgcgcgcgtctataattacaaggttttattcctatttaatgttattgactatagcagattttggaaatcagtgttttccatgtgaccctctttccttgcatccctattccttgtcccccacccactcttccccccatcaagaaaagaaccagcatttgtaaagctgtggacaccatcagggaagcttgttgtaacggcttttgaaggccagtaaccattgttgtggttgtgttttgtattgcttgataccatgaaagtgtaaatactgtaatgcctaatctatttatcaaaactgactactggaccggagcccagaaaccatgggtcaagttacacgtgaatttgttttgtgaagaagggaagctggggcaggtaacacgcagagccgccacgtggaacggtctgtccgccggtctgtcccgcttgccgggcttctgttgcaagtcttggcttaaggagacttcctgtgggttgccatgtcgcacgtccgttagatcttgattttacaggtgagggtggttgccaaaggtgataagaaaagcagccaacaggctccctctcacttaagagagttctaattaataacactaaattcttcctgagaaatgactcctcttggtttggtttgaagtttttcagtgaaggaaaaggcctgagataggaagcagtgccctcgcttcatgaggtggcacatcttcggtggccgttggcctggtcgagctttggtcagctgcgtgggtgcctgtctcctgtctccagcggcagggcatggttcttggcagcctggtgtccacacggtgcattcctgtccccctcggccccaggctggctcagctctccagtgctgcggcgctgtctttgcagcattgccatgtcaccgtagcccccttcactcttggaagtttggggcttcaaggtttattctggcaagaacacctcggagccactgcattgttttgccaaaaacttactgcagattaagtaaagaacttagatgctaaattacatctaattttgtatgtttttttaaatgtgtctttgatgcatactttagaagcacactggctcgcggtttccatccctcttgccttgggacactcttgaggctggcagccctcctgcaatgagttgctctcagttccttctgtttggattttgctcaacatctccagtttctctgctctgaaaaatggggaaaactgctaaacatcccagagatttgcaatcttctagctctccaggtgagcagaaagaccaaatatccaaataaaagcctgaaagccattggtgatccaggggcaccttctcttcagcttgactgggcgtcttccgctgcataacactcaaggtgtctgctctagtcatccagaaacccactcccttctgaagcccctccttgggccgggttgtatcaggaggattcaaccccgctaacatgtggggtgccctctgtaggccttcacacagggaaggaagccctaccctttcaactcctgttggagtgagagtttcctgttctgattccactgtggccaacccaataattctgtccgaggaggggtaagggaataggaggtggggagcaaagagggcagcctgactagatgcccctgctgaatctggtactttctgcacagccttgagtgattggagtcccctaatgactaataaacttgaacatgtaacacacacacacacacacacacacaccattttaggaagtggttctcctactggaaaatatgctacagaatgaaagtttgtaattgaaagaaaaagaatgtattcatctgcttcttgggtttaagcacacacctgaaggggagatattgggggacacggtggccactcgcggtctgtgtcatgacacttcccattcacatcattggcctgcgttgctggggctttgaaccaccaccccgtactttgttttgcctgtagagtgttgtaaaatattttggatgtgaatgtccttgcaggccggttagtctccagtttccacagagaccacctacccaccaccttcccaggtcacctgcctggtccctgaaagaaagcatttgtgtgggcaatcccaacatgaaatgtagacagcgtgaatacggacaggaggtgatgccatattcacagtgggggatggagggcccccacccctgcttcacagaataatgggaagtgactctagtctttgtaagcaattttcattctcattaggaagttaaatgtagattcacagatacatttactttcagaatcctcaagaggatttcaaatgctaacttttagtttcttgggattgatcaaggcaagagaagtggctttaaccatgccagccagaatgaagcatcatgggtcctgatggtttcccgttttcatggtaacaaattcgcacagaggttttgctttatgctgtagaataccgactttcatgatgacaacttggtttatgcatgaatattgcagtatttccatatagcaaaataacatttctacccaggataatagtcacagttttccagggagggaatgatataattttcatgacaatgtcatgtgatgatagaatttctccattgatgaatctctagtatgtgtgtatactttatttacccatacgtatattttatgaccatgagctaagttgttatttctttcattcatatccctgctgaaatattggtactagcaacttaaagttggcaagtctcatcttcagtaatacggatgccatgggagtggccaggccagattgaaggtgaatatggagcagtagcagaagcctcattccagaacccatctggccagagaagcagcagcatcctgggggatggccgtgcatggggtgtacactcgctataggcataggcccggcatggctgtcgctggacgccagctgtgcacacccagccacacctgctgcacgccgcgttagtgtgcggctccgggcctgagcattcgcaaagctcgcttctccagggagcctcctcttggctttggaaaagagcccagggacttaacgtgctgcctgttgtactctgtcccctcatgactttttagacacagggactaggacatcgaccaccctctgcccctcctgcagtcagaacccgagtagtgcaagaacggccacccggttttgccagcgttcagcgtctgcccatggacccataaggcacattagcgttgggggtctcttttcagcagcctcacagacattcccgtcctttctggttggtgttgactgtgtttcagcatcactctaccctcccatgtccttagcattgctgtgcgtgtttccaggcacttaggacacccttccccacgttgccatcttactgacagttcaaatgactctccttttttgttcgttagtaacaatcttcatttgacaccttaatacatttctgactgttcttaaaacagtggggatgcctatattttccttgagtttttgtgactgactttggctatatatacctttctggggttttgtttgttttttatttttattttgattaccgagggtatttggggtggggttgttttttgagatgtgtaattcttttatggagtttttaaaaagaattttcatattgtttttctaacatggcttcattaaacgtttaagtattttaaaaatatgtaatatttggaccagatgttgtgaataatagtagagataaagctattttattctgtatttttaaaactgttccgtacaaataaaagctctcctggacacagt

SEQ ID NO: 28762 - DNA, 6962 bp, Homo sapiens
  source 1..6962: mol_type = unassigned DNA
cattcatcttctcctgcccttggacatcacagctccaggaactcagatcttcagactcagggtgaaggacaccaccagctttccaggttccccagcttgcagacggcatacgctaggtcttgactccactaacggggacttctcatacggctttgaacttggaccttggtgcataagcaaatgtaactcagcgaattgtaatggaaagcatatggacaggtctacgccacatcacttaggtgctaagagatgccgtttgcaggcctcatctctgcttgagaatcgggggctccaggcactagaagagccggctgatcctgggctcctagcttgaataagccttcacttccagctgctctccccaacggctgtgtaaactactcgtttctcttaatgatgggtattggtaagaataccacatccaaatcaatggaggctggaagttcaacagaaggcaaatacgaagacgaggcaaagcacccagctttcttcactcttccggtggtgataaatggaggcgccacctccagcggtgagcaggacaatgaggacactgagctcatggcgatctacactacggaaaacggcattgcagaaaagagctctctcgctgagaccctggatagcactggcagtctggacccccagcgatcagacatgatttataccatagaagatgttcctccctggtacctgtgtatatttctggggctacagcactacctgacatgcttcagcggcacgatcgcagtgcccttcctgttggccgatgccatgtgtgtggggtacgaccagtgggccaccagccagctcattgggaccattttcttctgtgtgggaatcactactttgctacagacaacgtttggatgcaggttacccctgtttcaggccagtgcttttgcatttttggcccctgctcgagccatcctgtctttagataaatggaaatgtaacaccacagatgtttcagttgccaatggaacagcagagctgttgcacacagaacacatctggtatccccggatccgagagatccagggggccatcatcatgtcctcactgatagaagtagtcatcggcctcctcggcctgcctggggctctactgaagtacatcggtcccttgaccattacacccacggtggccctaattggcctctctggtttccaggcagcgggggagagagccgggaagcactggggcattgccatgctgacaatattcctagtattactgttttctcaatacgccagaaatgttaaatttcctctcccgatttataaatccaagaaaggatggactgcgtacaagttacagctgttcaaaatgttccctatcatcctggccatcctggtatcctggctgctctgcttcatcttcacggtgacagatgtcttccctcccgacagcacaaagtatggcttctatgctcgcacagatgccaggcaaggcgtgcttctggtagccccgtggtttaaggttccatacccatttcagtggggactgcccaccgtgtctgcggccggtgtcatcggcatgctcagtgccgtggtcgccagcatcatcgagtctattggtgactactacgcctgtgcacggctgtcctgtgccccacccccccccatccacgcaataaacaggggaattttcgtggaaggcctctcctgtgttcttgatggcatatttggtactgggaatggctctacttcatccagtcccaacattggagttttgggaattacaaaggtcggcagccgccgcgtgatacagtgcggagcagccctcatgctcgctctgggcatgatcgggaagttcagcgccctctttgcgtcccttccggatcctgtgctgggagccctgttctgcacgctctttggaatgatcacagctgttggcctctctaacctgcagttcattgatttaaattcttcccggaacctctttgtgcttggattttcgatcttctttgggctcgtccttccaagttacctcagacagaaccctctggtcacagggataacaggaatcgatcaagtgttgaacgtccttctcacaactgctatgtttgtagggggctgtgtggcttttatcctggataacaccatcccaggcactccagaggaaagaggaatccggaaatggaagaagggtgtgggcaaagggaacaaatcactcgacggcatggagtcgtacaatttgccatttggcatgaacattataaaaaaatacagatgcttcagctacttacccatcagcccaacctttgtgggctacacatggaaaggcctcaggaagagcgacaacagccggagttcagatgaagactcccaggccacgggatagcctttgctgtgccctgtggcctggccgcagtgaggcatgtatctgtagttccttgctgagtaacaagaagtaaaatacatgtttgtatatctacatttacattctgcgccccagagctaagacagactgcgaatcacttttctgctgtgagggtgatggtgcctgatgcggtgtctcgcctatctccttatttaagcccttaactccttgccctttgagagtgtccattgctggccatggtcactaaatttgaagttccagtcctccctttggagtggacatttaaaatctgcagccattccttgcttcagttcccttccaccacccagggctggctttcctataagccacctccagggtccaggggctttctctctctctccgaagcccctggacctgtttccttgtcatttgaccctcgtctgtgcccgcggagacctcctctgaccaaggggcactagtatgccttgcgctatcatgactgactggcccagtatgattctgttgtcgctgatctcccggaggaggaggctgttgacctgaaaacagtggcgtggctcccctgtgcccagatctggccatgggtgaggcctgcacagatgttgaatgaacatctgtttggggcattggagggaaaaggaaaggaccctgaagccaatatctgattctcggctgcaccttctcttggccaccctggccctgaccgggccagcacgtgcacactggcctcttttcatttcactagtggccgagacaccctctctggcatttatcactgttggccggtgtgatgagtatagagtgccacccaaggcaccagtcacacaagctgatgggcgtcttggctctgccgtcatgtggatgttattgtcgcgcgcgtctataattacaaggttttattcctatttaatgttattgactatagcagattttggaaatcagtgttttccatgtgaccctctttccttgcatccctattccttgtcccccacccactcttccccccatcaagaaaagaaccagcatttgtaaagctgtggacaccatcagggaagcttgttgtaacggcttttgaaggccagtaaccattgttgtggttgtgttttgtattgcttgataccatgaaagtgtaaatactgtaatgcctaatctatttatcaaaactgactactggaccggagcccagaaaccatgggtcaagttacacgtgaatttgttttgtgaagaagggaagctggggcaggtaacacgcagagccgccacgtggaacggtctgtccgccggtctgtcccgcttgccgggcttctgttgcaagtcttggcttaaggagacttcctgtgggttgccatgtcgcacgtccgttagatcttgattttacaggtgagggtggttgccaaaggtgataagaaaagcagccaacaggctccctctcacttaagagagttctaattaataacactaaattcttcctgagaaatgactcctcttggtttggtttgaagtttttcagtgaaggaaaaggcctgagataggaagcagtgccctcgcttcatgaggtggcacatcttcggtggccgttggcctggtcgagctttggtcagctgcgtgggtgcctgtctcctgtctccagcggcagggcatggttcttggcagcctggtgtccacacggtgcattcctgtccccctcggccccaggctggctcagctctccagtgctgcggcgctgtctttgcagcattgccatgtcaccgtagcccccttcactcttggaagtttggggcttcaaggtttattctggcaagaacacctcggagccactgcattgttttgccaaaaacttactgcagattaagtaaagaacttagatgctaaattacatctaattttgtatgtttttttaaatgtgtctttgatgcatactttagaagcacactggctcgcggtttccatccctcttgccttgggacactcttgaggctggcagccctcctgcaatgagttgctctcagttccttctgtttggattttgctcaacatctccagtttctctgctctgaaaaatggggaaaactgctaaacatcccagagatttgcaatcttctagctctccaggtgagcagaaagaccaaatatccaaataaaagcctgaaagccattggtgatccaggggcaccttctcttcagcttgactgggcgtcttccgctgcataacactcaaggtgtctgctctagtcatccagaaacccactcccttctgaagcccctccttgggccgggttgtatcaggaggattcaaccccgctaacatgtggggtgccctctgtaggccttcacacagggaaggaagccctaccctttcaactcctgttggagtgagagtttcctgttctgattccactgtggccaacccaataattctgtccgaggaggggtaagggaataggaggtggggagcaaagagggcagcctgactagatgcccctgctgaatctggtactttctgcacagccttgagtgattggagtcccctaatgactaataaacttgaacatgtaacacacacacacacacacacacacaccattttaggaagtggttctcctactggaaaatatgctacagaatgaaagtttgtaattgaaagaaaaagaatgtattcatctgcttcttgggtttaagcacacacctgaaggggagatattgggggacacggtggccactcgcggtctgtgtcatgacacttcccattcacatcattggcctgcgttgctggggctttgaaccaccaccccgtactttgttttgcctgtagagtgttgtaaaatattttggatgtgaatgtccttgcaggccggttagtctccagtttccacagagaccacctacccaccaccttcccaggtcacctgcctggtccctgaaagaaagcatttgtgtgggcaatcccaacatgaaatgtagacagcgtgaatacggacaggaggtgatgccatattcacagtgggggatggagggcccccacccctgcttcacagaataatgggaagtgactctagtctttgtaagcaattttcattctcattaggaagttaaatgtagattcacagatacatttactttcagaatcctcaagaggatttcaaatgctaacttttagtttcttgggattgatcaaggcaagagaagtggctttaaccatgccagccagaatgaagcatcatgggtcctgatggtttcccgttttcatggtaacaaattcgcacagaggttttgctttatgctgtagaataccgactttcatgatgacaacttggtttatgcatgaatattgcagtatttccatatagcaaaataacatttctacccaggataatagtcacagttttccagggagggaatgatataattttcatgacaatgtcatgtgatgatagaatttctccattgatgaatctctagtatgtgtgtatactttatttacccatacgtatattttatgaccatgagctaagttgttatttctttcattcatatccctgctgaaatattggtactagcaacttaaagttggcaagtctcatcttcagtaatacggatgccatgggagtggccaggccagattgaaggtgaatatggagcagtagcagaagcctcattccagaacccatctggccagagaagcagcagcatcctgggggatggccgtgcatggggtgtacactcgctataggcataggcccggcatggctgtcgctggacgccagctgtgcacacccagccacacctgctgcacgccgcgttagtgtgcggctccgggcctgagcattcgcaaagctcgcttctccagggagcctcctcttggctttggaaaagagcccagggacttaacgtgctgcctgttgtactctgtcccctcatgactttttagacacagggactaggacatcgaccaccctctgcccctcctgcagtcagaacccgagtagtgcaagaacggccacccggttttgccagcgttcagcgtctgcccatggacccataaggcacattagcgttgggggtctcttttcagcagcctcacagacattcccgtcctttctggttggtgttgactgtgtttcagcatcactctaccctcccatgtccttagcattgctgtgcgtgtttccaggcacttaggacacccttccccacgttgccatcttactgacagttcaaatgactctccttttttgttcgttagtaacaatcttcatttgacaccttaatacatttctgactgttcttaaaacagtggggatgcctatattttccttgagtttttgtgactgactttggctatatatacctttctggggttttgtttgttttttatttttattttgattaccgagggtatttggggtggggttgttttttgagatgtgtaattcttttatggagtttttaaaaagaattttcatattgtttttctaacatggcttcattaaacgtttaagtattttaaaaatatgtaatatttggaccagatgttgtgaataatagtagagataaagctattttattctgtatttttaaaactgttccgtacaaataaaagctctcctggacacagt

SEQ ID NO: 28763 - DNA, 911 bp, Homo sapiens
  source 1..911: mol_type = unassigned DNA
ggggtacgaccagtgggccaccagccagctcattgggaccattttcttctgtgtgggaatcactactttgctacagacaacgtttggatgcaggacaatattcctagtattactgttttctcaatacgccagaaatgttaaatttcctctcccgatttataaatccaagaaaggatggactgcgtacaagttacagctgttcaaaatgttccctatcatcctggccatcctggtatcctggctgctctgcttcatcttcacggtgacagatgtcttccctcccgacagcacaaagtatggcttctatgctcgcacagatgccaggcaaggcgtgcttctggtagccccgtggtttaaggttccatacccatttcagtggggactgcccaccgtgtctgcggccggtgtcatcggcatgctcagtgccgtggtcgccagcatcatcgagtctattggtgactactacgcctgtgcacggctgtcctgtgccccacccccccccatccacgcaataaacaggggaattttcgtggaaggcctctcctgtgttcttgatggcatatttggtactgggaatggctctacttcatccagtcccaacattggagttttgggaattacaaaggtcggcagccgccgcgtgatacagtgcggagcagccctcatgctcgctctgggcatgatcgggaagttcagcgccctctttgcgtcccttccggatcctgtgctgggagccctgttctgcacgctctttggaatgatcacagctgttggcctctctaacctgcagttcattgatttaaattcttcccggaacctctttgtgcttggattttcgatcttctttgggctcgtccttccaagttacctcagacagaaccctctggtcacagggataacaggaatcgatc

SEQ ID NO: 28764 - DNA, 2375 bp, Homo sapiens
  source 1..2375: mol_type = unassigned DNA
attttgcaggcggctgtcgcggggaccggaggcggaggctgcagcgggcactgcggcgccgaggcgcggcggcaggacgggaaccacgcgagctgcagccagctaggtcttgactccactaacggggacttctcatacggctttgaacttggaccttggtgcataagcaaatgtaactcagcgaattgtaatggaaagcatatggacaggtctacgccacatcacttaggtgctaagagatgccgtttgcaggcctcatctctgcttgagaatcgggggctccaggcactagaagagccggctgatcctgggctcctagcttgaataagccttcacttccagctgctctccccaacggctgtgtaaactactcgtttctcttaatgatgggtattggtaagaataccacatccaaatcaatggaggctggaagttcaacagaaggcaaatacgaagacgaggcaaagcacccagctttcttcactcttccggtggtgataaatggaggcgccacctccagcggtgagcaggacaatgaggacactgagctcatggcgatctacactacggaaaacggcattgcagaaaagagctctctcgctgagaccctggatagcactggcagtctggacccccagcgatcagacatgatttataccatagaagatgttcctccctggtacctgtgtatatttctggggctacagcactacctgacatgcttcagcggcacgatcgcagtgcccttcctgttggccgatgccatgtgtgtggggtacgaccagtgggccaccagccagctcattgggaccattttcttctgtgtgggaatcactactttgctacagacaacgtttggatgcaggacaatattcctagtattactgttttctcaatacgccagaaatgttaaatttcctctcccgatttataaatccaagaaaggatggactgcgtacaagttacagctgttcaaaatgttccctatcatcctggccatcctggtatcctggctgctctgcttcatcttcacggtgacagatgtcttccctcccgacagcacaaagtatggcttctatgctcgcacagatgccaggcaaggcgtgcttctggtagccccgtggtttaaggttccatacccatttcagtggggactgcccaccgtgtctgcggccggtgtcatcggcatgctcagtgccgtggtcgccagcatcatcgagtctattggtgactactacgcctgtgcacggctgtcctgtgccccacccccccccatccacgcaataaacaggggaattttcgtggaaggcctctcctgtgttcttgatggcatatttggtactgggaatggctctacttcatccagtcccaacattggagttttgggaattacaaaggtcggcagccgccgcgtgatacagtgcggagcagccctcatgctcgctctgggcatgatcgggaagttcagcgccctctttgcgtcccttccggatcctgtgctgggagccctgttctgcacgctctttggaatgatcacagctgttggcctctctaacctgcagttcattgatttaaattcttcccggaacctctttgtgcttggattttcgatcttctttgggctcgtccttccaagttacctcagacagaaccctctggtcacagggataacaggaatcgatcaagtgttgaacgtccttctcacaactgctatgtttgtagggggctgtgtggcttttatcctggataacaccatcccaggcactccagaggaaagaggaatccggaaatggaagaagggtgtgggcaaagggaacaaatcactcgacggcatggagtcgtacaatttgccatttggcatgaacattataaaaaaatacagatgcttcagctacttacccatcagcccaacctttgtgggctacacatggaaaggcctcaggaagagcgacaacagccggagttcagatgaagactcccaggccacgggatagcctttgctgtgccctgtggcctggccgcagtgaggcatgtatctgtagttccttgctgagtaacaagaagtaaaatacatgtttgtatatctacatttacattctgcgccccagagctaagacagactgcgaatcacttttctgctgtgagggtgatggtgcctgatgcggtgtctcgcctatctccttatttaagcccttaactccttgccctttgagagtgtccattgctggccatggtcactaaatttgaagttccagtcctccctttggagtggacatttaaaatctgcagccattccttgcttcagttcccttccaccacccagggctggctttcctataagccacctccagggtccaggggctttctctctctct

SEQ ID NO: 28765 - DNA, 5768 bp, Homo sapiens
  source 1..5768: mol_type = unassigned DNA
cccttcacacccgaccctgccttgaattaggattccataggagagctgggggcaggagaatggggtgttccctgctgtccagcttcagacccactctttgagatattggattctgacaagtttccagagctgagaagacagccagatgtcaaggtctgaagggttgtggataccccctggctgggcttcatggagaaatcttctctgatcaccaacctgaatcccagagtagcctccatcttaggacagaatgagaggccttctgtaaccagatataactggccagcatggggaaattgatcaggatggggccgcaagagaggtggttactccggacaaagcggcttcattggagtcgcctcctcttcttactgggaatgttgatcatcggttctacttatcagcaccttaggagaccccggggcctttcctcattgtgggcagcagtctcttctcatcagcctataaaactggccagtcgggacctctccagtgaagagatgatgatgatgagcagcagcccttcaaaacctagctccgaaatggggggtaagatgctggtaccccaagcctcagtgggcagtgatgaagcaacactgagcatgacagtggagaatatccccagtatgcctaaaagaacagccaagatgatcccaacaacaaccaagaataattacagcccaacagcagcaggtacagaaagaaggaaggaagacaccccaacatccagtagaacactgacttactacacctcaacttcaagcagacaaatagtaaaaaagtataccccaacacccaggggagaaatgaagagctacagcccaactcaagtgagggaaaaggtgaagtatactccttccccacgtggtagaagagtaggcacttacgtgccgtccacattcatgacaatggaaacaagccatgcgatcacccccaggacaacagtgaaagacagtgacattacagcaacctataaaatactcgaaaccaactctcttaagagaataatggaggaaaccaccccaaccactctcaagggaatgtttgatagcaccccaacttttctgacacatgaggtagaagcaaacgtcttgacttctccaaggagcgtcatggaaaaaaacaacctgtttccccccagaagagtggaaagtaacagctcagcccatccctgggggttagtgggaaagagcaacccgaagactccccagggaacagtcctgttgcataccccagccacctctgaggggcaggtgacaataagcaccatgacaggcagcagcccagcagaaaccaaagccttcactgctgcctggagtcttaggaatccttcacccaggaccagtgtatcagccatcaaaacagccccagccatagtctggaggctggcaaagaaaccttccacagcacccagcacctcaacaacccctacggtcagggcaaagctgaccatgcaggtccatcactgtgtggttgtgaagccaaccccagccatgctcaccactccctccccaagcctcacaacagccctgctcccagaggagctcagtcctagtccctcagtgctgcctcccagcttgccagacctccaccccaagggagagtaccccccagatctgttcagtgtggaggagcggcggcagggctgggtggtcctgcacgtttttggcatgatgtatgtgtttgtggccttggccattgtttgcgacgagtacttcgttccagccctgggtgtcatcacagacaagctgcagatctccgaggatgtggcaggcgccacattcatggctgctggaggctctgctcctgagctcttcacctccctcatcggtgtcttcatttcccacagcaacgtgggcattggtaccattgtgggctctgctgtgttcaacattctctttgtcattggcacttgttccctcttctcccgagagatcctcaacctcacctggtggcccttattccgtgatgtctccttctacatccttgacctgataatgctcatcctcttcttcctggacagcctcattgcctggtgggagagcctgctgctgctgctggcctatgccttctatgtgttcaccatgaagtggaacaagcatatcgaggtctgggtgaaggagcagctcagcaggaggccagtggccaaggtcatggccttagaagacctcagcaagccgggcgatggggccattgcggtggatgagctacaggataacaagaagctgaagctcccgtccttgctgacccgagggagcagctcgacctctctgcacaacagcaccatccgcagcaccatctaccagctcatgctccacagcctggaccccctgagggaagttcgccttgccaaggagaaggaggaggagagcttgaatcaaggggccagagcccaaccccaggccaaagcagaaagcaaaccagaagaggaggagccagccaagctccctgcggtcacggtcacaccagcccctgttccagacatcaagggagatcagaaggagaatccaggcggtcaggaagatgtggctgaggccgagagcacaggtgaaatgccaggcgaagagggcgaaactgctggtgaaggtgaaactgaagagaaaagtggaggtgaaactcaaccagaaggtgaaggtgaaactgaaacacaaggaaaaggagaagaatgtgaagatgaaaatgaagcagaaggaaaaggagacaatgaaggtgaagatgagggtgaaatccacgcagaagatggtgaaatgaaaggtaatgaaggtgaaactgaaagccaggaactcagtgctgaaaatcacggtgaagccaaaaatgatgagaaaggtgtagaagatggagggggaagtgatggaggggatagcgaagaggaggaagaggaggaggaagagcaggaggaagaggaggaggaggaagagcaggaggaagaggaggaggaggaggaggaagaggaggagaagggaaatgaagagcctctgtccctggactggcctgaaaccaggcagaagcaggccatttacctcttccttctgcccatcgtgttcccactgtggctgacagtccccgacgtccgaaggcaggagtctaggaagttttttgttttcaccttcctgggatctatcatgtggatagccatgttctcatacctcatggtgtggtgggctcaccaggttggtgaaacaatagggatttctgaagagatcatgggcctgacaatccttgcagcaggcacatcaattcctgacctcatcaccagtgtgattgtcgctcgaaaaggcctgggagacatggctgtgtcaagctctgtgggcagtaacatatttgatatcactgtgggcttgcctgttccttggttgcttttctctcttatcaatggattacagccagttccagtcagcagcaatggcttgttttgtgcaattgttttgctttttctcatgcttctgtttgtgatctcttcaattgcgtcatgtaaatggagaatgaacaagatcctgggcttcacaatgttcctcctttactttgtattcctgataatcagtgtgatgttagaagatcgaatcatatcctgtcctgtatctgtctgaatcagtcactcttgctcacaatgggcatggatcagaagaccatgcagaagttactgtatctcttgtgaccctaatgaaagaatgtatatgatcctggaaagtgaactgggtgacctaggacctctgatatgaatgtgatctgagactaaagtttgtccttggaaacacctgcagctcattgtggattaagaacctcacccctggaggggtggagtttctacccctgactcatgcagacatctattacatggaggcagtagaaggacccctggagccagagggttttctaaatgagataactgggggcaaaggttgggataggcgcagcagctataagacaagctcctacgctcactgttccctgatcattccaaaggctgctggcccaaaagatgcagatgtggtctacatctcagccttcctgacctctgccccaaacacacgctgcaattttgtctcctccttttctgttcaaattgtgaggttctatcaggtttgtaatcactgtagcttcagttattggtgagtctaaggatccaaggctacagaaaaaaaagaaatataacaggaattaatgatcattccacgttttgtagcccactgcatctggatatataccagtattttctttttttttttttttgagacagagtttggctcttgttgcccaggctggtgtgcaatggcgtgatctcggcacaccacaaccttcacctccccggttcaagcaattctcctgcctcagcctgaagtcgtgatctgcccgcctcggcctcccaaagtgctgggattacaggcgtcagccaccgcgcctggcctataccagtattttctagtttaaaggaggactacattaactcttattgttgtgtttctgaaaagtgaaatttaaaaagcagcctgaaaaataaaaatttataatttgcccttgaattggaaggaatggagattagggaaggaaaactactctagaggccatttaaaagtatgtatttattagaacatgcaaattcatgttgtctccatcagtggtcaccttgagggattagacattctaatggaatgtcctggctccaccctccagcatgttctcacccaacaatgacagttgagtggagtgggaagggaagtcattctaaagagtccaaagtcagtagcgccacatctggtttataaagtaagagatccagtgggacaatgctatttttgtatgccaacctagataggattataaagcaagactgatttcttctgtggtttatgaatggatcttaaggtaattacaaaagggaaattccaagaatgcataacacaatgacaacatggtgagaaaagtgcagtactacttccaaggtagctagtgtaaaggacacttgagtttttaaaactgtggttaaatgttttatgtggaatttgatgagtttgtatattaaataccactgcttgctgcttttactagaatcaagttaagggacacgttagaaatagaacagcttaatatcactggcttcagagcaaaatgagctcgggtgactgcagattatgatggtaaatatggctttaattacaaacatgaggaatgattcactgaagatgaaaagataggacggatgtgatatgaaaaaaacccaaacattttggcattgaatgatggctaaggtgttccaagtattccatcttttaagatgaattgcttaattaattgcctcgctaccccaggattctcattctttggaaataatttttattaaatttcaataaactgtgaatcccaatggtattttactttacaacatggatgggctcatccttatctttaggtcatttggtcagaatcctcccgagaagactgatgaagagtatggaatcatgttccaattctatattcttaattatccttattcctgatgctactgcattgctgggtttccatagccaaggcctaagaacaggaggagaaggcaatgcttgtgggagggaggtcccaataccaaaattctgggcactaacctggtgtctgcagcccgttcccgttagcctcggggatgtcacctcacccacagcctgggatctgacgttcttcctcagactggagtaaggagtgatggaccgtaaaatgctgtgtaatgataaaaggctgaaatatccactgaatgattaaaaccaactctaataatctga

SEQ ID NO: 28766 - DNA, 5714 bp, Homo sapiens
  source 1..5714: mol_type = unassigned DNA
cccttcacacccgaccctgccttgaattaggattccataggagagctgggggcaggagaatggggtgttccctgctgtccagcttcagacccactctttgagatattggattctgacaagtttccagagctgagaagacagccagatgtcaaggtctgaagggttgtggataccccctggctgggcttcatggagaaatcttctctgatcaccaacctgaatcccagagtagcctccatcttaggacagaatgagaggccttctgtaaccagatataactggccagcatggggaaattgatcaggatggggccgcaagagaggtggttactccggacaaagcggcttcattggagtcgcctcctcttcttactgggaatgttgatcatcggttctacttatcagcaccttaggagaccccggggcctttcctcattgtgggcagcagtctcttctcatcagcctataaaactggccagtcgggacctctccagtgaagagatgatgatgatgagcagcagcccttcaaaacctagctccgaaatggggggtaagatgctggtaccccaagcctcagtgggcagtgatgaagcaacactgagcatgacagtggagaatatccccagtatgcctaaaagaacagccaagatgatcccaacaacaaccaagaataattacagcccaacagcagcaggtacagaaagaaggaaggaagacaccccaacatccagtagaacactgacttactacacctcaacttcaagcagacaaatagtaaaaaagtataccccaacacccaggggagaaatgaagagctacagcccaactcaagtgagggaaaaggtgaagtatactccttccccacgtggtagaagagtaggcacttacgtgccgtccacattcatgacaatggaaacaagccatgcgatcacccccaggacaacagtgaaagacagtgacattacagcaacctataaaatactcgaaaccaactctcttaagagaataatggaggaaaccaccccaaccactctcaagggaatgtttgatagcaccccaacttttctgacacatgaggtagaagcaaacgtcttgacttctccaaggagcgtcatggaaaaaaacaacctgtttccccccagaagagtggaaagtaacagctcagcccatccctgggggttagtgggaaagagcaacccgaagactccccagggaacagtcctgttgcataccccagccacctctgaggggcaggtgacaataagcaccatgacaggcagcagcccagcagaaaccaaagccttcactgctgcctggagtcttaggaatccttcacccaggaccagtgtatcagccatcaaaacagccccagccatagtctggaggctggcaaagaaaccttccacagcacccagcacctcaacaacccctacggtcagggcaaagctgaccatgcaggtccatcactgtgtggttgtgaagccaaccccagccatgctcaccactccctccccaagcctcacaacagccctgctcccagaggagctcagtcctagtccctcagtgctgcctcccagcttgccagacctccaccccaagggagagtaccccccagatctgttcagtgtggaggagcggcggcagggctgggtggtcctgcacgtttttggcatgatgtatgtgtttgtggccttggccattgtttgcgacgagtacttcgttccagccctgggtgtcatcacagacaagctgcagatctccgaggatgtggcaggcgccacattcatggctgctggaggctctgctcctgagctcttcacctccctcatcggtgtcttcatttcccacagcaacgtgggcattggtaccattgtgggctctgctgtgttcaacattctctttgtcattggcacttgttccctcttctcccgagagatcctcaacctcacctggtggcccttattccgtgatgtctccttctacatccttgacctgataatgctcatcctcttcttcctggacagcctcattgcctggtgggagagcctgctgctgctgctggcctatgccttctatgtgttcaccatgaagtggaacaagcatatcgaggtctgggtgaaggagcagctcagcaggaggccagtggccaaggtcatggccttagaagacctcagcaagctcccgtccttgctgacccgagggagcagctcgacctctctgcacaacagcaccatccgcagcaccatctaccagctcatgctccacagcctggaccccctgagggaagttcgccttgccaaggagaaggaggaggagagcttgaatcaaggggccagagcccaaccccaggccaaagcagaaagcaaaccagaagaggaggagccagccaagctccctgcggtcacggtcacaccagcccctgttccagacatcaagggagatcagaaggagaatccaggcggtcaggaagatgtggctgaggccgagagcacaggtgaaatgccaggcgaagagggcgaaactgctggtgaaggtgaaactgaagagaaaagtggaggtgaaactcaaccagaaggtgaaggtgaaactgaaacacaaggaaaaggagaagaatgtgaagatgaaaatgaagcagaaggaaaaggagacaatgaaggtgaagatgagggtgaaatccacgcagaagatggtgaaatgaaaggtaatgaaggtgaaactgaaagccaggaactcagtgctgaaaatcacggtgaagccaaaaatgatgagaaaggtgtagaagatggagggggaagtgatggaggggatagcgaagaggaggaagaggaggaggaagagcaggaggaagaggaggaggaggaagagcaggaggaagaggaggaggaggaggaggaagaggaggagaagggaaatgaagagcctctgtccctggactggcctgaaaccaggcagaagcaggccatttacctcttccttctgcccatcgtgttcccactgtggctgacagtccccgacgtccgaaggcaggagtctaggaagttttttgttttcaccttcctgggatctatcatgtggatagccatgttctcatacctcatggtgtggtgggctcaccaggttggtgaaacaatagggatttctgaagagatcatgggcctgacaatccttgcagcaggcacatcaattcctgacctcatcaccagtgtgattgtcgctcgaaaaggcctgggagacatggctgtgtcaagctctgtgggcagtaacatatttgatatcactgtgggcttgcctgttccttggttgcttttctctcttatcaatggattacagccagttccagtcagcagcaatggcttgttttgtgcaattgttttgctttttctcatgcttctgtttgtgatctcttcaattgcgtcatgtaaatggagaatgaacaagatcctgggcttcacaatgttcctcctttactttgtattcctgataatcagtgtgatgttagaagatcgaatcatatcctgtcctgtatctgtctgaatcagtcactcttgctcacaatgggcatggatcagaagaccatgcagaagttactgtatctcttgtgaccctaatgaaagaatgtatatgatcctggaaagtgaactgggtgacctaggacctctgatatgaatgtgatctgagactaaagtttgtccttggaaacacctgcagctcattgtggattaagaacctcacccctggaggggtggagtttctacccctgactcatgcagacatctattacatggaggcagtagaaggacccctggagccagagggttttctaaatgagataactgggggcaaaggttgggataggcgcagcagctataagacaagctcctacgctcactgttccctgatcattccaaaggctgctggcccaaaagatgcagatgtggtctacatctcagccttcctgacctctgccccaaacacacgctgcaattttgtctcctccttttctgttcaaattgtgaggttctatcaggtttgtaatcactgtagcttcagttattggtgagtctaaggatccaaggctacagaaaaaaaagaaatataacaggaattaatgatcattccacgttttgtagcccactgcatctggatatataccagtattttctttttttttttttttgagacagagtttggctcttgttgcccaggctggtgtgcaatggcgtgatctcggcacaccacaaccttcacctccccggttcaagcaattctcctgcctcagcctgaagtcgtgatctgcccgcctcggcctcccaaagtgctgggattacaggcgtcagccaccgcgcctggcctataccagtattttctagtttaaaggaggactacattaactcttattgttgtgtttctgaaaagtgaaatttaaaaagcagcctgaaaaataaaaatttataatttgcccttgaattggaaggaatggagattagggaaggaaaactactctagaggccatttaaaagtatgtatttattagaacatgcaaattcatgttgtctccatcagtggtcaccttgagggattagacattctaatggaatgtcctggctccaccctccagcatgttctcacccaacaatgacagttgagtggagtgggaagggaagtcattctaaagagtccaaagtcagtagcgccacatctggtttataaagtaagagatccagtgggacaatgctatttttgtatgccaacctagataggattataaagcaagactgatttcttctgtggtttatgaatggatcttaaggtaattacaaaagggaaattccaagaatgcataacacaatgacaacatggtgagaaaagtgcagtactacttccaaggtagctagtgtaaaggacacttgagtttttaaaactgtggttaaatgttttatgtggaatttgatgagtttgtatattaaataccactgcttgctgcttttactagaatcaagttaagggacacgttagaaatagaacagcttaatatcactggcttcagagcaaaatgagctcgggtgactgcagattatgatggtaaatatggctttaattacaaacatgaggaatgattcactgaagatgaaaagataggacggatgtgatatgaaaaaaacccaaacattttggcattgaatgatggctaaggtgttccaagtattccatcttttaagatgaattgcttaattaattgcctcgctaccccaggattctcattctttggaaataatttttattaaatttcaataaactgtgaatcccaatggtattttactttacaacatggatgggctcatccttatctttaggtcatttggtcagaatcctcccgagaagactgatgaagagtatggaatcatgttccaattctatattcttaattatccttattcctgatgctactgcattgctgggtttccatagccaaggcctaagaacaggaggagaaggcaatgcttgtgggagggaggtcccaataccaaaattctgggcactaacctggtgtctgcagcccgttcccgttagcctcggggatgtcacctcacccacagcctgggatctgacgttcttcctcagactggagtaaggagtgatggaccgtaaaatgctgtgtaatgataaaaggctgaaatatccactgaatgattaaaaccaactctaataatctga

SEQ ID NO: 28767 - DNA, 3323 bp, Homo sapiens
  source 1..3323: mol_type = unassigned DNA
tgatcaccaacctgaatcccagagtagcctccatcttaggacagaatgagaggccttctgtaaccagatataactggccagcatggggaaattgatcaggatggggccgcaagagaggtggttactccggacaaagcggcttcattggagtcgcctcctcttcttactgggaatgttgatcatcggttctacttatcagcaccttaggagaccccggggcctttcctcattgtgggcagcagtctcttctcatcagcctataaaactggccagtcgggacctctccagtgaagagatgatgatgatgagcagcagcccttcaaaacctagctccgaaatggggggtaagatgctggtaccccaagcctcagtgggcagtgatgaagcaacactgagcatgacagtggagaatatccccagtatgcctaaaagaacagccaagatgatcccaacaacaaccaagaataattacagcccaacagcagcaggtacagaaagaaggaaggaagacaccccaacatccagtagaacactgacttactacacctcaacttcaagcagacaaatagtaaaaaagtataccccaacacccaggggagaaatgaagagctacagcccaactcaagtgagggaaaaggtgaagtatactccttccccacgtggtagaagagtaggcacttacgtgccgtccacattcatgacaatggaaacaagccatgcgatcacccccaggacaacagtgaaagacagtgacattacagcaacctataaaatactcgaaaccaactctcttaagagaataatggaggaaaccaccccaaccactctcaagggaatgtttgatagcaccccaacttttctgacacatgaggtagaagcaaacgtcttgacttctccaaggagcgtcatggaaaaaaacaacctgtttccccccagaagagtggaaagtaacagctcagcccatccctgggggttagtgggaaagagcaacccgaagactccccagggaacagtcctgttgcataccccagccacctctgaggggcaggtgacaataagcaccatgacaggcagcagcccagcagaaaccaaagccttcactgctgcctggagtcttaggaatccttcacccaggaccagtgtatcagccatcaaaacagccccagccatagtctggaggctggcaaagaaaccttccacagcacccagcacctcaacaacccctacggtcagggcaaagctgaccatgcaggtccatcactgtgtggttgtgaagccaaccccagccatgctcaccactccctccccaagcctcacaacagccctgctcccagaggagctcagtcctagtccctcagtgctgcctcccagcttgccagacctccaccccaagggagagtaccccccagatctgttcagtgtggaggagcggcggcagggctgggtggtcctgcacgtttttggcatgatgtatgtgtttgtggccttggccattgtttgcgacgagtacttcgttccagccctgggtgtcatcacagacaagctgcagatctccgaggatgtggcaggcgccacattcatggctgctggaggctctgctcctgagctcttcacctccctcatcggtgtcttcatttcccacagcaacgtgggcattggtaccattgtgggctctgctgtgttcaacattctctttgtcattggcacttgttccctcttctcccgagagatcctcaacctcacctggtggcccttattccgtgatgtctccttctacatccttgacctgataatgctcatcctcttcttcctggacagcctcattgcctggtgggagagcctgctgctgctgctggcctatgccttctatgtgttcaccatgaagtggaacaagcatatcgaggtctgggtgaaggagcagctcagcaggaggccagtggccaaggtcatggccttagaagacctcagcaagccgggcgatggggccattgcggtggatgagctacaggataacaagaagctgaagctcccgtccttgctgacccgagggagcagctcgacctctctgcacaacagcaccatccgcagcaccatctaccagctcatgctccacagcctggaccccctgagggaagttcgccttgccaaggagaaggaggaggagagcttgaatcaaggggccagagcccaaccccaggccaaagcagaaagcaaaccagaagaggaggagccagccaagctccctgcggtcacggtcacaccagcccctgttccagacatcaagggagatcagaaggagaatccaggcggtcaggaagatgtggctgaggccgagagcacaggtgaaatgccaggcgaagagggcgaaactgctggtgaaggtgaaactgaagagaaaagtggaggtgaaactcaaccagaaggtgaaggtgaaactgaaacacaaggaaaaggagaagaatgtgaagatgaaaatgaagcagaaggaaaaggagacaatgaaggtgaagatgagggtgaaatccacgcagaagatggtgaaatgaaaggtaatgaaggtgaaactgaaagccaggaactcagtgctgaaaatcacggtgaagccaaaaatgatgagaaaggtgtagaagatggagggggaagtgatggaggggatagcgaagaggaggaagaggaggaggaagagcaggaggaagaggaggaggaggaagagcaggaggaagaggaggaggaggaggaggaagaggaggagaagggaaatgaagagcctctgtccctggactggcctgaaaccaggcagaagcaggccatttacctcttccttctgcccatcgtgttcccactgtggctgacagtccccgacgtccgaaggcaggttggtgaaacaatagggatttctgaagagatcatgggcctgacaatccttgcagcaggcacatcaattcctgacctcatcaccagtgtgattgtcgctcgaaaaggcctgggagacatggctgtgtcaagctctgtgggcagtaacatatttgatatcactgtgggcttgcctgttccttggttgcttttctctcttatcaatggattacagccagttccagtcagcagcaatggcttgttttgtgcaattgttttgctttttctcatgcttctgtttgtgatctcttcaattgcgtcatgtaaatggagaatgaacaagatcctgggcttcacaatgttcctcctttactttgtattcctgataatcagtgtgatgttagaagatcgaatcatatcctgtcctgtatctgtctgaatcagtcactcttgctcacaatgggcatgga

SEQ ID NO: 28768 - DNA, 3246 bp, Homo sapiens
  source 1..3246: mol_type = unassigned DNA
atggggaaattgatcaggatggggccgcaagagaggtggttactccggacaaagcggcttcattggagtcgcctcctcttcttactgggaatgttgatcatcggttctacttatcagcaccttaggagaccccggggcctttcctcattgtgggcagcagtctcttctcatcagcctataaaactggccagtcgggacctctccagtgaagagatgatgatgatgagcagcagcccttcaaaacctagctccgaaatggggggtaagatgctggtaccccaagcctcagtgggcagtgatgaagcaacactgagcatgacagtggagaatatccccagtatgcctaaaagaacagccaagatgatcccaacaacaaccaagaataattacagcccaacagcagcaggtacagaaagaaggaaggaagacaccccaacatccagtagaacactgacttactacacctcaacttcaagcagacaaatagtaaaaaagtataccccaacacccaggggagaaatgaagagctacagcccaactcaagtgagggaaaaggtgaagtatactccttccccacgtggtagaagagtaggcacttacgtgccgtccacattcatgacaatggaaacaagccatgcgatcacccccaggacaacagtgaaagacagtgacattacagcaacctataaaatactcgaaaccaactctcttaagagaataatggaggaaaccaccccaaccactctcaagggaatgtttgatagcaccccaacttttctgacacatgaggtagaagcaaacgtcttgacttctccaaggagcgtcatggaaaaaaacaacctgtttccccccagaagagtggaaagtaacagctcagcccatccctgggggttagtgggaaagagcaacccgaagactccccagggaacagtcctgttgcataccccagccacctctgaggggcaggtgacaataagcaccatgacaggcagcagcccagcagaaaccaaagccttcactgctgcctggagtcttaggaatccttcacccaggaccagtgtatcagccatcaaaacagccccagccatagtctggaggctggcaaagaaaccttccacagcacccagcacctcaacaacccctacggtcagggcaaagctgaccatgcaggtccatcactgtgtggttgtgaagccaaccccagccatgctcaccactccctccccaagcctcacaacagccctgctcccagaggagctcagtcctagtccctcagtgctgcctcccagcttgccagacctccaccccaagggagagtaccccccagatctgttcagtgtggaggagcggcggcagggctgggtggtcctgcacgtttttggcatgatgtatgtgtttgtggccttggccattgtttgcgacgagtacttcgttccagccctgggtgtcatcacagacaagctgcagatctccgaggatgtggcaggcgccacattcatggctgctggaggctctgctcctgagctcttcacctccctcatcggtgtcttcatttcccacagcaacgtgggcattggtaccattgtgggctctgctgtgttcaacattctctttgtcattggcacttgttccctcttctcccgagagatcctcaacctcacctggtggcccttattccgtgatgtctccttctacatccttgacctgataatgctcatcctcttcttcctggacagcctcattgcctggtgggagagcctgctgctgctgctggcctatgccttctatgtgttcaccatgaagtggaacaagcatatcgaggtctgggtgaaggagcagctcagcaggaggccagtggccaaggtcatggccttagaagacctcagcaagctcccgtccttgctgacccgagggagcagctcgacctctctgcacaacagcaccatccgcagcaccatctaccagctcatgctccacagcctggaccccctgagggaagttcgccttgccaaggagaaggaggaggagagcttgaatcaaggggccagagcccaaccccaggccaaagcagaaagcaaaccagaagaggaggagccagccaagctccctgcggtcacggtcacaccagcccctgttccagacatcaagggagatcagaaggagaatccaggcggtcaggaagatgtggctgaggccgagagcacaggtgaaatgccaggcgaagagggcgaaactgctggtgaaggtgaaactgaagagaaaagtggaggtgaaactcaaccagaaggtgaaggtgaaactgaaacacaaggaaaaggagaagaatgtgaagatgaaaatgaagcagaaggaaaaggagacaatgaaggtgaagatgagggtgaaatccacgcagaagatggtgaaatgaaaggtaatgaaggtgaaactgaaagccaggaactcagtgctgaaaatcacggtgaagccaaaaatgatgagaaaggtgtagaagatggagggggaagtgatggaggggatagcgaagaggaggaagaggaggaggaagagcaggaggaagaggaggaggaggaagagcaggaggaagaggaggaggaggaggaggaagaggaggagaagggaaatgaagagcctctgtccctggactggcctgaaaccaggcagaagcaggccatttacctcttccttctgcccatcgtgttcccactgtggctgacagtccccgacgtccgaaggcaggagtctaggaagttttttgttttcaccttcctgggatctatcatgtggatagccatgttctcatacctcatggtgtggtgggctcaccaggttggtgaaacaatagggatttctgaagagatcatgggcctgacaatccttgcagcaggcacatcaattcctgacctcatcaccagtgtgattgtcgctcgaaaaggcctgggagacatggctgtgtcaagctctgtgggcagtaacatatttgatatcactgtgggcttgcctgttccttggttgcttttctctcttatcaatggattacagccagttccagtcagcagcaatggcttgttttgtgcaattgttttgctttttctcatgcttctgtttgtgatctcttcaattgcgtcatgtaaatggagaatgaacaagatcctgggcttcacaatgttcctcctttactttgtattcctgataatcagtgtgatgttagaagatcgaatcatatcctgtcctgtatctgtctga

SEQ ID NO: 28769 - DNA, 2170 bp, Homo sapiens
  source 1..2170: mol_type = unassigned DNA
tgaaagaaccatctggttgagtctaaagttggaagatcaccatatccaccagaagacccaggatggatctgcaacaaagcaccaccatcacttccctagagaaatggtgtttggatgagtcactgtctggctgcagaagacattatagtgtcaagaaaaaactgaagttaattcgagtcttaggccttttcatgggtctggtagccattagcactgtctcattttcaatcagtgccttttctgagacagatacacagagcacaggagaggccagtgttgtaagtggccctagggtagcacagggttaccatcagagaactctcttagatttaaatgacaagattctggattatactccacagccacctctttctaaggaaggcgagtctgagaatagtacagatcacgcccaaggagactacccgaaagacatcttttcccttgaggagagaagaaaaggtgcgatcattctgcatgtcattggaatgatctacatgttcatagccttagccattgtctgtgatgagttctttgttccttctttgactgtcatcactgaaaaactgggcatctctgatgatgtggctggagccaccttcatggctgcaggagggtcagccccagaacttttcacatctctcataggggtatttatcgctcacagcaacgttggcataggcacaattgtaggttcagcagtattcaacatcctctttgttattggcatgtgtgctctgttttctagagaaatcttaaacctgacatggtggccgctctttcgagatgtgtctttctacattgttgacttgatcatgctgatcatatttttcctggataatgtcatcatgtggtgggaaagcttgcttctcttaacagcttatttttgctatgtggttttcatgaaattcaacgtccaagtagaaaaatgggtgaagcaaatgataaaccgcaataaggtcgtcaaggtgacagcaccagaagcccaagcaaagccatctgcagccagggacaaggatgaaccaactctaccggctaagccgcgtctccagcgaggtggaagctctgcctccctccacaacagtctcatgaggaatagcatcttccaactcatgatacacacccttgacccactcgccgaagggaggttcagagaaaaggcttcaattctccacaagatcgccaagaagaaatgtcatgtggatgagaacgagaggcagaatggggctgccaaccacgtggaaaaaattgagcttccaaacagcaccagcacagatgttgaaatgacaccatccagtgatgcttcagaacctgtacaaaatggaaatctctcccacaacattgaaggtgcagaagcccagaccgctgatgaggaggaggaccagcctctcagccttgcctggccttctgaaacccgcaagcaagtcacgtttctgattgttttccccatagtgtttcctctctggattacgttacctgacgttcgcaaaccttcatcgaggaagttttttcccatcacgttctttggctccattacctggattgcagtattctcttacttgatggtctggtgggcgcaccaggttggagagacaattggcatcagtgaagagattatgggcctgaccatcttggctgctgggacctccatccctgatcttatcaccagtgtcatagtggcccggaaggggttaggggacatggctgtgtccagctctgttggaagcaacatttttgacatcactgtagggctcccactgccctggctcctgtacaccgtcattcacagattccagccagtggctgtcagcagcaatggccttttctgtgccatcgtccttctcttcatcatgctgctcttcgtcatcctctctatcgccctctgcaagtggcgaatgaacaaaatcctgggcttcatcatgtttggcctctactttgtgttcctggtggtgagcgttctcctagaagacagaattcttacatgccccgtctccatctagcaggaaaagccatatcttgcaccagcagcatgaatggtccctccacactctgggctctgggctccttgacctcttgagaagaggcagctggcacacagccctgggtgccaagtgtccctccttggtgaatttgaggagagatggattcacactgggcccattcacttcacagg

SEQ ID NO: 28770 - DNA, 2221 bp, Homo sapiens
  source 1..2221: mol_type = unassigned DNA
tgaaagaaccatctggttgagtctaaagttggaagatcaccatatccaccagaagacccaggatggatctgcaacaaagcaccaccatcacttccctagagaaatggtgtttggatgagtcactgtctggctgcagaagacattatagtgtcaagaaaaaactgaagttaattcgagtcttaggccttttcatgggtctggtagccattagcactgtctcattttcaatcagtgccttttctgagacagatacacagagcacaggagaggccagtgttgtaagtggccctagggtagcacagggttaccatcagagaactctcttagatttaaatgacaagattctggattatactccacagccacctctttctaaggaaggcgagtctgagaatagtacagatcacgcccaaggagactacccgaaagacatcttttcccttgaggagagaagaaaaggtgcgatcattctgcatgtcattggaatgatctacatgttcatagccttagccattgtctgtgatgagttctttgttccttctttgactgtcatcactgaaaaactgggcatctctgatgatgtggctggagccaccttcatggctgcaggagggtcagccccagaacttttcacatctctcataggggtatttatcgctcacagcaacgttggcataggcacaattgtaggttcagcagtattcaacatcctctttgttattggcatgtgtgctctgttttctagagaaatcttaaacctgacatggtggccgctctttcgagatgtgtctttctacattgttgacttgatcatgctgatcatatttttcctggataatgtcatcatgtggtgggaaagcttgcttctcttaacagcttatttttgctatgtggttttcatgaaattcaacgtccaagtagaaaaatgggtgaagcaaatgataaaccgcaataaggtcgtcaaggtgacagcaccagaagcccaagcaaagccatctgcagccagggacaaggatgaaccaactctaccggctaagccgcgtctccagcgaggtggaagctctgcctccctccacaacagtctcatgaggaatagcatcttccaactcatgatacacacccttgacccactcgccgaagaacttggatcatatggaaaactaaaatattatgacacaatgactgaagaagggaggttcagagaaaaggcttcaattctccacaagatcgccaagaagaaatgtcatgtggatgagaacgagaggcagaatggggctgccaaccacgtggaaaaaattgagcttccaaacagcaccagcacagatgttgaaatgacaccatccagtgatgcttcagaacctgtacaaaatggaaatctctcccacaacattgaaggtgcagaagcccagaccgctgatgaggaggaggaccagcctctcagccttgcctggccttctgaaacccgcaagcaagtcacgtttctgattgttttccccatagtgtttcctctctggattacgttacctgacgttcgcaaaccttcatcgaggaagttttttcccatcacgttctttggctccattacctggattgcagtattctcttacttgatggtctggtgggcgcaccaggttggagagacaattggcatcagtgaagagattatgggcctgaccatcttggctgctgggacctccatccctgatcttatcaccagtgtcatagtggcccggaaggggttaggggacatggctgtgtccagctctgttggaagcaacatttttgacatcactgtagggctcccactgccctggctcctgtacaccgtcattcacagattccagccagtggctgtcagcagcaatggccttttctgtgccatcgtccttctcttcatcatgctgctcttcgtcatcctctctatcgccctctgcaagtggcgaatgaacaaaatcctgggcttcatcatgtttggcctctactttgtgttcctggtggtgagcgttctcctagaagacagaattcttacatgccccgtctccatctagcaggaaaagccatatcttgcaccagcagcatgaatggtccctccacactctgggctctgggctccttgacctcttgagaagaggcagctggcacacagccctgggtgccaagtgtccctccttggtgaatttgaggagagatggattcacactgggcccattcacttcacagg

SEQ ID NO: 28771 - DNA, 3893 bp, Homo sapiens
  source 1..3893: mol_type = unassigned DNA
gcgacgaggagggcgacgacgaggagacgggcagcggcgaggaggaggaagaggaggcggaggcggcggccgggtgggagcgcagcgaggacgcgcggctgctgcgcgcagggctgcctcctgccgctgtccccgccgcggccgcccgcgacaggagcggccgccgcccgccgaggccgccgcccggccgcccgaggatgcggccgtccggcgacgaggaccgcgcgcgtcgccgccgccgccgccgccgccggagggaccttctgctgagccagctctgcttcctggcctcggtggcgctgctgctctggtcgctgtcgagcctgcgagagcagaaggagcttgacctcatggacctcgtaggggaagacagaaagtggatgatggcgaggaagctgatgcaggtgaacgacactctgacttccgaagatgccggactccggaacagcaagaactgcaccgaaccagccctgcatgaattccccaatgacatcttcacaaacgaggatagaagacaaggtgcggtggtcctccatgtgctctgtgccatatacatgttctatgcgctggccattgtgtgtgatgacttcttcgtcccttccttggaaaagatctgtgagcgcctgcacctcagtgaagatgtggctggggccacattcatggcagcgggaagttcggccccagagctgttcacatcggtcataggggtcttcatcaccaaaggcgatgtgggagttggcaccatcgtgggctcagcggtattcaacatcctgtgcatcattggtgtctgtgggctctttgctgggcaggttgtggctctttcctcctggtgcctgctgagggattctatttactacacgctgtctgtgatcgcgctcatcgtgtttatttatgatgaaaaagtttcctggtgggagtctttagtccttgtgctgatgtatcttatctacattgtcatcatgaaatataacgcttgcatacatcagtgctttgagaggaggacaaaaggtgccgggaacatggtcaacggattggccaacaatgctgaaattgatgacagcagcaactgcgacgcaactgtggtgctacttaagaaagcaaatttccaccgcaaagcatcagtgatcatggtagacgagctgctgtcagcctacccacaccagctttccttctctgaggctggccttcgaatcatgataaccagccactttccccccaagacccggctctccatggccagtcgcatgttgatcaatgagagacaaagattgataaacagcagggcttataccaacggggaatctgaggtggccatcaaaatcccaattaagcacaccgtggagaatgggacagggcccagcagtgccccagacaggggcgtgaatgggacacggagggacgatgttgtggctgaggctggcaacgaaacagagaatgaaaatgaggacaatgagaatgatgaggaggaagaggaggacgaggatgatgatgaaggaccgtacacaccattcgacaccccctcgggtaaactggaaacagtgaaatgggcgttcacctggccgctgagtttcgtcttatacttcactgtacccaactgcaacaagccgcgctgggagaaatggttcatggtgacgtttgcttcctccacgctgtggatcgcagccttctcctacatgatggtgtggatggtcacaatcattggttacaccctggggattcctgacgtcatcatggggatcaccttcctggctgctgggaccagcgtgcctgactgcatggccagcctcattgtggccagacaagggatgggggacatggctgtgtccaactccattgggagcaacgtgtttgacatcctgattggcctcggtctcccctgggctctgcagaccctggctgtggattacggatcctacatccggctgaatagcagggggctgatctactccgtaggcttgctcctggcctctgtttttgtcacggtgttcggcgtccacctgaacaagtggcagctggacaagaagctgggctgtgggtgcctcctcctgtatggtgtgttcctgtgcttctccatcatgactgagttcaacgtgttcacctttgtgaacctgcccatgtgcggggaccactgagccgccgggtgcccacagaggctcagctccttcttttctgtgcaatacgagacccggccgcaccccgagtcacacaggcccccggggccacggcgttcgtctctcctgtgctgtcctcaggcctccgctcctgttttggtggcccaggctctcccctgacccatcctcgctcccccacctccttgggtcatgcccacccaccctttcctgcctcctccgtgtgaagacatccaacatccacgtgacttttccagctccatttttgaacagtgactgagattctagaaaaactggctgctaactggcctgagccaggcaacactgattccaatccctcctccttttttaagttatttgatggaagactcacctaatttgtgacctgagactgttgaagaaatagagaggagggggcccgttgattacagagagcatttgggattttgtttggtttggagatgatgcctaggttactgggtttggggggattgttttcttttgggggccttccccttttactccttttcttccagagatcaagagcttctcttgcatcttcttccactgggctctggattaatcaattacccaaaggctgcacctgccgtgttgtctgggcttgcatcccagatgtgttggagtatgcatggatgtagtgctttttagaggagccactgggcaaggccaccaagaacaaatgcatgacattttatagccaaggacgcctcgctaaagtcttatgggcgtcccctggggttgggggggcacaaggttttggaggaagaagacaacttccctcattccatcatcaccatctctttctcactaggttctttctagttttcaagcaatagttctagcctgccttggacaagggggccccagttaaacaaactacccatccatgagctgccaggcagtcaaaaacagaagcttccccgacttgtgagtccctgagatgtgctcttgttgtttggcatttggggtgacagggagtgacccagaggccaccactgcttttcatgcaggagttacagacactggtttcttggaaaatggagagaagcgcactttgcacagacgtcgtcaattaagtcccaatttgccacttggtattgagtacactggaccctgaccactggctcttgggcaaacgtccttcctcacggggcgcctccgccaagccggcccagctgcacccctcccttcctggagggatggccagggaaggagaaaacagagaactgacacctttgaaaccacagaatgtgttacatgcagactcgctcaagggcataagttattgtgaacgtttttgccaatcactgctcaacagccctgctagattttgtatgatgctgaattattatgcagactaattccacccagttgagacacaccatgcttgttcacttgtatttattgaaactgtggattcttgcccgtgctgtcccttgtatttactttaagcactgatcacttatcattcattcggtatggttttccctgtcccttgtacacattctggtatgaatttgtaaaaataacctgctacaaattggttgaatgtttctgtctgtggtgcgaaccagcattaacggatggggcacgtgcccaactgaggaacaggagaagaaatcaccaatttgggctctcagagctaagacacacttattgattctgttgcacattttgcactggtttatggcgattgttttcttggacggatagtgtaaaataaacttctctgttctctatcct

SEQ ID NO: 28772 - DNA, 2975 bp, Homo sapiens
  source 1..2975: mol_type = unassigned DNA
cagcaggcggggcacccggactggcggcttcgctggcgcaaggtcggtccggcggccagggacctggaaggctgcgaggccctgcgaggtcgaggttcggagtttgctggtcccaggcccggcccgaggccaccggagccgccagctgtttggaactgagctactgcagaaagggaagtggagagtaagggccaggccccgtgggggcagatggccggcagaaggctgaatctgcgctgggcactgagtgtgctttgtgtgctgctaatggcggagacagtgtctgggactaggggctcgtctacaggagctcacattagcccccagtttccagcttcaggtgtgaaccagacccccgtggtagactgccgcaaggtgtgtggcctgaatgtctctgaccgctgtgacttcatccggaccaaccctgactgccacagtgatggggggtacctggactacctggaaggcatcttctgccacttccctcccagcctcctccctctggctgtcactctctacgtttcctggctgctctacctgtttctgattctgggagtcaccgcagccaagtttttctgccccaacttgtcggccatttctaccacactgaagctctcccacaacgtggcaggcgtcaccttcctggcatttgggaatggtgcacctgacatcttcagtgccctggtggccttctctgacccgcacacagccggcctggcccttggggcactgtttggcgctggcgtgctggttaccacagtggtggccggaggcattaccatcctacaccccttcatggctgcctccaggcccttcttcagggacatcgttttctacatggtggctgtgttcctgaccttcctcatgctcttccgtggcagggtcaccctggcatgggctctgggttacctgggcttgtatgtgttctatgtggtcactgtgattctctgcacctggatctaccaacggcaacggagaggatctctgttctgccccatgccagttactccagagatcctctcagactccgaggaggaccgggtatcttctaataccaacagctatgactacggtgatgagtaccggccgctgttcttctaccaggagaccacggctcagatcctggtccgggccctcaatcccctggattacatgaagtggagaaggaaatcagcatactggaaagccctcaaggtgttcaagctgcctgtggagttcctgctgctcctcacagtccccgtcgtggacccggacaaggatgaccagaactggaaacggcccctcaactgtctgcatctggttatcagccccctggttgtggtcctgaccctgcagtcggggacctatggtgtctatgagataggcggcctcgttcccgtctgggtcgtggtggtgatcgcaggcacagccttggcttcagtgaccttttttgccacatctgacagccagccccccaggcttcactggctctttgctttcctgggctttctgaccagcgccctgtggatcaacgcggccgccacagaggtggtgaacatcttgcggtccctgggtgtggtcttccggctgagcaacactgtgctggggctcacgctgctggcctgggggaacagcattggagatgccttctcggatttcacactggctcgccagggctacccacggatggcgttctccgcctgctttggcggcatcatcttcaacatcctcgtgggtgtggggctgggctgcctgctccagatctcccgaagccacacagaagtgaagctggagccagacggactgctggtgtgggtcctggcaggcgccctggggctcagcctcgtcttctccctggtctcagtcccattgcagtgcttccagctcagcagagtctatggcttctgcctgctcctcttctacctgaacttccttgtcgtggccctcctcactgaatttggagtgattcacctgaaaagcatgtgactgaagccgcttagtgctgtggcctcactgcaggcaggagccccgcccctcctgccgggggaggcccagggaccggagcatttctgcaaggcccttgtgggcacgagagtgcggcccttgctgctggagatctgaggtcactgctgtgagctgggagaactgctgtgtacctcttgctgccagcacccaacagccttgccgtggggaccttggaaacctggctttgctctggacaaagggttccagagagaagctagaagtcccccttgaatgacccccagagcccctctgagaagggctggagtttgggggaaggggatggctggatgtgctccaggccatgctggaggtacccccgaggcacaggcactgcccgttccccttgcctgggcttcaggccttctggcaccttctcaggacacaagtggctgcccaaccctgactcagagaatgagggtggcttggacccctgggaatcaggccgccgagggctgagctccagagccgcaccatctgccacaaacagaattcgagacatacttaattttgaatttctccttgccacgttaataaagccaaaagcagcgggtgctattcgtggcaacacacttcactgaacccacttgcttccaaaacgatgccagcccgaggcactgctacgccagcagctgccacatgggatggtggctcaggcgctccctccaggattctgcccctgcctgtccacagactcctttgtgctggaacctgggctcctccagctgccaggcaggagtcggtaggactgtgcctgtgcctccctcagcggggccctgggcggggttccaaggcctgcgagctgggaaaggacagatgaggggacctcgtgccttcttgctgtcatgcaatgaccccgccttatgttgccgaaataagcaactcttaggtttgcctgactgccttatgctggtaaagaaaagggattcaactgtctcttttccaaataaaaaaaaagtcaaaatttcaagtgt

SEQ ID NO: 28773 - DNA, 2807 bp, Homo sapiens
  source 1..2807: mol_type = unassigned DNA
cagcaggcggggcacccggactggcggcttcgctggcgcaaggtcggtccggcggccagggacctggaaggctgcgaggccctgcgaggtcgaggttcggagtttgctggtcccaggcccggcccgaggccaccggagccgccagctgtttggaactgagctactgcagaaagggaagtggagagtaagggccaggccccgtgggggcagatggccggcagaaggctgaatctgcgctgggcactgagtgtgctttgtgtgctgctaatggcggagacagtgtctgggactaggggctcgtctacaggagctcacattagcccccagtttccagcttcaggtgtgaaccagacccccgtggtagactgccgcaaggtgtgtggcctgaatgtctctgaccgctgtgacttcatccggaccaaccctgactgccacagtgatggggggtacctggactacctggaaggcatcttctgccacttccctcccagcctcctccctctggctgtcactctctacgtttcctggctgctctacctgtttctgattctgggagtcaccgcagccaagtttttctgccccaacttgtcggccatttctaccacactgaagctctcccacaacgtggcaggcgtcaccttcctggcatttgggaatggtgcacctgacatcttcagtgccctggtggccttctctgacccgcacacagccggcctggcccttggggcactgtttggttacctgggcttgtatgtgttctatgtggtcactgtgattctctgcacctggatctaccaacggcaacggagaggatctctgttctgccccatgccagttactccagagatcctctcagactccgaggaggaccgggtatcttctaataccaacagctatgactacggtgatgagtaccggccgctgttcttctaccaggagaccacggctcagatcctggtccgggccctcaatcccctggattacatgaagtggagaaggaaatcagcatactggaaagccctcaaggtgttcaagctgcctgtggagttcctgctgctcctcacagtccccgtcgtggacccggacaaggatgaccagaactggaaacggcccctcaactgtctgcatctggttatcagccccctggttgtggtcctgaccctgcagtcggggacctatggtgtctatgagataggcggcctcgttcccgtctgggtcgtggtggtgatcgcaggcacagccttggcttcagtgaccttttttgccacatctgacagccagccccccaggcttcactggctctttgctttcctgggctttctgaccagcgccctgtggatcaacgcggccgccacagaggtggtgaacatcttgcggtccctgggtgtggtcttccggctgagcaacactgtgctggggctcacgctgctggcctgggggaacagcattggagatgccttctcggatttcacactggctcgccagggctacccacggatggcgttctccgcctgctttggcggcatcatcttcaacatcctcgtgggtgtggggctgggctgcctgctccagatctcccgaagccacacagaagtgaagctggagccagacggactgctggtgtgggtcctggcaggcgccctggggctcagcctcgtcttctccctggtctcagtcccattgcagtgcttccagctcagcagagtctatggcttctgcctgctcctcttctacctgaacttccttgtcgtggccctcctcactgaatttggagtgattcacctgaaaagcatgtgactgaagccgcttagtgctgtggcctcactgcaggcaggagccccgcccctcctgccgggggaggcccagggaccggagcatttctgcaaggcccttgtgggcacgagagtgcggcccttgctgctggagatctgaggtcactgctgtgagctgggagaactgctgtgtacctcttgctgccagcacccaacagccttgccgtggggaccttggaaacctggctttgctctggacaaagggttccagagagaagctagaagtcccccttgaatgacccccagagcccctctgagaagggctggagtttgggggaaggggatggctggatgtgctccaggccatgctggaggtacccccgaggcacaggcactgcccgttccccttgcctgggcttcaggccttctggcaccttctcaggacacaagtggctgcccaaccctgactcagagaatgagggtggcttggacccctgggaatcaggccgccgagggctgagctccagagccgcaccatctgccacaaacagaattcgagacatacttaattttgaatttctccttgccacgttaataaagccaaaagcagcgggtgctattcgtggcaacacacttcactgaacccacttgcttccaaaacgatgccagcccgaggcactgctacgccagcagctgccacatgggatggtggctcaggcgctccctccaggattctgcccctgcctgtccacagactcctttgtgctggaacctgggctcctccagctgccaggcaggagtcggtaggactgtgcctgtgcctccctcagcggggccctgggcggggttccaaggcctgcgagctgggaaaggacagatgaggggacctcgtgccttcttgctgtcatgcaatgaccccgccttatgttgccgaaataagcaactcttaggtttgcctgactgccttatgctggtaaagaaaagggattcaactgtctcttttccaaataaaaaaaaagtcaaaatttcaagtgt

SEQ ID NO: 28774 - DNA, 1656 bp, Homo sapiens
  source 1..1656: mol_type = unassigned DNA
ccagctgtttggaactgagctactgcagaaagggaagtggagagtaagggccaggccccgtgggggcagatggccggcagaaggctgaatctgcgctgggcactgagtgtgctttgtgtgctgctaatggcggagacagtgtctgggactaggggctcgtctacaggagctcacattagcccccagtttccagcttcaggtgtgaaccagacccccgtggtagactgccgcaaggtgtgtggcctgaatgtctctgaccgctgtgacttcatccggaccaaccctgactgccacagtgatggggggtacctggactacctggaaggcatcttctgccacttccctcccagcctcctccctctggctgtcactctctacgtttcctggctgctctacctgtttctgattctgggagtcaccgcagccaagtttttctgccccaacttgtcggccatttctaccacactgaagctctcccacaacgtggcaggcgtcaccttcctggcatttgggaatggtgcacctgacatcttcagtgccctggtggccttctctgacccgcacacagccggcctggcccttggggcactgtttggttacctgggcttgtatgtgttctatgtggtcactgtgattctctgcacctggatctaccaacggcaacggagaggatctctgttctgccccatgccagttactccagagatcctctcagactccgaggaggaccgggtatcttctaataccaacagctatgactacggtgatgagtaccggccgctgttcttctaccaggagaccacggctcagatcctggtccgggccctcaatcccctggattacatgaagtggagaaggaaatcagcatactggaaagccctcaaggtgttcaagctgcctgtggagttcctgctgctcctcacagtccccgtcgtggacccggacaaggatgaccagaactggaaacggcccctcaactgtctgcatctggttatcagccccctggttgtggtcctgaccctgcagtcggggacctatggtgtctatgagataggcggcctcgttcccgtctgggtcgtggtggtgatcgcaggcacagccttggcttcagtgaccttttttgccacatctgacagccagccccccaggcttcactggctctttgctttcctgggctttctgaccagcgccctgtggatcaacgcggccgccacagaggtggtgaacatcttgcggtccctgggtgtggtcttccggctgagcaacactgtgctggggctcacgctgctggcctgggggaacagcattggagatgccttctcggatttcacactggctcgccagggctacccacggatggcgttctccgcctgctttggcggcatcatcttcaacatcctcgtgggtgtggggctgggctgcctgctccagatctcccgaagccacacagaagtgaagctggagccagacggactgctggtgtgggtcctggcaggcgccctggggctcagcctcgtcttctccctggtctcagtcccattgcagtgcttccagctcagcagagtctatggcttctgcctgctcctcttctacctgaacttccttgtcgtggccctcctcactgaatttggagtgattcacctgaaaagcatgtga

SEQ ID NO: 28775 - DNA, 996 bp, Homo sapiens
  source 1..996: mol_type = unassigned DNA
agcaggcggggcacccggactggcggcttcgctggcgcaaggtcggtccggcggccagggacctggaaggctgcgaggccctgcgaggtcgaggttcggagtttgctggtcccaggcccggcccgaggtcggcgaccatccgagcgctgggcatcggcccacgcgtacagaaggcgctcaataaatgctcactagtgaatcagtaaaataaatcggcagcaaagagagacgagacgcatgctgatcttcaggtgttggggacatcagggacgcgaacatttattgagctcttattgtataccgcgtcggccagcatttgtgtccatttcacacatgaggaataagaggcccagagaggtgaagtgacttccttaaggccacacagatagtaagtggccgagacgaatttgaaaccaggggtgtcctgtttgaacttggtgccaaatagagtaactcggactccagttggaggggttcgggagaaccatagaagaggaagggccgtgtcttccgtggacaggccaccggagccgccagctgtttggaactgagctactgcagaaagggaagtggagagtaagggccaggccccgtgggggcagatggccggcagaaggctgaatctgcgctgggcactgagtgtgctttgtgtgctgctaatggcggagacagtgtctgggactaggggctcgtctacaggagctcacattagcccccagtttccagcttcaggtgtgaaccagacccccgtggtagactgccgcaaggtgtgtggcctgaatgtctctgaccgctgtgacttcatccggaccaaccctgactgccacagtgatggggggtacctggactacctggaaggcatcttctgccacttccctcccagcctcctccctctggctgtcactctctacgtttcctggctgctctacctgtttctgattctgggagtcaccgcagccaagtttttctgccccaacttgtcggccatttctacca

SEQ ID NO: 28776 - DNA, 925 bp, Homo sapiens
  source 1..925: mol_type = unassigned DNA
agagtaggggcccggacgctgcagcaggcggggcacccggactggcggcttcgctggcgcaaggtcggtccggcggccagggacctggaaggctgcgaggccctgcgaggtcgaggttcggagtttgctggtcccaggcccggcccgaggccaccggagccgccagctgtttggaactgagctactgcagaaagggaagtggagagtaagggccaggccccgtgggggcagatggccggcagaaggctgaatctgcgctgggcactgagtgtgctttgtgtgctgctaatggcggagacagtgtctgggactaggggctcgtctacaggagctcacattagcccccagtttccagcttcaggtgtgaaccagacccccgtggtagactgccgcaaggtgtgtggcctgaatgtctctgaccgctgtgacttcatccggaccaaccctgactgccacagtgatggggggtacctggactacctggaaggcatcttctgccacttccctcccagcctcctccctctggctgtcactctctacgtttcctggctgctctacctgtttctgattctgggagtcaccgcagccaagtttttctgccccaacttgtcggccatttctaccacactgaagctctcccacaacgtggcaggcgtcaccttcctggcatttgggaatggtgcacctgacatcttcagtgccctggtggccttctctgacccgcacacagccggcctggcccttggggcactgtttggcgctggcgtgctggttaccacagtggtggccggaggcattaccatcctacaccccttcatggctgcctccaggcccttcttcagggacatcgttttctacatggtggctgtgttcctgaccttcctcatgctcttccgtggcagggtcaccctggcatgggctctgg

SEQ ID NO: 28777 - DNA, 555 bp, Homo sapiens
  source 1..555: mol_type = unassigned DNA
aagacaagggaggagcagagccctagcaggatactaaatgggtctatgtgactttagggaccctctgcttttggactagcctggaacccaggttcagtcctgctgacctggcactggaagggaggcagggtgctggcacccacgagcaagccacagccaagcaggccaccggagccgccagctgtttggaactgagctactgcagaaagggaagtggagagtaagggccaggccccgtgggggcagatggccggcagaaggctgaatctgcgctgggcactgagtgtgctttgtgtgctgctaatggcggagacagtgtctgggactaggggctcgtctacaggagctcacattagcccccagtttccagcttcaggtgtgaaccagacccccgtggtagactgccgcaaggtgtgtggcctgaatgtctctgaccgctgtgacttcatccggaccaaccctgactgccacagtgatggggggtacctggactacctggaaggcatcttctgccacttccctcccagcctcctccctctggctgtcactctctac

SEQ ID NO: 28778 - DNA, 3289 bp, Homo sapiens
  source 1..3289: mol_type = unassigned DNA
cgaggttcggagtttgctggtcccaggcccggcccgagcaggtcggcgaccatccgagcgctgggcatcggcccacgcgtacagaaggcgctcaataaatgctcactagtgaatcagtaaaataaatcggcagcaaagagagacgagacgcatgctgatcttcaggtgttggggacatcagggacgcgaacatttattgagctcttattgtataccgcgtcggccagcatttgtgtccatttcacacatgaggaataagaggcccagagaggtgaagtgacttccttaaggccacacagatagtaagtggccgagacgaatttgaaaccaggggtgtcctgtttgaacttggtgccaaatagagtaactcggactccagttggaggggttcgggagaaccatagaagaggaagggccgtgtcttccgtggacaggccaccggagccgccagctgtttggaactgagctactgcagaaagggaagtggagagtaagggccaggccccgtgggggcagatggccggcagaaggctgaatctgcgctgggcactgagtgtgctttgtgtgctgctaatggcggagacagtgtctgggactaggggctcgtctacaggagctcacattagcccccagtttccagcttcaggtgtgaaccagacccccgtggtagactgccgcaaggtgtgtggcctgaatgtctctgaccgctgtgacttcatccggaccaaccctgactgccacagtgatggggggtacctggactacctggaaggcatcttctgccacttccctcccagcctcctccctctggctgtcactctctacgtttcctggctgctctacctgtttctgattctgggagtcaccgcagccaagtttttctgccccaacttgtcggccatttctaccacactgaagctctcccacaacgtggcaggcgtcaccttcctggcatttgggaatggtgcacctgacatcttcagtgccctggtggccttctctgacccgcacacagccggcctggcccttggggcactgtttggcgctggcgtgctggttaccacagtggtggccggaggcattaccatcctacaccccttcatggctgcctccaggcccttcttcagggacatcgttttctacatggtggctgtgttcctgaccttcctcatgctcttccgtggcagggtcaccctggcatgggctctgggttacctgggcttgtatgtgttctatgtggtcactgtgattctctgcacctggatctaccaacggcaacggagaggatctctgttctgccccatgccagttactccagagatcctctcagactccgaggaggaccgggtatcttctaataccaacagctatgactacggtgatgagtaccggccgctgttcttctaccaggagaccacggctcagatcctggtccgggccctcaatcccctggattacatgaagtggagaaggaaatcagcatactggaaagccctcaaggtgttcaagctgcctgtggagttcctgctgctcctcacagtccccgtcgtggacccggacaaggatgaccagaactggaaacggcccctcaactgtctgcatctggttatcagccccctggttgtggtcctgaccctgcagtcggggacctatggtgtctatgagataggcggcctcgttcccgtctgggtcgtggtggtgatcgcaggcacagccttggcttcagtgaccttttttgccacatctgacagccagccccccaggcttcactggctctttgctttcctgggctttctgaccagcgccctgtggatcaacgcggccgccacagaggtggtgaacatcttgcggtccctgggtgtggtcttccggctgagcaacactgtgctggggctcacgctgctggcctgggggaacagcattggagatgccttctcggatttcacactggctcgccagggctacccacggatggcgttctccgcctgctttggcggcatcatcttcaacatcctcgtgggtgtggggctgggctgcctgctccagatctcccgaagccacacagaagtgaagctggagccagacggactgctggtgtgggtcctggcaggcgccctggggctcagcctcgtcttctccctggtctcagtcccattgcagtgcttccagctcagcagagtctatggcttctgcctgctcctcttctacctgaacttccttgtcgtggccctcctcactgaatttggagtgattcacctgaaaagcatgtgactgaagccgcttagtgctgtggcctcactgcaggcaggagccccgcccctcctgccgggggaggcccagggaccggagcatttctgcaaggcccttgtgggcacgagagtgcggcccttgctgctggagatctgaggtcactgctgtgagctgggagaactgctgtgtacctcttgctgccagcacccaacagccttgccgtggggaccttggaaacctggctttgctctggacaaagggttccagagagaagctagaagtcccccttgaatgacccccagagcccctctgagaagggctggagtttgggggaaggggatggctggatgtgctccaggccatgctggaggtacccccgaggcacaggcactgcccgttccccttgcctgggcttcaggccttctggcaccttctcaggacacaagtggctgcccaaccctgactcagagaatgagggtggcttggacccctgggaatcaggccgccgagggctgagctccagagccgcaccatctgccacaaacagaattcgagacatacttaattttgaatttctccttgccacgttaataaagccaaaagcagcgggtgctattcgtggcaacacacttcactgaacccacttgcttccaaaacgatgccagcccgaggcactgctacgccagcagctgccacatgggatggtggctcaggcgctccctccaggattctgcccctgcctgtccacagactcctttgtgctggaacctgggctcctccagctgccaggcaggagtcggtaggactgtgcctgtgcctccctcagcggggccctgggcggggttccaaggcctgcgagctgggaaaggacagatgaggggacctcgtgccttcttgctgtcatgcaatgaccccgccttatgttgccgaaataagcaactcttaggtttgcctgactgccttatgctggtaaagaaaagggattcaactgtctcttttccaaataaaaaaaaagtcaaaatttcaagtgtagagaaaa

SEQ ID NO: 28779 - DNA, 1879 bp, Homo sapiens
  source 1..1879: mol_type = unassigned DNA
atcgaagcggggccgaggccggaagcagccccgggcggaagccctaccgtgccaactgggccctcctcccgacctgccccgggctcgtgccccgcccacccaaaagtgggtgaaaggtcggcggcgccggcactgcagctggggctgagaagccaggacggcccgagaactgacagacggagtgacagacggactgaccatggccgaccagccaaaacccatcagcccgctcaagaacctgctggccggcggctttggcggcgtgtgcctggtgttcgtcggtcaccctctggacacggtcaaggtccgactgcagacacagccaccgagtttgcctggacaacctcccatgtactctgggacctttgactgtttccggaagactctttttagagagggcatcacggggctatatcggggaatggctgcccctatcatcggggtcactcccatgtttgccgtgtgcttctttgggtttggtttggggaagaaactacaacagaaacacccagaagatgtgctcagctatccccagctttttgcagctgggatgttatctggcgtattcaccacaggaatcatgactcctggagaacggatcaagtgcttattacagattcaggcttcttcaggagaaagcaagtacactggtaccttggactgtgcaaagaagctgtaccaggagtttgggatccgaggcatctacaaagggactgtgcttacccttatgcgagatgtcccagctagtggaatgtatttcatgacatatgaatggctgaaaaatatcttcactccggagggaaagagggtcagtgagctcagtgcccctcggatcttggtggctgggggcattgcagggatcttcaactgggctgtggcaatccccccagatgtgctcaagtctcgattccagactgcacctcctgggaaatatcctaatggtttcagagatgtgctgagggagctgatccgggatgaaggagtcacatccttgtacaaagggttcaatgcagtgatgatccgagccttcccagccaatgcggcctgtttccttggctttgaagttgccatgaagttccttaattgggccacccccaacttgtgaggctgaaggctgctcaagttcacttctggatgctggaagctgtcgttgaggagaaggagtagtaagcagaactaagcagtcttggagggcaaggggaggggaatggtgagatccgagccctgtgcatggacttggtgagactgttgccttaatgacatcctgcaccgtgtataacttagtgtgtcattttgaaacttgaattcattcttatcaatttaagggatcttaaaaggatttggaaatggaacaagtagcttccagaccagatactacctgtggcaagaatgctgcctaccagttaactgctggtcctaccacagtcaaagtattcctcattaaagagagaatctcaggttctcactggaggcactgtgcatattttcaaccagatcaccaggagctgagatcttcttcagtccctagccaggaatacccatttgatttccagggtgccatctaatcctgggctgtacatgtggatatggacttgaggcccacctctgtgtccaagtggattgagcatatatgcctaggaggagatagactgttaatcgttggattttgattttttttttttatgcctgcaaataatcaaaagtaaaactggagtagcctaattttctgggagcaggtggagaactttccctcctacacagtgaggacagtcccagtctgctgggataagtgagaaagcccagggtgtaggaaggccctttttacatactcttttctcatgagagctcactattttaacaataaacaataaacgttgtt

SEQ ID NO: 28780 - DNA, 1383 bp, Homo sapiens
  source 1..1383: mol_type = unassigned DNA
aaaagtgggtgaaaggtcggcggcgccggcactgcagctggggctgagaagccaggacggcccgagaactgacagacggagtgacagacggactgaccatggccgaccagccaaaacccatcagcccgctcaagaacctgctggccggcggctttggcggcgtgtgcctggtgttcgtcggtcaccctctggacacggtcaaggggaggttatgcctgactatgggagatctgaaggacaatatgagggattttggatgtaaaggtccgactgcagacacagccaccgagtttgcctggacaacctcccatgtactctgggacctttgactgtttccggaagactctttttagagagggcatcacggggctatatcggggaatggctgcccctatcatcggggtcactcccatgtttgccgtgtgcttctttgggtttggtttggggaagaaactacaacagaaacacccagaagatgtgctcagctatccccagctttttgcagctgggatgttatctggcgtattcaccacaggaatcatgactcctggagaacggatcaagtgcttattacagattcaggcttcttcaggagaaagcaagtacactggtaccttggactgtgcaaagaagctgtaccaggagtttgggatccgaggcatctacaaagggactgtgcttacccttatgcgagatgtcccagctagtggaatgtatttcatgacatatgaatggctgaaaaatatcttcactccggagggaaagagggtcagtgagctcagtgcccctcggatcttggtggctgggggcattgcagggatcttcaactgggctgtggcaatccccccagatgtgctcaagtctcgattccagactgcacctcctgggaaatatcctaatggtttcagagatgtgctgagggagctgatccgggatgaaggagtcacatccttgtacaaagggttcaatgcagtgatgatccgagccttcccagccaatgcggcctgtttccttggctttgaagttgccatgaagttccttaattgggccacccccaacttgtgaggctgaaggctgctcaagttcacttctggatgctggaagctgtcgttgaggagaaggagtagtaagcagaactaagcagtcttggagggcaaggggaggggaatggtgagatccgagccctgtgcatggacttggtgagactgttgccttaatgacatcctgcaccgtgtataacttagtgtgtcattttgaaacttgaattcattcttatcaatttaagggatcttaaaaggatttggaaatggaacaagtagcttccagaccagatactacctgtggcaagaatgctgcctaccagttaactgctggtcctaccac

SEQ ID NO: 28781 - DNA, 2131 bp, Homo sapiens
  source 1..2131: mol_type = unassigned DNA
gagactcctgcaggttcgagaaagcatgacatgctcccagaatcctggatttggacttcattctggacagcatatgacaaggacgaggacccctattctagccagttaaagctggacagaatttttaaaagcaatgaagccagttccttggatatatccacgggctttgctttgagaaggaactgagtaggcagtgagaagagtcgagtgaagcctggcccgtgagtgcctcaacaactgagatgaacgtcgactcgcttgcaggcaagttgtcactcagcagcgatctgaactatatcctgggttccagaaaaggcagaggttcttaccgaaagcaggggaggaagccgcagcccaaggaggtcgtcacttgccgggaaggtggctcgggccaggctgcactcaaaacccgtgctctgtccacactgctacggggccagagccaaggaagcttccacttcttcccccagacagccccaacagcggctaccccaaggagccagcagccttgtgtcctgggatccccagcccctgcagaatgacccaccaggatctgagcatcacagccaaactcatcaatggaggtgtagcagggctcgtgggggtgacctgcgtgttccccatcgacttggccaagactcgcctgcagaaccagcatgggaaagccatgtacaaaggaatgatcgactgcctgatgaagacggctcgggcggagggcttcttcggcatgtaccgaggggctgcagtgaacctcactctggtcactccagagaaggccatcaagctggcggccaacgactttttccggcggctgctcatggaagatgggatgcagcggaacctgaagatggagatgcttgccgggtgtggggctgggatgtgccaggtcgtggtgacctgtcccatggaaatgctcaagattcagctgcaggatgctggacgcctggccgtccatcatcagggctcggcctcagcaccctccacctccaggtcctacacaactggttcggcttccacccacaggcgcccctctgccaccctcattgcctgggagctgctccgcactcagggcctggctgggctctacaggggcctgggtgccactctcctcagagacattcctttctccatcatctacttcccactgtttgccaaccttaacaacctggggttcaacgagctcgccggtaaggcgtcctttgcacattccttcgtgtcaggctgtgtggcaggttccatagctgcggtcgcagtgacgcctctagatgttctgaaaactcgaatccaaaccctcaagaaaggcctgggcgaggacatgtacagtgggatcaccgactgtgccaggaaactctggattcaggagggaccatctgccttcatgaaaggcgctggctgccgggcactggtcatagcacctctctttgggattgctcaaggggtctattttattgggattggagagcgcatcttaaagtgttttgactagacagagctggaggtcaagtccctgcgcttgccgccctctctctagctgtttcacttagcctagagggggcaagggcaggtggggccactctggcctgcctggtcctctgcgttgtagtgctacctcaatctcgggagaaacagccctatattctaacaagttgagcacagccttcttccccttcgtgtctacactcgttttcctttgtgggcacagctaccaggggcttttggaagcccctaaccacctacttttcaacaaaaatggtactttcgttgtattaattgcaggaccttaacaggtagtcacaatagaagggttgtttctgtattttaacatttctatttcacagtcaaactcggcattcttcagtcagcttgaggatttagcattgttaatcttggactccataacttatgagtcctagcactgattttgaggaaaaggaggatcagaagttcaagggaccgtgaaagccctcagagtcagcacctagtttgagaccaagcaccctttcgaatccctggatggctgagggggctgaggccggctctgactgggcagctcagcccctcccccagagcccagggtcttgcacacccctccctgtaaccaaggaacactctgaaataaaggtgaatggct

SEQ ID NO: 28782 - DNA, 2057 bp, Homo sapiens
  source 1..2057: mol_type = unassigned DNA
aggttcgagaaagcatgacatgctcccagaatcctggatttggacttcattctggacagcatatgacaaggacgaggacccctattctagccagttaaagctggacagaatttttaaaagcaatgaagccagttccttggatatatccacgggctttgctttgagaaggaactgagtaggcagtgagaagagtcgagtgaagcctggcccgtgagtgcctcaacaactgagatgaacgtcgactcgcttgcaggcaagttgtcagggaggaagccgcagcccaaggaggtcgtcacttgccgggaaggtggctcgggccaggctgcactcaaaacccgtgctctgtccacactgctacggggccagagccaaggaagcttccacttcttcccccagacagccccaacagcggctaccccaaggagccagcagccttgtgtcctgggatccccagcccctgcagaatgacccaccaggatctgagcatcacagccaaactcatcaatggaggtgtagcagggctcgtgggggtgacctgcgtgttccccatcgacttggccaagactcgcctgcagaaccagcatgggaaagccatgtacaaaggaatgatcgactgcctgatgaagacggctcgggcggagggcttcttcggcatgtaccgaggggctgcagtgaacctcactctggtcactccagagaaggccatcaagctggcggccaacgactttttccggcggctgctcatggaagatgggatgcagcggaacctgaagatggagatgcttgccgggtgtggggctgggatgtgccaggtcgtggtgacctgtcccatggaaatgctcaagattcagctgcaggatgctggacgcctggccgtccatcatcagggctcggcctcagcaccctccacctccaggtcctacacaactggttcggcttccacccacaggcgcccctctgccaccctcattgcctgggagctgctccgcactcagggcctggctgggctctacaggggcctgggtgccactctcctcagagacattcctttctccatcatctacttcccactgtttgccaaccttaacaacctggggttcaacgagctcgccggtaaggcgtcctttgcacattccttcgtgtcaggctgtgtggcaggttccatagctgcggtcgcagtgacgcctctagatgttctgaaaactcgaatccaaaccctcaagaaaggcctgggcgaggacatgtacagtgggatcaccgactgtgccaggaaactctggattcaggagggaccatctgccttcatgaaaggcgctggctgccgggcactggtcatagcacctctctttgggattgctcaaggggtctattttattgggattggagagcgcatcttaaagtgttttgactagacagagctggaggtcaagtccctgcgcttgccgccctctctctagctgtttcacttagcctagagggggcaagggcaggtggggccactctggcctgcctggtcctctgcgttgtagtgctacctcaatctcgggagaaacagccctatattctaacaagttgagcacagccttcttccccttcgtgtctacactcgttttcctttgtgggcacagctaccaggggcttttggaagcccctaaccacctacttttcaacaaaaatggtactttcgttgtattaattgcaggaccttaacaggtagtcacaatagaagggttgtttctgtattttaacatttctatttcacagtcaaactcggcattcttcagtcagcttgaggatttagcattgttaatcttggactccataacttatgagtcctagcactgattttgaggaaaaggaggatcagaagttcaagggaccgtgaaagccctcagagtcagcacctagtttgagaccaagcaccctttcgaatccctggatggctgagggggctgaggccggctctgactgggcagctcagcccctcccccagagcccagggtcttgcacacccctccctgtaaccaaggaacactctgaaataaaggtgaatggct

SEQ ID NO: 28783 - DNA, 2429 bp, Homo sapiens
  source 1..2429: mol_type = unassigned DNA
gagcacagcatggcggtcaaggtgcagacaactaagcgaggggatcctcatgagttaagaaacatatttctacagtatgccagtactgaggttgatggagagcgttatatgaccccagaagactttgttcagcgctatcttggactgtataatgatccaaatagtaacccaaagatcgtgcagctcttggcaggagtagctgatcaaaccaaggatggaaaatgtcaaagaaatttttggacagactattattcatcatcatatcccttttaactgggattgtgaatttatccgactgcattttgggcataaccggaagaagcatcttaactacacagaattcacgcagtttctccaggagctgcaattggaacatgcaagacaagcctttgcactcaaagacaaaagcaaaagtggcatgatttctggtctggatttcagtgacatcatggttaccattagatctcacatgcttactccttttgtggaggagaacttagtttcagcagctggaggaagtatctcacaccaggttagcttctcctacttcaatgcatttaactcgttactgaataacatggagcttgttcgtaagatatatagcactctagctggcacaaggaaagatgttgaagtcacaaaggaggaatttgcccagagtgccatacgctatggacaagtcacaccactagaaattgatattctatatcagcttgcagacttatataatgcttcagggcgcttgactttggcagatattgagagaatagccccattggctgagggggccttaccttacaacctggcagaacttcagagacagcagtctcctgggttaggcaggcctatctggctccagattgccgagtctgcttacagattcactctgggctcagttgctggagctgtgggagccactgcagtgtatcctatagatctggtgaagacccgaatgcaaaaccagcgtggctctggctctgttgttggggagctaatgtacaaaaacagctttgactgttttaagaaagtcttgcgttatgagggcttctttggactctacaggggtctgataccacaacttataggggttgctccagaaaaggccattaaactgactgttaatgattttgttcgggacaaatttaccagaagagatggctctgttccacttccagcagaagttcttgctggaggctgtgctggaggctctcaggtcatttttaccaacccattggagatagtgaagattcgtctgcaagtagctggagagatcaccacgggacccagagtcagcgccctgaatgtgctccgggacttgggaatttttggtctgtataagggtgccaaagcgtgtttcctccgagacattcccttctctgcaatctattttcctgtttatgctcattgcaaactacttctggctgatgaaaatggacacgtgggaggtttaaatcttcttgcagctggagccatggcaggtgtcccagctgcatctctggtgacccctgctgatgtcatcaagacaagactgcaggtggctgcccgcgctggccagacgacatacagtggtgtcatcgactgtttcaggaagattctccgggaagaagggccctcagcattttggaaagggactgcagctcgagtgtttcgatcctctccccagtttggtgttaccttggtcacttatgaacttctccagcggtggttttacattgattttggaggcctcaaacccgctggttcagaaccaacacctaagtcacgcattgcagaccttcctcctgccaaccctgatcacatcggtggatacagactcgccacagccacgtttgcaggcatcgaaaacaaatttggcctttatctcccgaaatttaagtctcctagtgttgctgtggttcagccaaaggcagcagtggcagccactcagtgatgagacaactgttgagtgtggcaaaatggcgccttgaagaaagaggcctaggagagcagccctgtaatgtatccagtcagctgcatggtactgactgagctgaggagtcaaactcttctttctgtatgacatatacatatacttgtttataaaataatcatttgcccagggaaaaaaccacaacgctgtttcaagctttagtcttatgtgttgaaatgtttttgtaagccttggcatgaattagtgttctagactctgctttgcacagcttgcacttacagtgattgtacatattgtacatctttgtacagagacatcttggcacctcatcccaacaaatcacatttgtagaaatgtaatgcggttctgagtggcttgaaatgtacagaatgttttgaaagtgttttattaagaatcacacaaaaataaatgtattaaaattaaattcattctcttattggtgacttatggaaataaagcatcaatattggatgtattt

SEQ ID NO: 28784 - DNA, 2979 bp, Homo sapiens
  source 1..2979: mol_type = unassigned DNA
gctcgctcactcgctcgtccccggcttccgagcacagcatggcggtcaaggtgcagacaactaagcgaggggatcctcatgagttaagaaacatatttctacagtatgccagtactgaggttgatggagagcgttatatgaccccagaagactttgttcagcgctatcttggactgtataatgatccaaatagtaacccaaagatcgtgcagctcttggcaggagtagctgatcaaaccaaggatgggttgatctcctatcaagagtttttggcatttgaatctgttttatgtgctccagattccatgttcatagtggctttccagttgtttgacaagagtggaaatggagaggtgacatttgaaaatgtcaaagaaatttttggacagactattattcatcatcatatcccttttaactgggattgtgaatttatccgactgcattttgggcataaccggaagaagcatcttaactacacagaattcacgcagtttctccaggagctgcaattggaacatgcaagacaagcctttgcactcaaagacaaaagcaaaagtggcatgatttctggtctggatttcagtgacatcatggttaccattagatctcacatgcttactccttttgtggaggagaacttagtttcagcagctggaggaagtatctcacaccaggttagcttctcctacttcaatgcatttaactcgttactgaataacatggagcttgttcgtaagatatatagcactctagctggcacaaggaaagatgttgaagtcacaaaggaggaatttgcccagagtgccatacgctatggacaagtcacaccactagaaattgatattctatatcagcttgcagacttatataatgcttcagggcgcttgactttggcagatattgagagaatagccccattggctgagggggccttaccttacaacctggcagaacttcagagacagcagtctcctgggttaggcaggcctatctggctccagattgccgagtctgcttacagattcactctgggctcagttgctggagctgtgggagccactgcagtgtatcctatagatctggtgaagacccgaatgcaaaaccagcgtggctctggctctgttgttggggagctaatgtacaaaaacagctttgactgttttaagaaagtcttgcgttatgagggcttctttggactctacaggggtctgataccacaacttataggggttgctccagaaaaggccattaaactgactgttaatgattttgttcgggacaaatttaccagaagagatggctctgttccacttccagcagaagttcttgctggaggctgtgctggaggctctcaggtcatttttaccaacccattggagatagtgaagattcgtctgcaagtagctggagagatcaccacgggacccagagtcagcgccctgaatgtgctccgggacttgggaatttttggtctgtataagggtgccaaagcgtgtttcctccgagacattcccttctctgcaatctattttcctgtttatgctcattgcaaactacttctggctgatgaaaatggacacgtgggaggtttaaatcttcttgcagctggagccatggcaggtgtcccagctgcatctctggtgacccctgctgatgtcatcaagacaagactgcaggtggctgcccgcgctggccagacgacatacagtggtgtcatcgactgtttcaggaagattctccgggaagaagggccctcagcattttggaaagggactgcagctcgagtgtttcgatcctctccccagtttggtgttaccttggtcacttatgaacttctccagcggtggttttacattgattttggaggcctcaaacccgctggttcagaaccaacacctaagtcacgcattgcagaccttcctcctgccaaccctgatcacatcggtggatacagactcgccacagccacgtttgcaggcatcgaaaacaaatttggcctttatctcccgaaatttaagtctcctagtgttgctgtggttcagccaaaggcagcagtggcagccactcagtgatgagacaactgttgagtgtggcaaaatggcgccttgaagaaagaggcctaggagagcagccctgtaatgtatccagtcagctgcatggtactgactgagctgaggagtcaaactcttctttctgtatgacatatacatatacttgtttataaaataatcatttgcccagggaaaaaaccacaacgctgtttcaagctttagtcttatgtgttgaaatgtttttgtaagccttggcatgaattagtgttctagactctgctttgcacagcttgcacttacagtgattgtacatattgtacatctttgtacagagacatcttggcacctcatcccaacaaatcacatttgtagaaatgtaatgcggttctgagtggcttgaaatgtacagaatgttttgaaagtgttttattaagaatcacacaaaaataaatgtattaaaattaaattcattctcttattggtgacttatggaaataaagcatcaatattggatgtatttaattcctagtttgttttccattctggaataaaaaggtatttgctgataaaaggcataacgagacatagtgctgctaccactgaataagtgatactttggaaagatgcatgccagtggatgccagaggaccaggctaatgacttgtgtgtgctgatgtgtttccatttgtatttaatgtgtgtagaccctcctctgttcatcaatcaaaaagcatttcctaggcagctcctcgcctgtcagtgtgcatatggaaacagggacatctccatcattactggcttagttttgctttcctttgacacagtaaggcaaaggccaagctttcaaaagagtaaaggatactttcacaatttcccttcatatggatatgattccagtcaaaaataaaatgcacaccaaaatgta

SEQ ID NO: 28785 - DNA, 1616 bp, Homo sapiens
  source 1..1616: mol_type = unassigned DNA
ctggttcccggcctgggaggggcttaacggtcctctggtctctctctcccctcagctgagtcccttccctgtctttcactcttctggcatcggtggttttacttcttcgattgaaccctgcttcctcgacccccctgggaggccgccttcttcaggcgcctcccttctctccacgagctcgctctgacagctgaggaactggcaagatcctgctacccagagggtgaatgggtatctttcccggaataatcctaatttttctaagggtgaagtttgcaacggcggccgtgattgtaagcggacaccagaaaagtaccactgtaagtcatgagatgtctggtctgaattggaaaccctttgtatatggcggccttgcctctatcgtggctgagtttgggactttccctgtggaccttaccaaaacacgacttcaggttcaaggccaaagcattgatgcccgtttcaaagagataaaatatagagggatgttccatgcgctgtttcgcatctgtaaagaggaaggtgtattggctctctattcaggaattgctcctgcgttgctaagacaagcatcatatggcaccattaaaattgggatttaccaaagcttgaagcgcttattcgtagaacgtttagaagatgaaactcttttaattaatatgatctgtggggtagtgtcaggagtgatatcttccactatagccaatcccaccgatgttctaaagattcgaatgcaggctcaaggaagcttgttccaagggagcatgattggaagctttatcgatatataccaacaagaaggcaccaggggtctgtggaggggtgtggttccaactgctcagcgtgctgccatcgttgtaggagtagagctaccagtctatgatattactaagaagcatttaatattgtcaggaatgatgggcgatacaattttaactcacttcgtttccagctttacatgtggtttggctggggctctggcctccaacccggttgatgtggttcgaactcgcatgatgaaccagagggcaatcgtgggacatgtggatctctataagggcactgttgatggtattttaaagatgtggaaacatgagggcttttttgcactctataaaggattttggccaaactggcttcggcttggaccctggaacatcattttttttattacatacgagcagctaaagaggcttcaaatctaagaactgaattatatgtgagcccagccctgccagcctttctactcctttgcccttttcccgtgttctaatgtattttgacaatgttgtaagtgtttaccaagccgttggtctcctaagggcctcctgatggaagaacagtggggtggttcaaagttatttctatgtttgtgttaccatgttaacttttccccgagagaaagtgttaacattgagactctggccccagattggtatcttctatgaagatggatactgatgggtgacattgaaaacggcctgctttccaaatgtggttaaatgtaattggttagccccagacttgggctagagcagaaggcataggccagggtggttattgctatatgtgttacagacctcggttctcattaaagtatttattggcagaatcac

SEQ ID NO: 28786 - DNA, 1062 bp, Homo sapiens
  source 1..1062: mol_type = unassigned DNA
atgggtatctttcccggaataatcctaatttttctaagggtgaagtttgcaacggcggccgtgattcaccagaaaagtaccactgtaagtcatgagatgtctggtctgaattggaaaccctttgtatatggcggccttgcctctatcgtggctgagtttgggactttccctgtggaccttaccaaaacacgacttcaggttcaaggccaaagcattgatgcccgtttcaaagagataaaatatagagggatgttccatgcgctgtttcgcatctgtaaagaggaaggtgtattggctctctattcaggaattgctcctgcgttgctaagacaagcatcatatggcaccattaaaattgggatttaccaaagcttgaagcgcttattcgtagaacgtttagaagatgaaactcttttaattaatatgatctgtggggtagtgtcaggagtgatatcttccactatagccaatcccaccgatgttctaaagattcgaatgcaggctcaaggaagcttgttccaagggagcatgattggaagctttatcgatatataccaacaagaaggcaccaggggtctgtggaggtgcttatgttcaaaagctgttaccggctgtgtgctgtggctcatgcctgtaatcccagcactttgggaggccaacgcgggtggatcacttgagggtgtggttccaactgctcagcgtgctgccatcgttgtaggagtagagctaccagtctatgatattactaagaagcatttaatattgtcaggaatgatgggcgatacaattttaactcacttcgtttccagctttacatgtggtttggctggggctctggcctccaacccggttgatgtggttcgaactcgcatgatgaaccagagggcaatcgtgggacatgtggatctctataagggcactgttgatggtattttaaagatgtggaaacatgagggcttttttgcactctataaaggattttggccaaactggcttcggcttggaccctggaacatcattttttttattacatacgagcagctaaagaggcttcaaatctaa

SEQ ID NO: 28787 - DNA, 969 bp, Homo sapiens
  source 1..969: mol_type = unassigned DNA
atgggtatctttcccggaataatcctaatttttctaagggtgaagtttgcaacggcggccgtgattcaccagaaaagtaccactgtaagtcatgagatgtctggtctgaattggaaaccctttgtatatggcggccttgcctctatcgtggctgagtttgggactttccctgtggaccttaccaaaacacgacttcaggttcaaggccaaagcattgatgcccgtttcaaagagataaaatatagagggatgttccatgcgctgtttcgcatctgtaaagaggaaggtgtattggctctctattcaggaattgctcctgcgttgctaagacaagcatcatatggcaccattaaaattgggatttaccaaagcttgaagcgcttattcgtagaacgtttagaagatgaaactcttttaattaatatgatctgtggggtagtgtcaggagtgatatcttccactatagccaatcccaccgatgttctaaagattcgaatgcaggctcaaggaagcttgttccaagggagcatgattggaagctttatcgatatataccaacaagaaggcaccaggggtctgtggaggggtgtggttccaactgctcagcgtgctgccatcgttgtaggagtagagctaccagtctatgatattactaagaagcatttaatattgtcaggaatgatgggcgatacaattttaactcacttcgtttccagctttacatgtggtttggctggggctctggcctccaacccggttgatgtggttcgaactcgcatgatgaaccagagggcaatcgtgggacatgtggatctctataagggcactgttgatggtattttaaagatgtggaaacatgagggcttttttgcactctataaaggattttggccaaactggcttcggcttggaccctggaacatcattttttttattacatacgagcagctaaagaggcttcaaatctaa

SEQ ID NO: 28788 - DNA, 831 bp, Homo sapiens
  source 1..831: mol_type = unassigned DNA
cgctgcagtggcgtttccgactgtgggagcctcagcttcccagtcgtccgatgagcccgagcagctgagtcccttccctgtctttcactcttctggcatcggtggttttacttcttcgattgaaccctgcttcctcgacccccctgggaggccgccttcttcaggcgcctcccttctctccacgagctcgctctgacagctgaggaactggcaagatcctgctacccagagggtgaatgggtatctttcccggaataatcctaatttttctaagggtgaagtttgcaacggcggccgtgattgtaagcggacaccagaaaagtaccactgtaagtcatgagatgtctggtctgaattggaaaccctttgtatatggcggccttgcctctatcgtggctgagtttgggactttccctgtggaccttaccaaaacacgacttcaggttcaaggccaaagcattgatgcccgtttcaaagagataaaatatagagggatgttccatgcgctgtttcgcatctgtaaagaggaaggtgtattggctctctattcaggaattgctcctgcgttgctaagacaagcatcatatggcaccattaaaattgggatttaccaaagcttgaagcgcttattcgtagaacgtttagaagatgaaactcttttaattaatatgatctgtggggtagtgtcaggagtgatatcttccactatagccaatcccaccgatgttctaaagattcgaatgcaggctcaaggaagcttgttccaagggagcatgattggaagctttatcgatatataccaacaagaaggcaccaggggtctgtggaggg

SEQ ID NO: 28789 - DNA, 1621 bp, Homo sapiens
  source 1..1621: mol_type = unassigned DNA
gtccgatgagcccgagcagcaccagaaaagtaccactgtaagtcatgagatgtctggtctgaattggaaaccctttgtatatggcggccttgcctctatcgtggctgagtttgggactttccctgtggaccttaccaaaacacgacttcaggttcaaggccaaagcattgatgcccgtttcaaagagataaaatatagagggatgttccatgcgctgtttcgcatctgtaaagaggaaggtgtattggctctctattcaggaattgctcctgcgttgctaagacaagcatcatatggcaccattaaaattgggatttaccaaagcttgaagcgcttattcgtagaacgtttagaagatgaaactcttttaattaatatgatctgtggggtagtgtcaggagtgatatcttccactatagccaatcccaccgatgttctaaagattcgaatgcaggctcaaggaagcttgttccaagggagcatgattggaagctttatcgatatataccaacaagaaggcaccaggggtctgtggaggggtgtggttccaactgctcagcgtgctgccatcgttgtaggagtagagctaccagtctatgatattactaagaagcatttaatattgtcaggaatgatgggcgatacaattttaactcacttcgtgtaagtaggatgggatgtgctcattttatttccagcattttgagcacaaaaagcctcttttactgaaatcctcaggtggaatttgataactggtacgtatggcctaaattcccttgtctctcctattatcagaacttcaagccttatgaacactttatacttcacagaaatgccaggtgctatgggggcttgggtacttgggaacattgtctaatacagcagcctatcagaggtctatttgatttacatttatccatacatagcttctatatctaataagcacatctattatttgctttggttaattttgtttgagaaagcaaacttttctcagtgggaatcagaaaaaaaggggtaaataaggtctgtgaaactaaagcacagttttttggctaaagactgttactgatctcattttacattttctttgtcttgcaacctttatgataattttgttactcaaatgcatttggcatgtgatgctgtggtttgaaaaatttatgtaactaatacatggtgcatgatactttctacttaggaatcttgttaggtttagaaactctcctttaaaaaaaaggctgagtttcagattgaaaattgaagggacagcctttgaatgatgtctctttagaaaaatttcctgtctctttagattgtaacgaaaggccaagtgccaggttttatctgatgggtctgagttatattgtacagtttacgtttggcctaatttctgtttaagtgggcagggagtgaaagtggggtcgatctacttaaacttttcctcttagttccagctttacatgtggtttggctggggctctggcctccaacccggttgatgtggttcgaactcgcatgatgaaccagagggcaatcgtgggacatgtggatctctataagggcactgttgatggtattttaaagatgtggaaacatgagggcttttttgcactctata

SEQ ID NO: 28790 - DNA, 1019 bp, Homo sapiens
  source 1..1019: mol_type = unassigned DNA
agtcgtccgatgagcccgagcagctgagtcccttccctgtctttcactcttctggcatcggtggttttacttcttcgattgaaccctgcttcctcgacccccctgggaggccgccttcttcaggcgcctcccttctctccacgagctcgctctgacagctgaggaactggcaagatcctgctacccagagggtgaatgggtatctttcccggaataatcctaatttttctaagggtgaagtttgcaacggcggccgtgattgtaagcggacaccagaaaagtaccactgtaagtcatgagatgtctggtctgaattggaaaccctttgtatatggcggccttgcctctatcgtggctgagtttgggactttccctgtggaccttaccaaaacacgacttcaggttcaaggccaaagcattgatgcccgtttcaaagagataaaatatagagggatgttccatgcgctgtttcgcatctgtaaagaggaaggtgtattggctctctattcaggaattgctcctgcgttgctaagacaagcatcatatggcaccattaaaattgggatttaccaaagcttgaagcgcttattcgtagaacgtttagaagatgaaactcttttaattaatatgatctgtggggtagtgtcaggagtgatatcttccactatagccaatcccaccgatgttctaaagattcgaatgcaggctcaaggaagcttgttccaagggagcatgattggaagctttatcgatatataccaacaagaaggcaccaggggtctgtggaggggtgtggttccaactgctcagcgtgctgccatcgttgtaggagtagagctaccagtctatgatattactaagaagcatttaatattgtcaggaatgatgggcgatacaattttaactcacttcgtgtaagtaggatgggatgtgctcattttatttccagcattttgagcacaaaaagcctcttttactgaaatcctcaggtggaatttgataactggtacgtatggcct

SEQ ID NO: 28791 - DNA, 2894 bp, Homo sapiens
  source 1..2894: mol_type = unassigned DNA
ggaagcctctgcttgcccaaagtgaaagagaaagtgcccccccacccaagcccgccccaccccgccccacggccaatccctgcggcccctcgcctcctcccccggcagcttccccttctgtgtgagtgctgggctggagtgtggaagagccatccagagtgagtgcctggggcagagtgagagcaggaccagcgggcaggtggcggagcgggggtcggtggtggatggcccagccctggaaagccgaggtgaaggttacgagtccctgaggatctgtgggtgtgagccagccgcgtggccctgggcaacggcgctgccggacagaagtggcggttgctgacgcctggaaattcccctgaaggtggagcaccacccaacccccctgggtcccaccctccctcaaggcctcctccacctccacctccaccccgcctggcctggcgtccacctctgcggctcctacctgggtgcaatcgagttaaatggctgataagcagatcagcctgccagccaagctcatcaatggcggcatcgccgggctgatcggtgtcacctgcgtgtttcccatcgacctggccaagaccaggctgcagaaccagcagaacggccagcgcgtgtacacgagcatgtccgactgcctcatcaagaccgtccgctccgagggctacttcggcatgtaccggggagctgctgtgaacttgaccctcgtcacccccgagaaggccatcaagctggcagccaacgacttcttccgacatcagctctctaaggacgggcagaagctgaccctgcttaaagagatgctggcgggctgtggggctggcacctgccaggtgatcgtgaccacgcccatggagatgctgaagatccagctgcaggatgcagggcgcattgccgcccagaggaagatcctggctgcccagggccagctctcggcccaggggggtgcccagccctcagtggaggctccagctgcccctcggcccacggccacccagctgacccgcgacctgctgcggagccgtggcattgccggtctctacaagggactcggggccacgctgctcagggatgtccccttctctgtggtgtacttcccgctctttgccaacctgaaccagctgggccgcccggcgtccgaggagaagtcgcctttctacgtgtccttcctggccggctgtgtggctgggagtgccgccgctgtggccgtcaacccctgtgatgtggtgaagacgcggctccagtcacttcagcgaggcgtcaacgaggacacctactctgggatcctggactgtgccaggaagatcctgcggcacgagggcccctcggccttcctgaagggcgcctactgccgcgcgctggtcatcgcgccccttttcggcatcgcacaggtggtctacttcctgggcatcgcggagtccctgctggggctgctgcaggacccccaggcctgagcccagcacccgctccaccccagccagctgggcagggccggtgtggggctggagccaggcagctagcccaggacggagcaagggaagacccctccccagccctcccgtcggcaggggcagcagggggcagggtgcagggtccacataggtggtgcacacgcaagccccccggggtgctgcctgcaccgttgggatcaatgtctcatttatgtagaaaatgcagaaatctttacattcctcaagctagcccctgccccaatcctgccctggcctgaacacccccagggacagagctggtctctgggctgggggcccccgggcctgggccgggcaggctggaccatacccccagtccaccagctccagtctccacagccatcctggcccacacaggcaccccacacaaacctatttattgaatctgctggacccaagcggctctccagcccttccgtccttccccagccgctcttgtcgccttggcaggacttgactctgcctccctggccagccttgcaagaggactggggtctcctgccctctctgttgagccaggaatcccaagtgaggggttgccctgaggtctgactcttggggcaagcccgccacccactgtgggactttctggtgggctcctcagctcccaccccaggctggggcccagattgtgaggtctgtgtgcatgtgtgtgtgtatgtgtgtgtgcatgcgtgtgtgtgttgtggggatctggcctggcccttggggatggggctgctggggactgccccccttcccgccgtggccaggcgctctgtgtgctgtgtgtgccccaggctctgttgaccccgtccaggaactaacttacccagcttggtctctcctgagtcctccaccctggcctgggattggccagggagcagggcgggcattgggaccagtgtggagcctgagggtgcctgccctgctctggagggagggccaggagctgccacacccccaagtcctctcagggcccaccctcctttttcagcctctgcataaggcccctgggtacactgcagaagccccatccttcccgcctccgggcataaggcccctgaccacacttcagaagccccatcccccctgccaccgggcgatccctgctgtgagccgaagctctccctgccccgccctggccatgtgatcgtgttggtgacagaccctgatgtgctggtgctgtgtccccaaaaccggggccctccacagaggccccttcccagcgacactacctggggctcaggcctggacccccccagttcacggttgctcctgggagctgcccctcccgtcacatcagaaccttggaagctgctgctgctgcttacagaattatatttttttcttttgaagagttttaagaagttgtaactttttgtgtcttgtcatgtcagagaataaataaatattctaagtaga

SEQ ID NO: 28792 - DNA, 591 bp, Homo sapiens
  source 1..591: mol_type = unassigned DNA
gtgcacgtgagccccgagcgtgagcggcgtgtgaggctggctgggaagacgctggcggtggggagggggggactgaaaggaagccaggtggtcccaggggacagaagtggcggttgctgacgcctggaaattcccctgaaggtggagcaccacccaacccccctgggtcccaccctccctcaaggcctcctccacctccacctccaccccgcctggcctggcgtccacctctgcggctcctacctgggtgcaatcgagttaaatggctgataagcagatcagcctgccagccaagctcatcaatggcggcatcgccgggctgatcggtgtcacctgcgtgtttcccatcgacctggccaagaccaggctgcagaaccagcagaacggccagcgcgtgtacacgagcatgtccgactgcctcatcaagaccgtccgctccgagggctacttcggcatgtaccggggagctgctgtgaacttgaccctcgtcacccccgagaaggccatcaagctggcagccaacgacttcttccgacatcagctctctaaggacgggcagaagctgaccctgcttaaagagatgctggcggg

SEQ ID NO: 28793 - DNA, 620 bp, Homo sapiens
  source 1..620: mol_type = unassigned DNA
gtgagcggcgtgtgaggctggctgggaagacgctggcggtggggagggggggactgaaaggaagccaggtggtcccagggaagtggcggttgctgacgcctggaaattcccctgaaggtggagcaccacccaacccccctgggtcccaccctccctcaaggcctcctccacctccacctccaccccgcctggcctggcgtccacctctgcggctcctacctgggtgcaatcgagttaaatggctgataagcagatcagcctgccagccaagctcatcaatggcggcatcgccgggctgatcggtgtcacctgcgtgtttcccatcgacctggccaagaccaggctgcagaaccagcagaacggccagcgcgtgtacacgagcatgtccgactgcctcatcaagaccgtccgctccgagggctacttcggcatgtaccggggagctgctgtgaacttgaccctcgtcacccccgagaaggccatcaagctggcagccaacgacttcttccgacatcagctctctaaggacgggcagaagctgaccctgcttaaagagatgctggcgggctgtggggctggcacctgccaggtgatcgtgaccacgcccatggagatgctga

SEQ ID NO: 28794 - DNA, 594 bp, Homo sapiens
  source 1..594: mol_type = unassigned DNA
agcatgggactgggtggcaggtgcctcccgctgctgcaccctcaggacgcagtgacggcttcagtctggggtggacagaagtggcggttgctgacgcctggaaattcccctgaaggtggagcaccacccaacccccctgggtcccaccctccctcaaggcctcctccacctccacctccaccccgcctggcctggcgtccacctctgcggctcctacctgggtgcaatcgagttaaatggctgataagcagatcagcctgccagccaagctcatcaatggcggcatcgccgggctgatcggtgtcacctgcgtgtttcccatcgacctggccaagaccaggctgcagaaccagcagaacggccagcgcgtgtacacgagcatgtccgactgcctcatcaagaccgtccgctccgagggctacttcggcatgtaccggggagctgctgtgaacttgaccctcgtcacccccgagaaggccatcaagctggcagccaacgacttcttccgacatcagctctctaaggacgggcagaagctgaccctgcttaaagagatgctggcgggctgtggggctggcacctgccaggtgatcg

SEQ ID NO: 28795 - DNA, 579 bp, Homo sapiens
  source 1..579: mol_type = unassigned DNA
ccccttctgtgtgagtgctgggctggagtgtggaagagccatccagagacagaagtggcggttgctgacgcctggaaattcccctgaaggtggagcaccacccaacccccctgggtcccaccctccctcaaggcctcctccacctccacctccaccccgcctggcctggcgtccacctctgcggctcctacctgggtgcaatcgagttaaatggctgataagcagatcagcctgccagccaagctcatcaatggcggcatcgccgggctgatcggtgtcacctgcgtgtttcccatcgacctggccaagaccaggctgcagaaccagcagaacggccagcgcgtgtacacgagcatgtccgactgcctcatcaagaccgtccgctccgagggctacttcggcatgtaccggggagctgctgtgaacttgaccctcgtcacccccgagaaggccatcaagctggcagccaacgacttcttccgacatcagctctctaaggacgggcagaagctgaccctgcttaaagagatgctggcgggctgtggggctggcacctgccaggtgatcgtgaccacgccc

SEQ ID NO: 28796 - DNA, 552 bp, Homo sapiens
  source 1..552: mol_type = unassigned DNA
aaaagccggagctggctggggtgcacgtgagccccgagcgtgagcggcgtgacagaagtggcggttgctgacgcctggaaattcccctgaaggtggagcaccacccaacccccctgggtcccaccctccctcaaggcctcctccacctccacctccaccccgcctggcctggcgtccacctctgcggctcctacctgggtgcaatcgagttaaatggctgataagcagatcagcctgccagccaagctcatcaatggcggcatcgccgggctgatcggtgtcacctgcgtgtttcccatcgacctggccaagaccaggctgcagaaccagcagaacggccagcgcgtgtacacgagcatgtccgactgcctcatcaagaccgtccgctccgagggctacttcggcatgtaccggggagctgctgtgaacttgaccctcgtcacccccgagaaggccatcaagctggcagccaacgacttcttccgacatcagctctctaaggacgggcagaagctgaccctgcttaaagagatgctggcgggctgtggggct

SEQ ID NO: 28797 - DNA, 558 bp, Homo sapiens
  source 1..558: mol_type = unassigned DNA
atgggaggagagctatacctgggatagctgagcccaggtcggggggtcttagggcgcccgggaccccagcccctagctcgaagggggcaggtgccggctgctgctctctctgtgctgaaggatgtgggggatggtcaccacagctgtccaggtcgaggtgctccgaagtggcggttgctgacgcctggaaattcccctgaaggtggagcaccacccaacccccctgggtcccaccctccctcaaggcctcctccacctccacctccaccccgcctggcctggcgtccacctctgcggctcctacctgggtgcaatcgagttaaatggctgataagcagatcagcctgccagccaagctcatcaatggcggcatcgccgggctgatcggtgtcacctgcgtgtttcccatcgacctggccaagaccaggctgcagaaccagcagaacggccagcgcgtgtacacgagcatgtccgactgcctcatcaagaccgtccgctccgagggctacttcggcatgtaccggggagctgctgtgaacttgaccctcgtcacccccg

SEQ ID NO: 28798 - DNA, 535 bp, Homo sapiens
  source 1..535: mol_type = unassigned DNA
gtgagtgctgggctggagtgtggaagagccatccagagtgagtgcctggggcagagtgagagcaggaccagcgggcaggtggcggagcgggggtcggtggtggatggcccagccctggaaagccgaggtgaaggttacgagtccctgaggatctgtgggtgtgagccagccgcgtggccctgggcaacggcgctgccgaagtggcggttgctgacgcctggaaattcccctgaaggtggagcaccacccaacccccctgggtcccaccctccctcaaggcctcctccacctccacctccaccccgcctggcctggcgtccacctctgcggctcctacctgggtgcaatcgagttaaatggctgataagcagatcagcctgccagccaagctcatcaatggcggcatcgccgggctgatcggtgtcacctgcgtgtttcccatcgacctggccaagaccaggctgcagaaccagcagaacggccagcgcgtgtacacgagcatgtccgactgcctcatcaagaccgtccgctccga

SEQ ID NO: 28799 - DNA, 1790 bp, Homo sapiens
  source 1..1790: mol_type = unassigned DNA
acatacgtgtccccgagggtgggtgtccggggcccgagcccaaggaagaaaggccgacccgtgtgggacgcacacgtgggagttcaccggacatctgtggacacgtgcgtggccggagtcgcggtggccaggcggaggacggagcggtcggctgagccccagcagtagggcaggggcctgagccggcctccgagcgcagagagcggcccccaacccgcttctcctttgtcctctggccgaggcatcgcgcagttggagtccccttccgggaccctccagccagcaggatagaaagcaccgccccaagaggacggggacagcgggagattgaatggggagccgccggccagactcggagcctcacccccattgcctttcttgggggacagaagtggcggttgctgacgcctggaaattcccctgaaggtggagcaccacccaacccccctgggtcccaccctccctcaaggcctcctccacctccacctccaccccgcctggcctggcgtccacctctgcggctcctacctgggtgcaatcgagttaaatggctgataagcagatcagcctgccagccaagctcatcaatggcggcatcgccgggctgatcggtgtcacctgcgtgtttcccatcgacctggccaagaccaggctgcagaaccagcagaacggccagcgcgtgtacacgagcatgtccgactgcctcatcaagaccgtccgctccgagggctacttcggcatgtaccggggagctgctgtgaacttgaccctcgtcacccccgagaaggccatcaagctggcagccaacgacttcttccgacatcagctctctaaggacgggcagaagctgaccctgcttaaagagatgctggcgggctgtggggctggcacctgccaggtgatcgtgaccacgcccatggagatgctgaagatccagctgcaggatgcagggcgcattgccgcccagaggaagatcctggctgcccagggccagctctcggcccaggggggtgcccagccctcagtggaggctccagctgcccctcggcccacggccacccagctgacccgcgacctgctgcggagccgtggcattgccggtctctacaagggactcggggccacgctgctcagggatgtccccttctctgtggtgtacttcccgctctttgccaacctgaaccagctgggccgcccggcgtccgaggagaagtcgcctttctacgtgtccttcctggccggctgtgtggctgggagtgccgccgctgtggccgtcaacccctgtgatgtggtgaagacgcggctccagtcacttcagcgaggcgtcaacgaggacacctactctgggatcctggactgtgccaggaagatcctgcggcacgagggcccctcggccttcctgaagggcgcctactgccgcgcgctggtcatcgcgccccttttcggcatcgcacaggtggtctacttcctgggcatcgcggagtccctgctggggctgctgcaggacccccaggcctgagcccagcacccgctccaccccagccagctgggcagggccggtgtggggctggagccaggcagctagcccaggacggagcaagggaagacccctccccagccctcccgtcggcaggggcagcagggggcagggtgcagggtccacataggtggtgcacacgcaagccccccggggtgctgcctgcaccgttgggatcaatgtctcatttatgtagaaaatgcagaaatctttacattcctcaagctagcccctgccccaatcctgccctggc

SEQ ID NO: 28800 - DNA, 605 bp, Homo sapiens
  source 1..605: mol_type = unassigned DNA
gagggcggagcgcgcgcggcgccgagcggacgcgcctccccgcctaggtgctggccgagcgcggggcgggcaggcgagcgcggcggcggcggcgagcgtggacagaagtggcggttgctgacgcctggaaattcccctgaaggtggagcaccacccaacccccctgggtcccaccctccctcaaggcctcctccacctccacctccaccccgcctggcctggcgtccacctctgcggctcctacctgggtgcaatcgagttaaatggctgataagcagatcagcctgccagccaagctcatcaatggcggcatcgccgggctgatcggtgtcacctgcgtgtttcccatcgacctggccaagaccaggctgcagaaccagcagaacggccagcgcgtgtacacgagcatgtccgactgcctcatcaagaccgtccgctccgagggctacttcggcatgtaccggggagctgctgtgaacttgaccctcgtcacccccgagaaggccatcaagctggcagccaacgacttcttccgacatcagctctctaaggacgggcagaagctgaccctgcttaaagagatgctggcgggctgtggggctggc

SEQ ID NO: 28801 - DNA, 589 bp, Homo sapiens
  source 1..589: mol_type = unassigned DNA
agctctgcaggccctaggtggagctgccatgggaggagagctatacctgggatagctgagcccaggtcggggggtcttagggcgcccgggaccccagcccctagctcgaagggggcaggtgccggctgctgctctctctgtgctgaaggatgtgggggatggtcaccacagctgtccaggtcgaggtgctccggacagaagtggcggttgctgacgcctggaaattcccctgaaggtggagcaccacccaacccccctgggtcccaccctccctcaaggcctcctccacctccacctccaccccgcctggcctggcgtccacctctgcggctcctacctgggtgcaatcgagttaaatggctgataagcagatcagcctgccagccaagctcatcaatggcggcatcgccgggctgatcggtgtcacctgcgtgtttcccatcgacctggccaagaccaggctgcagaaccagcagaacggccagcgcgtgtacacgagcatgtccgactgcctcatcaagaccgtccgctccgagggctacttcggcatgtaccggggagctgctgtgaacttgaccctcgtcacccc

SEQ ID NO: 28802 - DNA, 585 bp, Homo sapiens
  source 1..585: mol_type = unassigned DNA
catacgtgtccccgagggtgggtgtccggggcccgagcccaaggaagaaaggccgacccgtgtgggacgcacacgtgggagttcaccggacatctgtggacacgacagaagtggcggttgctgacgcctggaaattcccctgaaggtggagcaccacccaacccccctgggtcccaccctccctcaaggcctcctccacctccacctccaccccgcctggcctggcgtccacctctgcggctcctacctgggtgcaatcgagttaaatggctgataagcagatcagcctgccagccaagctcatcaatggcggcatcgccgggctgatcggtgtcacctgcgtgtttcccatcgacctggccaagaccaggctgcagaaccagcagaacggccagcgcgtgtacacgagcatgtccgactgcctcatcaagaccgtccgctccgagggctacttcggcatgtaccggggagctgctgtgaacttgaccctcgtcacccccgagaaggccatcaagctggcagccaacgacttcttccgacatcagctctctaaggacgggcagaagctgaccctgcttaaagaga

SEQ ID NO: 28803 - DNA, 684 bp, Homo sapiens
  source 1..684: mol_type = unassigned DNA
agtgacggcttcagtctggggtggtgggtgaggggctgcgtgagagagggaggctgggggaggattactcttcgggtggccccaccctcactcattcccattccctcatccttctaggacagaagtggcggttgctgacgcctggaaattcccctgaaggtggagcaccacccaacccccctgggtcccaccctccctcaaggcctcctccacctccacctccaccccgcctggcctggcgtccacctctgcggctcctacctgggtgcaatcgagttaaatggctgataagcagatcagcctgccagccaagctcatcaatggcggcatcgccgggctgatcggtgtcacctgcgtgtttcccatcgacctggccaagaccaggctgcagaaccagcagaacggccagcgcgtgtacacgagcatgtccgactgcctcatcaagaccgtccgctccgagggctacttcggcatgtaccggggagctgctgtgaacttgaccctcgtcacccccgagaaggccatcaagctggcagccaacgacttcttccgacatcagctctctaaggacgggcagaagctgaccctgcttaaagagatgctggcgggctgtggggctggcacctgccaggtgatcgtgaccacgcccatggagatgctgaagatccagctgcaggatgcagg

SEQ ID NO: 28804 - DNA, 1835 bp, Homo sapiens
  source 1..1835: mol_type = unassigned DNA
gcagcttttccgcacgcgcctcgccggcgcgcggctctctcagcgtcccaagagccactttctcgccagtacgatgctgcagcggttttccggttttccgcttcccttcatcgtagctcccgtactcatttttagccactgctgccggtttttatatccttctccatcatgcatcgtgagcctgcgaaaaagaaggcagaaaagcggctgtttgacgcctcatccttcgggaaggaccttctggccggcggagtcgcggcagctgtgtccaagacagcggtggcgcccatcgagcgggtgaagctgctgctgcaggtgcaggcgtcgtcgaagcagatcagccccgaggcgcggtacaaaggcatggtggactgcctggtgcggattcctcgcgagcagggtttcttcagtttttggcgtggcaatttggcaaatgttattcggtattttccaacacaagctctaaactttgcttttaaggacaaatacaagcagctattcatgtctggagttaataaagaaaaacagttctggaggtggtttttggcaaacctggcttctggtggagctgctggggcaacatccttatgtgtagtatatcctctagattttgcccgaacccgattaggtgtcgatattggaaaaggtcctgaggagcgacaattcaagggtttaggtgactgtattatgaaaatagcaaaatcagatggaattgctggtttataccaagggtttggtgtttcagtacagggcatcattgtgtaccgagcctcttattttggagcttatgacacagttaagggtttattaccaaagccaaagaaaactccatttcttgtctcctttttcattgctcaagttgtgactacatgctctggaatactttcttatccctttgacacagttagaagacgtatgatgatgcagagtggtgaggctaaacggcaatataaaggaaccttagactgctttgtgaagatataccaacatgaaggaatcagttccttttttcgtggcgccttctccaatgttcttcgcggtacagggggtgctttggtgttggtattatatgataaaattaaagaattctttcatattgatattggtggtaggtaatcgggagagtaaattaagaaatacatggatttaacttgttaaacatacaaattacatagctgccatttgcatacattttgatagtgttattgtctgtattttgttaaagtgctagttctgcaataaagcatacattttttcaagaatttaaatactaaaaatcagataaatgtggattttcctcccacttagactcaaacacattttagtgtgatatttcatttattataggtagtatattttaatttgttagtttaaaattctttttatgattaaaaattaatcatataatcctagattaatgctgaaatctaggaaatgaaagtagcgtcttttaaattgctattcatttaatatacctgttttcccatcttttgaagtcatatggtatgacatatttcttaaaagcttatcaatagatgtcatcatatgtgtaggcagaaataagctttgttctatatctcttctaagacagttgttattactgtgtataatatttacagtatcagcctttgattatagatgtgatcatttaaaatttgataatgactttagtgacattataaaactgaaactggaaaataaaatggcttatctgctgatgtttatctttaaaataaataaaatcttgctagtgtgaatatatcttagaacaaaaggtatcctcttgaaaattagtttgtatattttgttgacaataaaggaagcttaactgttat

SEQ ID NO: 28805 - DNA, 1338 bp, Homo sapiens
  source 1..1338: mol_type = unassigned DNA
aagggggagctgcgggccaggcggcggccccctagcgtcgcgcagggtcggggactgcgcggcggtgccaggccgggcgtgggcgagagcacgaacgggctgcctgcgggctgagagcgtcgagctgtcaccatgggtgatcacgcttggagcttcctaaaggacttcctggccgggggcgtcgccgctgccgtctccaagaccgcggtcgcccccatcgagagggtcaaactgctgctgcaggtccagcatgccagcaaacagatcagtgctgagaagcagtacaaagggatcattgattgtgtggtgagaatccctaaggagcagggcttcctctccttctggaggggtaacctggccaacgtgatccgttacttccccacccaagctctcaacttcgccttcaaggacaagtacaagcagctcttcttagggggtgtggatcggcataagcagttctggcgctactttgctggtaacctggcgtccggtggggccgctggggccacctccctttgctttgtctacccgctggactttgctaggaccaggttggctgctgatgtgggcaagggcgccgcccagcgtgagttccatggtctgggcgactgtatcatcaagatcttcaagtctgatggcctgagggggctctaccagggtttcaacgtctctgtccaaggcatcattatctatagagctgcctacttcggagtctatgatactgccaaggggatgctgcctgaccccaagaacgtgcacatttttgtgagctggatgattgcccagagtgtgacggcagtcgcagggctggtgtcctacccctttgacactgttcgtcgtagaatgatgatgcagtccggccggaaaggggccgatattatgtacacggggacagttgactgctggaggaagattgcaaaagacgaaggagccaaggccttcttcaaaggtgcctggtccaatgtgctgagaggcatgggcggtgcttttgtattggtgttgtatgatgagatcaaaaaatatgtctaatgtaattaaaacacaagttcacagatttacagtgaacttgatctacaagttcacagatccattgtgtggtttaatagactattcctaggggaagtaaaaagatctgggataaaaccagactgaaaggaatacctcagaagagatgcttcattgagtgttcattaaaccacacatgtattttgtatttattttacatttaaattcccacagcaaatagaaaataatttatcatacttgtacaattaactgaagaattgataataactgaatgtgaaacatcaataaagaccacttaatgcacgctttcta

SEQ ID NO: 28806 - DNA, 1274 bp, Homo sapiens
  source 1..1274: mol_type = unassigned DNA
agctccggctccccctatataaatcggccatttgcttcgctccgccccgcagcgccggagtcaaagccggttcccggcccagtcccgtcctgcagcagtctgcctcctctttcaacatgacagatgccgctgtgtccttcgccaaggacttcctggcaggtggagtggccgcagccatctccaagacggcggtagcgcccatcgagcgggtcaagctgctgctgcaggtgcagcatgccagcaagcagatcactgcagataagcaatacaaaggcattatagactgcgtggtccgtattcccaaggagcagggagttctgtccttctggcgcggtaacctggccaatgtcatcagatacttccccacccaggctcttaacttcgccttcaaagataaatacaagcagatcttcctgggtggtgtggacaagagaacccagttttggctctactttgcagggaatctggcatcgggtggtgccgcaggggccacatccctgtgttttgtgtaccctcttgattttgcccgtacccgtctagcagctgatgtgggtaaagctggagctgaaagggaattccgaggcctcggtgactgcctggttaagatctacaaatctgatgggattaagggcctgtaccaaggctttaacgtgtctgtgcagggtattatcatctaccgagccgcctacttcggtatctatgacactgcaaagggaatgcttccggatcccaagaacactcacatcgtcatcagctggatgatcgcacagactgtcactgctgttgccgggttgacttcctatccatttgacactgttcgccgccgcatgatgatgcagtcagggcgcaaaggaactgacatcatgtacacaggcacgcttgactgctggcggaagattgctcgtgatgaaggaggcaaagcttttttcaagggtgcatggtccaatgttctcagaggcatgggtggtgcttttgtgcttgtcttgtatgatgaaatcaagaagtacacataagttatttcctaggatttttccccctgtgaacaggcatgttgtattatataacatatcttgagcattcttgacagactcctggctgtcagtttctcagtggcaactatttactggttgaaaatgggaagcaataatattcatctgaccagttttctcttaaagccatttccatgatgatgatgatgggactcaattgtattttttatttcagtcactcctgataaataacaaatttggagaaataaaaatatctaaaataaa

SEQ ID NO: 28807 - DNA, 2062 bp, Homo sapiens
  source 1..2062: mol_type = unassigned DNA
gcagcgggactgagccgcgcccacgtggaagccgccgcaggcttcgcgcggggccccccgggtgcacgcgggcaggggccggggtctcccgacgcacgaccccggagagtgttgaaagggtcggagctgcccggaggtcaagggtcaagggtcgggggtcggggcaccacatgtcgcacatcccggcggggtcgccgcggcctccgggagaaagcggacgacgcactcggagcgaactgggcatcagggtgggcttctgactccgcagctgccctcccgcccgctcgggtactggcagcggcctgaccttcacaaggtcaaggctgccgcggaacccccagcggcccctacggcgcatgggcggggcctggctcccggcatacctaggggtgcggggcgggacgtctccggggagcgcagccaatgggcgcggttcgctggagtgcggggcgggacgcagcgggattcccggcagccctcagaggcgaggcacgcaggctggtgtggggcggggcctggcggcgcagccaatgagcgcggcgcgaggaggcgcgggggcggagagtgggcgtggcgtcggcgtcttagcggctgcgcggtggctgctccgtcctttcggtccaggcggcggcagggctgagccagcgacgccctccattcactctccgcgcccgttctccggctgtcctcccgttccgctgcccgccctgccaccatgacggaacaggccatctccttcgccaaagacttcttggccggaggcatcgccgccgccatctccaagacggccgtggctccgatcgagcgggtcaagctgctgctgcaggtccagcacgccagcaagcagatcgccgccgacaagcagtacaagggcatcgtggactgcattgtccgcatccccaaggagcagggcgtgctgtccttctggaggggcaaccttgccaacgtcattcgctacttccccactcaagccctcaacttcgccttcaaggataagtacaagcagatcttcctggggggcgtggacaagcacacgcagttctggaggtactttgcgggcaacctggcctccggcggtgcggccggcgcgacctccctctgcttcgtgtacccgctggatttcgccagaacccgcctggcagcggacgtgggaaagtcaggcacagagcgcgagttccgaggcctgggagactgcctggtgaagatcaccaagtccgacggcatccggggcctgtaccagggcttcagtgtctccgtgcagggcatcatcatctaccgggcggcctacttcggcgtgtacgatacggccaagggcatgctccccgaccccaagaacacgcacatcgtggtgagctggatgatcgcgcagaccgtgacggccgtggccggcgtggtgtcctaccccttcgacacggtgcggcggcgcatgatgatgcagtccgggcgcaaaggagctgacatcatgtacacgggcaccgtcgactgttggaggaagatcttcagagatgaggggggcaaggccttcttcaagggtgcgtggtccaacgtcctgcggggcatggggggcgccttcgtgctggtcctgtacgacgagctcaagaaggtgatctaagggccgcggcctcctccacacacacacacacaccaggggaaccaagagaaccacgtagaatcctcaaccgtgcggaccatcaaccttcgagaaattccagttgtctttttcccagccgcatcctgcctgtagatggccggggaaggctctagaaaaggggcgcattgcgatccaaccatcggcagccgattccgtgtcttgatcacggggtgggagggaaccgtggcgtccctgcgtggggcccatgggtgagacactccagtactgagacctagagtccagatgcttgtaggagccaagtcgtgttctaagtatttatttaaaacaaaagaatcacgttttcccatttgtacttcagcgctagcccctgttttgcacagccgagtactggcgagtatgttctatgttgggcctcctgctgcaaaacaataaacagaggacgcagaggtc

SEQ ID NO: 28808 - DNA, 712 bp, Homo sapiens
  source 1..712: mol_type = unassigned DNA
cacggatcggcagcgggactgagccgcgcccacgtggaagccgccgcaggcttcgcgcggggccccccgggtgcacgcgggcaggggccggggtctcccgacgcacgaccccggagagtgttgaaagggtcggagctgcccggaggcggcggcagggctgagccagcgacgccctccattcactctccgcgcccgttctccggctgtcctcccgttccgctgcccgccctgccaccatgacggaacaggccatctccttcgccaaagacttcttggccggaggcatcgccgccgccatctccaagacggccgtggctccgatcgagcgggtcaagctgctgctgcaggtccagcacgccagcaagcagatcgccgccgacaagcagtacaagggcatcgtggactgcattgtccgcatccccaaggagcagggcgtgctgtccttctggaggggcaaccttgccaacgtcattcgctacttccccactcaagccctcaacttcgccttcaaggataagtacaagcagatcttcctggggggcgtggacaagcacacgcagttctggaggtactttgcgggcaacctggcctccggcggtgcggccggcgcgacctccctctgcttcgtgtacccgctggatttcgccagaacccgcctggcagcggacgtgggaaagtcaggcacagagcgcgagttccgaggcctgggaga

SEQ ID NO: 28809 - DNA, 1641 bp, Homo sapiens
  source 1..1641: mol_type = unassigned DNA
ggggcctggctcggaccacgcggggcgggacctggagctgacgcggccgccccgcccctgggaccataaccggccgccgccgccaccgcggaccgagcgcggagttctggagtctcggacccgaagccgccacagggcgccccgcctcccgcccgccatgcccgcgccccgcgccccgcgcgctctggcggccgccgcgcccgcgtccgggaaggccaagctgacgcacccggggaaggcgatcctggcaggcggcctggcgggtggcatcgagatctgcatcaccttccccaccgagtacgtgaagacgcagctgcagctggacgagcgctcgcacccgccgcggtaccggggcatcggggactgcgtgcggcagacggttcgcagccatggcgtcctgggcctgtaccgcggccttagctccctgctctacggttccatccccaaggcggccgtcaggtttggaatgttcgagttcctcagcaaccacatgcgggatgcccagggacggctggacagcacgcgtgggctgctgtgcggcctgggcgctggcgtggccgaggccgtggtggtcgtgtgccccatggagaccatcaaggtgaagttcatccacgaccagacctccccaaaccccaagtacagaggattcttccacggggttagggagattgtgcgggaacaagggctgaaggggacgtaccagggcctcacagccactgtcctgaagcagggctcgaaccaggccatccgcttcttcgtcatgacctccctgcgcaactggtaccgaggggacaaccccaacaagcccatgaaccctctgatcactggggtcttcggagctattgcaggcgcagccagtgtctttggaaacactcctctggatgtgattaagacccggatgcagggcctggaggcgcacaaataccggaacacgtgggactgcggcttgcagatcctgaagaaggaggggctcaaggcattctacaagggcactgtcccccgcctgggccgggtctgcctggatgtggccatagtgtttgtcatctatgatgaagtggtgaagctgctcaacaaagtgtggaagacggactaagcctagagaggccgcaaggggaccgccccaggcaccgccagagtgtcctgctacctttgtctcacgattccagtgcagtagtgccaaaaggccccttcccacgtccctcgagctctgtagcctggtctgtgcattgtggctgtcaaatccatgtgtcccccctgtggtctgtgtgtgacaccaccactgtgtcccagtgtctggcccagccatggctggatgtgcatctggcctatgaccctgtgcctgtgtttcatgttctgtgtcacgtgaccctgtgccccgcctcccggggtgcccgtgtggcctgggtcctcggccctgtagccctggcccggtcccagtccggtgccttccaccctgccctggcctaccacagctgcctccgggcctcggcctggcttcaccgcattccaggggctgcagccccctgcttctcccgccattggccttaactggccctcgggccctctctccgccccggacagggtggcacccaccactctcaggaccaccctgccaaggcagaataaaccggatcctgttgc

SEQ ID NO: 28810 - DNA, 1514 bp, Homo sapiens
  source 1..1514: mol_type = unassigned DNA
gctgaggccccgccccacttccgggttgggccgtgggctggggagtcgtggaggcgcggtcctggtccccacccggcgcgctgggactcgcccgcctcccgtctgtcaccccctgcgcctcgccgggacaacggggcggcctggcgggtggcatcgagatctgcatcaccttccccaccgagtacgtgaagacgcagctgcagctggacgagcgctcgcacccgccgcggtaccggggcatcggggactgcgtgcggcagacggttcgcagccatggcgtcctgggcctgtaccgcggccttagctccctgctctacggttccatccccaaggcggccgtcaggtttggaatgttcgagttcctcagcaaccacatgcgggatgcccagggacggctggacagcacgcgtgggctgctgtgcggcctgggcgctggcgtggccgaggccgtggtggtcgtgtgccccatggagaccatcaaggtgaagttcatccacgaccagacctccccaaaccccaagtacagaggattcttccacggggttagggagattgtgcgggaacaagggctgaaggggacgtaccagggcctcacagccactgtcctgaagcagggctcgaaccaggccatccgcttcttcgtcatgacctccctgcgcaactggtaccgaggggacaaccccaacaagcccatgaaccctctgatcactggggtcttcggagctattgcaggcgcagccagtgtctttggaaacactcctctggatgtgattaagacccggatgcagggcctggaggcgcacaaataccggaacacgtgggactgcggcttgcagatcctgaagaaggaggggctcaaggcattctacaagggcactgtcccccgcctgggccgggtctgcctggatgtggccatagtgtttgtcatctatgatgaagtggtgaagctgctcaacaaagtgtggaagacggactaagcctagagaggccgcaaggggaccgccccaggcaccgccagagtgtcctgctacctttgtctcacgattccagtgcagtagtgccaaaaggccccttcccacgtccctcgagctctgtagcctggtctgtgcattgtggctgtcaaatccatgtgtcccccctgtggtctgtgtgtgacaccaccactgtgtcccagtgtctggcccagccatggctggatgtgcatctggcctatgaccctgtgcctgtgtttcatgttctgtgtcacgtgaccctgtgccccgcctcccggggtgcccgtgtggcctgggtcctcggccctgtagccctggcccggtcccagtccggtgccttccaccctgccctggcctaccacagctgcctccgggcctcggcctggcttcaccgcattccaggggctgcagccccctgcttctcccgccattggccttaactggccctcgggccctctctccgccccggacagggtggcacccaccactctcaggaccaccctgccaaggcagaataaaccg

SEQ ID NO: 28811 - DNA, 1766 bp, Homo sapiens
  source 1..1766: mol_type = unassigned DNA
gcggggcggtcagcctcctgtcaccgcctgttccggctatggtcccgtccggtgttctgtaagttggcaacctaggctcctgacgcgaccctggtcctgatggcggcggcgacggccgcggcagccctggcggcggccgatccccctcccgcaatgccgcaggcggcaggggccggagggcccacaacccgcagagacttctactggctgcgctcctttctggccggaggtattgctggatgctgtgccaaaacaacagttgctccattggatcgagtaaaggttttattacaagctcacaatcaccattacaagcatttaggagtattttctgcattgcgtgctgttcctcaaaaagaaggattccttggattgtataaaggaaatggtgcaatgatgattcgaatctttccctatggtgcaatccagtttatggcatttgagcattataaaacgttaattactacgaagctgggaatttcaggtcatgtgcacagattaatggctggatccatggcaggtatgacagcagttatctgtacttaccctcttgacatggttagggtccgcctagcattccaggtgaaaggggaacacagctatacaggaattattcatgctttcaaaacaatttatgcaaaggaaggtggtttctttggattttacagaggtctgatgcctactattttaggaatggctccatatgcaggtgtttcattttttacttttggtaccttgaagagtgttgggctttcccatgctcctacccttcttggcagaccttcatcagacaatcctaatgtcttagttttgaaaactcatgtaaacttactttgtggtggtgttgctggagcaatagcgcagacaatatcctacccatttgatgtgactcgtcggcgaatgcaattaggaactgttctgccggaatttgaaaagtgccttaccatgcgggatactatgaagtatgtctatggacaccatggaattcgaaaaggactctatcgtggtttatctcttaattacattcgctgtattccctctcaagcagtggcttttacaacatacgaacttatgaagcagttttttcacctcaactaaaaaaaaattatggttggtttttcttaatacattctcagagggagaaatgaaacattactataattgtggggggaacattacttgaatggggatatttaccctgtcacaagagccactggtattttagtacttgattattttttctttagtcacaaatcagaactgcttaccatactttttgatgccaaacattataccttagaacattgaagaaaatattcctaagctgatgctggctaaaccgctttaaagttttatttggaagtagaactagctttaaaacggggttcaagaggttgccattagctttgtcatgctgttcaaagtttttaattgttatcatggtttttaaaagactgacagtgtttattattattaaaataaacagggttggttatattgcaatagaataatgagaattgaatttttaagttctatgaaacagccagcattgacattttatttttgttatctctcttctcacaattatgctccactggataataggaaaaacacttctttccttcattttttaaataaaattaatgttgtatttaaaaggtagccatgtagagacacaaaaataaatgaagaagctggacatggtgggatgggcatgtggtcccagctactctggaagctgaggtgagaggatcacttgagccctg

SEQ ID NO: 28812 - DNA, 1644 bp, Homo sapiens
  source 1..1644: mol_type = unassigned DNA
gtaagttggcaacctaggctcctgacgcgaccctggtcctgatggcggcggcgacggccgcggcagccctggcggcggccgatccccctcccgcaatgccgcaggcggcaggggccggagggcccacaacccgcagagacttctactggctgcgctcctttctggccggagaagaagaggagtttacttcaaacagaacctggcaatcggataaataccttcaagtgtctgtctccgtaaaaatgttccagaagaagaggaggttacttcaaacagaacctggcagttggattaataccttgaagtgtctgtctccataaccacattttagcaagattcccagccttcctcaggtattgctggatgctgtgccaaaacaacagttgctccattggatcgagtaaaggttttattacaagctcacaatcaccattacaagcatttaggagtattttctgcattgcgtgctgttcctcaaaaagaaggattccttggattgtataaaggaaatggtgcaatgatgattcgaatctttccctatggtgcaatccagtttatggcatttgagcattataaaacgttaattactacgaagctgggaatttcaggtcatgtgcacagattaatggctggatccatggcaggtatgacagcagttatctgtacttaccctcttgacatggttagggtccgcctagcattccaggtgaaaggggaacacagctatacaggaattattcatgctttcaaaacaatttatgcaaaggaaggtggtttctttggattttacagaggtctgatgcctactattttaggaatggctccatatgcaggtgtttcattttttacttttggtaccttgaagagtgttgggctttcccatgctcctacccttcttggcagaccttcatcagacaatcctaatgtcttagttttgaaaactcatgtaaacttactttgtggtggtgttgctggagcaatagcgcagacaatatcctacccatttgatgtgactcgtcggcgaatgcaattaggaactgttctgccggaatttgaaaagtgccttaccatgcgggatactatgaagtatgtctatggacaccatggaattcgaaaaggactctatcgtggtttatctcttaattacattcgctgtattccctctcaagcagtggcttttacaacatacgaacttatgaagcagttttttcacctcaactaaaaaaaaattatggttggtttttcttaatacattctcagagggagaaatgaaacattactataattgtggggggaacattacttgaatggggatatttaccctgtcacaagagccactggtattttagtacttgattattttttctttagtcacaaatcagaactgcttaccatactttttgatgccaaacattataccttagaacattgaagaaaatattcctaagctgatgctggctaaaccgctttaaagttttatttggaagtagaactagctttaaaacggggttcaagaggttgccattagctttgtcatgctgttcaaagtttttaattgttatcatggtttttaaaagactgacagtgtttattattattaaaataaacagggttggttatattgcaatagaataatgagaattg

SEQ ID NO: 28813 - DNA, 1586 bp, Homo sapiens
  source 1..1586: mol_type = unassigned DNA
gggcgctcctgagcttcgcggggccgcagtccgggatgcctgcgcgaagggaggggcgaagggccggccgttgccgacgtgggtgttaagtggccgccccagccggcgacccggagccgagagcgggcggcggagcctgagctggacgcggccacgccggcgcggcgggatatgtggtgcctgtcataagctccagagagctgccttccacaagaccagcagaagagtgggcaaacatgaaatccaatcctgctatccaggctgccattgacctcacagcgggggctgcaggaggtacagcatgtgtactgaccgggcagccctttgacacaatgaaagtgaagatgcagacgttccctgacctgtaccggggcctcaccgactgctgcctgaagacttactcccaggtgggcttccgtggcttctacaagggtaccagtccagcactaatcgccaacatcgctgagaactcagtcctcttcatgtgctacggcttctgccagcaggtggtgcggaaagtggctggattggacaagcaggcaaagctgagtgatctgcagaatgcagccgccggttccttcgcctctgcctttgctgcactggtgctctgccccacggagctcgtgaagtgccggctgcagaccatgtatgagatggagacatcagggaagatagccaagagccagaatacagtgtggtctgtcatcaaaagtattcttaggaaagatggccccttggggttctaccatggactctcaagcactttacttcgagaagtaccaggctatttcttcttcttcggtggctatgaactgagccggtccttttttgcatcagggagatcaaaagatgaattaggccctgtacctttgatgttaagtggtggagttggtgggatttgcctctggcttgcggtatacccagtggattgtatcaaatccagaattcaagttctttccatgtctggaaaacaggcaggatttatcagaacctttataaatgttgtgaaaaatgaaggaataacggccttatattctggactgaaacctactatgattcgagcattccctgccaatggagcactctttttggcctacgaatatagcaggaagttgatgatgaaccagttggaagcatactgaagtgtcttggtgggcctgagccaagcacaggtgtttgaggactacagttcatctcagggtttcttggagtacaagaccagtgtgaagttattctgatttcttgggaattttgctttttgtcttcccttctaccctacatcttaaactttatggaagaacctctattttgcatcatatcatttctgtccataattgtactgaaatagaaaagtgaccgctcttgctcttggtaaaatatagagtggtcagtagccttatgcacctaattcaaaaggtggaatatagttctgtcagggcttttacgtaaacctccacttgtacatgcaatttggacagttatgtgttgagggaaatacagtttggtaccttgtttatttcaaatatcagaaaaacccagaggtgatcatttctcatgaagatgcttataaatggttgcttaaccca

SEQ ID NO: 28814 - DNA, 1166 bp, Homo sapiens
  source 1..1166: mol_type = unassigned DNA
gggcgctcctgagcttcgcggggccgcagtccgggatgcctgcgcgaagggaggggcgaagggccggccgttgccgacgtgggtgttaagtggccgccccagccggcgacccggagccgagagcgggcggcggagcctgagctggacgcggccacgccggcgcggcgggatatgtggtgcctgtcataagctccagagagctgccttccacaagaccagcagaagagtgggcaaacatgaaatccaatcctgctatccaggctgccattgacctcacagcgggggctgcaggaggtacagcatgtgtactgaccgggcagccctttgacacaatgaaagtgaagatgcagacgttccctgacctgtaccggggcctcaccgactgctgcctgaagacttactcccaggtgggcttccgtggcttctacaagggtaccagtccagcactaatcgccaacatcgctgagaactcagtcctcttcatgtgctacggcttctgccagcaggtggtgcggaaagtggctggattggacaagcaggcaaagctgagtacagtgtggtctgtcatcaaaagtattcttaggaaagatggccccttggggttctaccatggactctcaagcactttacttcgagaagtaccaggctatttcttcttcttcggtggctatgaactgagccggtccttttttgcatcagggagatcaaaagatgaattaggccctgtacctttgatgttaagtggtggagttggtgggatttgcctctggcttgcggtatacccagtggattgtatcaaatccagaattcaagttctttccatgtctggaaaacaggcaggatttatcagaacctttataaatgttgtgaaaaatgaaggaataacggccttatattctggactgaaacctactatgattcgagcattccctgccaatggagcactctttttggcctacgaatatagcaggaagttgatgatgaaccagttggaagcatactgaagtgtcttggtgggcctgagccaagcacaggtgtttgaggactacagttcatctcagggtttcttggagtacaagaccagtgtgaagttattctgatttcttgggaattttgctttttgtcttcccttctaccctacatcttaaactttatggaagaacctc

SEQ ID NO: 28815 - DNA, 468 bp, Homo sapiens
  source 1..468: mol_type = unassigned DNA
ggatatgtggtgcctgtcataagctccagagagctgccttccacaagaccagcagaagagtgggcaaacatgaaatccaatcctgctatccaggctgccattgacctcacagcgggggctgcaggaggtacagcatgtgtactgaccgggcagccctttgacacaatgaaagtgaagatgcagacgttccctgacctgtaccggggcctcaccgactgctgcctgaagacttactcccaggtgggcttccgtggcttctacaagggtaccagtccagcactaatcgccaacatcgctgagaactcagtcctcttcatgtgctacggcttctgccagcaggtggtgcggaaagtggctggattggacaagcaggcaaagctgagtacagtgtggtctgtcatcaaaagtattcttaggaaagatggccccttggggttctaccatggactctcaagcactttacttcga

SEQ ID NO: 28816 - DNA, 2738 bp, Homo sapiens
  source 1..2738: mol_type = unassigned DNA
ggggcgctcctgagcttcgcggggccgcagtccgggatgcctgcgcgaagggaggggcgaagggccggccgttgccgacgtgggtgttaagtggccgccccagccggcgacccggagccgagagcgggcggcggagcctgagctggacgcggccacgccggcgcggcgggatatgtggtgcctgtcataagctccagagagctgccttccacaagaccagcagaagagtgggcaaacatgaaatccaatcctgctatccaggctgccattgacctcacagcgggggctgcaggaggtacagcatgtgtactgaccgggcagccctttgacacaatgaaagtgaagatgcagacgttccctgacctgtaccggggcctcaccgactgctgcctgaagacttactcccaggtgggcttccgtggcttctacaagggtaccagtccagcactaatcgccaacatcgctgagaactcagtcctcttcatgtgctacggcttctgccagcaggtggtgcggaaagtggctggattggacaagcaggcaaagctgagtgatctgcagaatgcagccgccggttccttcgcctctgcctttgctgcactggtgctctgccccacggagctcgtgaagtgccggctgcagaccatgtatgagatggagacatcagggaagatagccaagagccagaatacagtgtggtctgtcatcaaaagtattcttaggaaagatggccccttggggttctaccatggactctcaagcactttacttcgagaagtaccaggctatttcttcttcttcggtggctatgaactgagccggtccttttttgcatcagggagatcaaaagatgaattaggccctgtacctttgatgttaagtggtggagttggtgggatttgcctctggcttgcggtatacccagtggattgtatcaaatccagaattcaagttctttccatgtctggaaaacaggcaggatttatcagaacctttataaatgttgtgaaaaatgaaggaataacggccttatattctggactgaaacctactatgattcgagcattccctgccaatggagcactctttttggcctacgaatatagcaggaagttgatgatgaaccagttggaagcatactgaagtgtcttggtgggcctgagccaagcacaggtgtttgaggactacagttcatctcagggtttcttggagtacaagaccagtgtgaagttattctgatttcttgggaattttgctttttgtcttcccttctaccctacatcttaaactttatggaagaacctctattttgcatcatatcatttctgtccataattgtactgaaatagaaaagtgaccgctcttgctcttggtaaaatatagagtggtcagtagccttatgcacctaattcaaaaggtggaatatagttctgtcagggcttttacgtaaacctccacttgtacatgcaatttggacagttatgtgttgagggaaatacagtttggtaccttgtttatttcaaatatcagaaaaacccagaggtgatcatttctcatgaagatgcttataaatggttgcttaacccattctagatgtagggtctgcttaatgtgtgtacttttctaagtggtggcacgtgcctgtaatcccagctactcaggaggctgaggcaggagaatcgcttgaacccgggaggcagaggttgcagtgaactgagattgtgccactgcactccagactgggtgacacagcgagacttcatctcaaaaaaaaaaagaaaagaaaagcaattgtacttcactatgccatatgtatgtattcactgaccaaaaattcactgaccaaccaaccaaactccacacttcatctgatcccccatagacttggggatggacagctgttctttggccatatggtataagaggatcattcttgtcactacttaagttagcctcatcattttgtgctgctccaacaccagcagggtatctcccaataaagtgttcctaagcagcctgtatactgagtgcaagcaggctatcaattttaataatagtccataccatgtatgtgtttctgtcagcagaatgtacatgttgtacaaaacctccaggttccttaagctttttgctgtccatgaatcctctgtggcaactgtaatcacagagccagaagccagagggccagggatatgagaggctgacaaacatcaggggacatctggggaggagatccctgtcatgtctcttgtgccatggagctattatggctggtcttccatttgctttttctttaagtgaaaaccatttttctactttgcttttctctccatacttaaatggtcagtagctactgagtggtgctttatctgaataggcctggatcgaagtaaaatagaaatgggactggctttccacaggaagtaaactgcttcagagcccacagtcccctgctcagtgtccggaaagaagtcagtcatccctgttggcagtaaatcttcccacaggccgtccattagagatttaactagatatgttcaatagaaagagtctgaggcaagtggaaatgaggaacggaaacttaggttgggagaatattttttttttattcattctgtttgcttaattcagagtacagtttgtgctatttcatatctgtactccaggcagaaatataacttgaaaatactgtgtctaaagaaatttcagtgttctatcattaaattatttacttaata

SEQ ID NO: 28817 - DNA, 1562 bp, Homo sapiens
  source 1..1562: mol_type = unassigned DNA
gttaagtggccgccccagccggcgacccggagccgagagcgggcggcggagcctgagctggacgcggccacgccggcgcggcgggatatgtggtgcctgtcataagctccagagagctgccttccacaagaccagcagaagagtgggcaaacatgaaatccaatcctgctatccaggctgccattgacctcacagcgggggctgcaggaggtacagcatgtgtactgaccgggcagccctttgacacaatgaaagtggctggattggacaagcaggcaaagctgagtgatctgcagaatgcagccgccggttccttcgcctctgcctttgctgcactggtgctctgccccacggagctcgtgaagtgccggctgcagaccatgtatgagatggagacatcagggaagatagccaagagccagaatacagtgtggtctgtcatcaaaagtattcttaggaaagatggccccttggggttctaccatggactctcaagcactttacttcgagaagtaccaggctatttcttcttcttcggtggctatgaactgagccggtccttttttgcatcagggagatcaaaagatgaattaggccctgtacctttgatgttaagtggtggagttggtgggatttgcctctggcttgcggtatacccagtggattgtatcaaatccagaattcaagttctttccatgtctggaaaacaggcaggatttatcagaacctttataaatgttgtgaaaaatgaaggaataacggccttatattctggactgaaacctactatgattcgagcattccctgccaatggagcactctttttggcctacgaatatagcaggaagttgatgatgaaccagttggaagcatactgaagtgtcttggtgggcctgagccaagcacaggtgtttgaggactacagttcatctcagggtttcttggagtacaagaccagtgtgaagttattctgatttcttgggaattttgctttttgtcttcccttctaccctacatcttaaactttatggaagaacctctattttgcatcatatcatttctgtccataattgtactgaaatagaaaagtgaccgctcttgctcttggtaaaatatagagtggtcagtagccttatgcacctaattcaaaaggtggaatatagttctgtcagggcttttacgtaaacctccacttgtacatgcaatttggacagttatgtgttgagggaaatacagtttggtaccttgtttatttcaaatatcagaaaaacccagaggtgatcatttctcatgaagatgcttataaatggttgcttaacccattctagatgtagggtctgcttaatgtgtgtacttttctaagtggttgattattttttatttttttgatacagagtctcactctgtcacccagactggagtgcagtggcacgatctcggctcactgcaacctccgcctcctgggttcaagcgattctctcacctcagcctcctgagtagctgggattacaggtacgcgccaccatgtccagctaattttttttggtattttttgtagagac

SEQ ID NO: 28818 - DNA, 1417 bp, Homo sapiens
  source 1..1417: mol_type = unassigned DNA
cggagcgtagggttgagcggcttcccccgcactggggtgagagcccagaacaggcggtagagccaccccaccacccccaactccattccccgcgctcgctgcggctggacgtgaaaagccggtctcacgctctggggagttagtcgccttccactgggaccctcagacgagtgagcgaacatgaagtccggtcctggcatccaagccgccatcgacctcacagcgggggccgcaggggggacagcgtgtgtactgactgggcagcccttcgacacaataaaagtgaagatgcagacgttccctgacctgtacaagggcctcaccgactgcttcctgaagacatacgcccaagtgggtctccggggcttctacaagggcaccggcccggcacttatggcctacgtcgccgaaaactcggtcctcttcatgtgctacgggttctgccagcagtttgtcaggaaagtggctggaatggacaagcaggcaaagctgagtgatctccagactgcagccgcggggtccttcgcctctgcatttgctgcactggctctctgccccactgagcttgtgaagtgccggctacagaccatgtatgaaatggagatgtcagggaagatagcaaaaagccataatacaatttggtctgtcgtgaagggtatccttaaaaaggatggccccttgggcttctaccatggactctcgagtactctacttcaagaagtaccgggttatttctttttctttggtggctatgaactgagccgatcgttttttgcgtcagggagatcaaaagatgaactaggccctgtccatttgatgttaagtggtggagttgctggaatttgcctgtggcttgtcgtgttcccagtggattgtattaaatccagaattcaagttctttccatgtatgggaaacaggcaggatttattggtaccctcttaagtgttgtgagaaatgaaggaatagtagccttatattctggactgaaagctactatgattcgagcaatccctgccaatggggcactgtttgtggcctacgaatacagcaggaagatgatgatgaaacagttggaagcatactgaagtgtcttggtgaacctggatccgagtccatgagtttgaggactacagttcatcacagggttcagcagagtacaagaccactgtctaattttgacttcatgggaattttggttttatcttcccttcttctaccctaaatcttaactttatggaagggcctctattttacatcatataatttctgcccataattgtattgaaataggaaagttgctgctcttgcacttgctggaatgtacagggtgggctggttggccctatgtacctaatctgaaaaactaaatatcgttctgtcagggcctttgcataaagccatttgtgtgtacatgca

SEQ ID NO: 28819 - DNA, 1814 bp, Homo sapiens
  source 1..1814: mol_type = unassigned DNA
aacagcgcctttcctctggtttccaaatcagttacgccccttctcgcacgcttccatcaagctcctccttcagctccgccttactcccggccgcctttgcgctgcgcgcctgcgcccgcgccggcttccagcgggtgtcggacctgagagctggaggggcgtgcgcgcgccctcgctctgttgcgcgcgcggtgtcaccttgggcgcgagcggggccgcgcgcgcacgggacccggagccgagggccattgagtggcgatggcggcgacggcgagtgccggggccggcgggatagacgggaagccccgtacctcccctaagtccgtcaagttcctgtttgggggcctggccgggatgggagctacagtttttgtccagcccctggacctggtgaagaaccggatgcagttgagcggggaaggggccaagactcgagagtacaaaaccagcttccatgccctcaccagtatcctgaaggcagaaggcctgaggggcatttacactgggctgtcggctggcctgctgcgtcaggccacctacaccactacccgccttggcatctataccgtgctgtttgagcgcctgactggggctgatggtactccccctggctttctgctgaaggctgtgattggcatgaccgcaggtgccactggtgcctttgtgggaacaccagccgaagtggctcttatccgcatgactgccgatggccggcttccagctgaccagcgccgtggctacaaaaatgtgtttaacgccctgattcgaatcacccgggaagagggtgtcctcacactgtggcggggctgcatccctaccatggctcgggccgtcgtcgtcaatgctgcccagctcgcctcctactcccaatccaagcagttcttactggactcaggctacttctctgacaacatcttgtgccacttctgtgccagcatgatcagcggtcttgtcaccactgctgcctccatgcctgtggacattgccaagacccgaatccagaacatgcggatgattgatgggaagccggaatacaagaacgggctggacgtgctgttcaaagttgtccgctacgagggcttcttcagcctgtggaagggcttcacgccgtactatgcccgcctgggcccccacaccgtcctcaccttcatcttcttggagcagatgaacaaggcctacaagcgtctcttcctcagtggctgaagcggccgggggctcccactcgcctgctgcgcctatagccactgcgccctgggggcctgggctctgctgccctggacccctctatttatttcccttccacagtgtggtttcttcctctgcggtaaaggacttggtctgttctaccccctgctccagcttgccctgctcgtcctgatcctgtgatttctctgtccttggctattcttgcagggagctggaaaacttctgaggatttctggcctccccctgggttttagtttcagggcacacaggacagcagaagatcccctttgtcagtggggaaaccaaggcagagctgaggggacagggaggagcagaagccatcaagatggtcaaagggcctgcagagggagatgtggcccttcctccccctcattgaggacttaataaattggattgatgacaccagccccaaatctggagagtctggggggtggctaggagaggggaggagactggacaaagaagctggagaataggaactggagtttttaagaaaaattgttaaagaaaaagcagccgctggttttttgcaaatgctgtataaatctgtcatgccacagcagctgacagggccagaaaaactcaaa

SEQ ID NO: 28820 - DNA, 1647 bp, Homo sapiens
  source 1..1647: mol_type = unassigned DNA
acagcgcctttcctctggtttccaaatcagttacgccccttctcgcacgcttccatcaagctcctccttcagctccgccttactcccggccgcctttgcgctgcgcgcctgcgcccgcgccggcttccagcgggtgtcggacctgagagctggaggggcgtgcgcgcgccctcgctctgttgcgcgcgcggtgtcaccttgggcgcgagcggggccgcgcgcgcacgggacccggagccgagggccattgagtggcgatggcggcgacggcgagtgccggggccggcgggatagacgggaagccccgtacctcccctaagtccgtcaagttcctgtttgggggcctggccgggctgtcggctggcctgctgcgtcaggccacctacaccactacccgccttggcatctataccgtgctgtttgagcgcctgactggggctgatggtactccccctggctttctgctgaaggctgtgattggcatgaccgcaggtgccactggtgcctttgtgggaacaccagccgaagtggctcttatccgcatgactgccgatggccggcttccagctgaccagcgccgtggctacaaaaatgtgtttaacgccctgattcgaatcacccgggaagagggtgtcctcacactgtggcggggctgcatccctaccatggctcgggccgtcgtcgtcaatgctgcccagctcgcctcctactcccaatccaagcagttcttactggactcaggctacttctctgacaacatcttgtgccacttctgtgccagcatgatcagcggtcttgtcaccactgctgcctccatgcctgtggacattgccaagacccgaatccagaacatgcggatgattgatgggaagccggaatacaagaacgggctggacgtgctgttcaaagttgtccgctacgagggcttcttcagcctgtggaagggcttcacgccgtactatgcccgcctgggcccccacaccgtcctcaccttcatcttcttggagcagatgaacaaggcctacaagcgtctcttcctcagtggctgaagcggccgggggctcccactcgcctgctgcgcctatagccactgcgccctgggggcctgggctctgctgccctggacccctctatttatttcccttccacagtgtggtttcttcctctgcggtaaaggacttggtctgttctaccccctgctccagcttgccctgctcgtcctgatcctgtgatttctctgtccttggctattcttgcagggagctggaaaacttctgaggatttctggcctccccctgggttttagtttcagggcacacaggacagcagaagatcccctttgtcagtggggaaaccaaggcagagctgaggggacagggaggagcagaagccatcaagatggtcaaagggcctgcagagggagatgtggcccttcctccccctcattgaggacttaataaattggattgatgacaccagccccaaatctggagagtctggggggtggctaggagaggggaggagactggacaaagaagctggagaataggaactggagtttttaagaaaaattgttaaagaaaaagcagccgctggttttttgcaaatgctgtataaatctgtcatgccacagcagctgacagggcc

SEQ ID NO: 28821 - DNA, 2405 bp, Homo sapiens
  source 1..2405: mol_type = unassigned DNA
gtttatccttggttagactgtatttcctatatataatattttgagataccttaaatcaaaactttatttcttcaattatctttaaatggattttagtaaaagacttctcttccttaggattttttctcttggttcttcagatcttgactagagccagacagttggatgtgtgcttttttactgagtttgttcattgcttcatttgttccactatttatttaacaaatgtttataaagtatataccatgtgtcaggcacattgttacaattctatctggtatttttttttaatcatttcaggactggtgaggaatattttaatatctcaagatggtgttaaattgggatcatatgttttcaaaaaagaagcacctggctcattgtattgttctactctgaggcaaccttggggggccaagatccccatccttaagcttgtaaggatcatgatgcttgtgaagctgtttcaggtgttttgtgacacttacctgatgcttgctgcctgcctatcctaatgctctcagcaaggaggaactcttcagcgagcttctagtctctgttaaggcacttttaaatgtcaccacctttccccctcctgtcactcattgtaccatatccatactcacttcaaaccgtgtgagctacttaagtaagagttgtaaattgtgtgttttatctgatattgtcatggacttagcatgttagctgtaagccactctcatctctaaagctgttacgttaaaattatatttaaagctatatcaaaattgctactttgaatggtatataaattgacaaatagattgcctgttgtacaaatgagggaacttattgctcttcatctggagagctgctgccgccagccattttgctatcagcaaagcttccaaatcgcttctaacagtagtggcttgtgttgtaccctggcacaaagagacaccttaccttaggtctcctaagaggtcagtgacagagatataaatggaatattggtatgtagctttaaagcagcaaagcttaaaagctgacattttgccttccctttttctctccatctttcttgttaaaggagtggttaatgtgttgctaacaactccactctgggtggtaaacaccagactgaagcttcaaggagcaaaatttaggaatgaagacattgtaccaacaaactacaaaggtatcattgatgcttttcatcagatcattcgcgatgaaggaatctcggctttatggaatggcacatttccctcattgctgttggtcttcaatcctgccatccagttcatgttttatgaaggtttaaaacggcagcttttaaagaaacggatgaagctttcttccttggatgtgttcatcattggtgcagtagccaaagcgattgccaccacggtgacctatcccctgcagacggtacagtcaattctgaggtttgggcgtcatagactaaacccagaaaacagaacattgggaagtcttcggaatattctctatcttcttcaccaacgagtaagacgttttggaataatgggactctacaaaggccttgaagccaaactgctgcagacagtcctcactgctgctctcatgttccttgtttatgagaaactgacagctgccaccttcacagttatggggctgaagcgtgcacaccaacactgagacgccttcccatgaaaaattccgaagatgctcaagagggaggtttcctcctgagtgaagagaagtgattctcccttgactctggctcctgccaccacaaatgttaccctcattggcttgaaaagcatccaagggtgcacagggagtatggccaactggacctgttgtcaccttaattgtcatgctggctggttggattttggggtggcagttggactaatgtgaaaaaaacattgctgaaaacctaaaaatgaaagtttgtgagtgtttattggttttcttaagagaaatggactattttgctctcatgtgtaatgttttctatttaaatctttcttaaatataccagctgttctctttccctgaactctcccccaggttctaggacaaatttaataacatgtaattctcctcaaatacttttgtatgtctcagtgttggtgttttcctccctaaaactaacattagggctgtgccacgggcatgactttatttttgttgggcttttttttccctgcttaaggagaggtgtcttttttggatatgagctatttattttgtgaaatgaaaattgttcacccaaatgattctcttataaactatttgtaaatgtcacttattcattagtgtttgacataatttttagaatatttattttgaatcaatcctttcattacgaaagacttgaagttttgtgtccattcttacaagccctggtcagtcaagtcccaataaatggtcagcac

SEQ ID NO: 28822 - DNA, 565 bp, Homo sapiens
  source 1..565: mol_type = unassigned DNA
aggcgggcgggtttgagagggcggggattgcgactctcacaccctgagctccggtgctcctttcctaactccactggctgcggcatctgtgggaaaagtgtggctgggtcttcgaggagccgcaccaatggcttccgtgctgtcctacgaaagcctggtccacgccgtggccggagccgtgttgtgactcccggccaggcacagtggctcacacctgtaatcccggcactttgggaggcctgaggcgggtggatcatgaggtcaggagatcgagaccatcctggctaacatgggaagcgtgacagcaatgacagtgttttttcccctggatacagctagacttcgacttcaggttgatgagaaaagaaaatccaaaactacacacatggtgctcctggagatcattaaagaagaaggactcctggcaccatatcgagggtggtttccagtgatttccagtctctgctgctccaattttgtctatttctacacttttaatagcctcaaagcactctgggtcaaaggtcaacattctaccactggaaaagatctggtagttgggttt

SEQ ID NO: 28823 - DNA, 2262 bp, Homo sapiens
  source 1..2262: mol_type = unassigned DNA
ctagggcaggcgggcgggtttgagagggcggggattgcgactctcacaccctgagctccggtgctcctttcctaactccactggctgcggcatctgtgggaaaagtgtggctgggtcttcgaggagccgcaccaatggcttccgtgctgtcctacgaaagcctggtccacgccgtggccggagccgtgggaagcgtgacagcaatgacagtgttttttcccctggatacagctagacttcgacttcaggttgatgagaaaagaaaatccaaaactacacacatggtgctcctggagatcattaaagaagaaggactcctggcaccatatcgagggtggtttccagtgatttccagtctctgctgctccaattttgtctatttctacacttttaatagcctcaaagcactctgggtcaaaggtcaacattctaccactggaaaagatctggtagttgggtttgttgcaggagtggttaatgtgttgctaacaactccactctgggtggtaaacaccagactgaagcttcaaggagcaaaatttaggaatgaagacattgtaccaacaaactacaaaggtatcattgatgcttttcatcagatcattcgcgatgaaggaatctcggctttatggaatggcacatttccctcattgctgttggtcttcaatcctgccatccagttcatgttttatgaaggtttaaaacggcagcttttaaagaaacggatgaagctttcttccttggatgtgttcatcattggtgcagtagccaaagcgattgccaccacggtgacctatcccctgcagacggtacagtcaattctgaggtttgggcgtcatagactaaacccagaaaacagaacattgggaagtcttcggaatattctctatcttcttcaccaacgagtaagacgttttggaataatgggactctacaaaggccttgaagccaaactgctgcagacagtcctcactgctgctctcatgttccttgtttatgagaaactgacagctgccaccttcacagttatggggctgaagcgtgcacaccaacactgagacgccttcccatgaaaaattccgaagatgctcaagagggaggtttcctcctgagtgaagagaagtgattctcccttgactctggctcctgccaccacaaatgttaccctcattggcttgaaaagcatccaagggtgcacagggagtatggccaactggacctgttgtcaccttaattgtcatgctggctggttggattttggggtggcagttggactaatgtgaaaaaaacattgctgaaaacctaaaaatgaaagtttgtgagtgtttattggttttcttaagagaaatggactattttgctctcatgtgtaatgttttctatttaaatctttcttaaatataccagctgttctctttccctgaactctcccccaggttctaggacaaatttaataacatgtaattctcctcaaatacttttgtatgtctcagtgttggtgttttcctccctaaaactaacattagggctgtgccacgggcatgactttatttttgttgggcttttttttccctgcttaaggagaggtgtcttttttggatatgagctatttattttgtgaaatgaaaattgttcacccaaatgattctcttataaactatttgtaaatgtcacttattcattagtgtttgacataatttttagaatatttattttgaatcaatcctttcattacgaaagacttgaagttttgtgtccattcttacaagccctggtcagtcaagtcccaataaatggtcagcacaaaaaagatattcttgaaaattgctctttattaaggtattacgttgagtttgcaaccagatgggaaaaatcacaaaaatgagaaggggagcagatatcttgttgaggtctggatattatctccctttataaacttggtgtaggccgtatattttgaaaataaacatctggttgaggttatttcatttggaaaccttccttagagtcctgttgctcagtgtggtccatcagacggtagtactgccacaagctgagagcttgctgggcacgcaacccagagtttctgaatcctgttccgtattttaacattcccaggtgattcacagccacattaaagttcaggagaccataggacccctgacccatgagaagaagtgattggtttcgattatagacatcaagataaagatttttctcaaaggaaagagattaatgtattaaaacaacctctgaaaaatc

SEQ ID NO: 28824 - DNA, 777 bp, Homo sapiens
  source 1..777: mol_type = unassigned DNA
gtgggaaaagtgtggctgggtcttcgaggagccgcaccaatggcttccgtgctgtcctacgaaagcctggtccacgccgtggccggagccgtgggaagcgtgacagcaatgacagtgttttttcccctggatacagctagacttcgacttcagggagtggttaatgtgttgctaacaactccactctgggtggtaaacaccagactgaagcttcaaggagcaaaatttaggaatgaagacattgtaccaacaaactacaaaggtatcattgatgcttttcatcagatcattcgcgatgaaggaatctcggctttatggaatggcacatttccctcattgctgttggtcttcaatcctgccatccagttcatgttttatgaaggtttaaaacggcagcttttaaagaaacggatgaagctttcttccttggatgtgttcatcattggtgcagtagccaaagcgattgccaccacggtgacctatcccctgcagacggtacagtcaattctgaggtttgggcgtcatagactaaacccagaaaacagaacattgggaagtcttcggaatattctctatcttcttcaccaacgagtaagacgttttggaataatgggactctacaaaggccttgaagccaaactgctgcagacagtcctcactgctgctctcatgttccttgtttatgagaaactgacagctgccaccttcacagttatggggctgaagcgtgcacaccaacactgagacgccttcccatgaaaaattccgaagatgctc

SEQ ID NO: 28825 - DNA, 1505 bp, Homo sapiens
  source 1..1505: mol_type = unassigned DNA
aactccactggctgcggcatctgtgggaaaagtgtggctgggtcttcgaggagccgcaccaatggcttccgtgctgtcctacgaaagcctggtccacgccgtggccggagccgtgggaagcgtgacagcaatgacagtgttttttcccctggatacagctagacttcgacttcaggatttgttcaagttgaaattgtaaacctatgccagaacttgcatgaagagatgattgatgagaaaagaaaatccaaaactacacacatggtgctcctggagatcattaaagaagaaggactcctggcaccatatcgagggtggtttccagtgatttccagtctctgctgctccaattttgtctatttctacacttttaatagcctcaaagcactctgggtcaaaggtcaacattctaccactggaaaagatctggtagttgggtttgttgcaggagtggttaatgtgttgctaacaactccactctgggtggtaaacaccagactgaagcttcaaggagcaaaatttaggaatgaagacattgtaccaacaaactacaaaggtatcattgatgcttttcatcagatcattcgcgatgaaggaatctcggctttatggaatggcacatttccctcattgctgttggtcttcaatcctgccatccagttcatgttttatgaaggtttaaaacggcagcttttaaagaaacggatgaagctttcttccttggatgtgttcatcattggtgcagtagccaaagcgattgccaccacggtgacctatcccctgcagacggtacagtcaattctgaggtttgggcgtcatagactaaacccagaaaacagaacattgggaagtcttcggaatattctctatcttcttcaccaacgagtaagacgttttggaataatgggactctacaaaggccttgaagccaaactgctgcagacagtcctcactgctgctctcatgttccttgtttatgagaaactgacagctgccaccttcacagttatggggctgaagcgtgcacaccaacactgagacgccttcccatgaaaaattccgaagatgctcaagagggaggtttcctcctgagtgaagagaagtgattctcccttgactctggctcctgccaccacaaatgttaccctcattggcttgaaaagcatccaagggtgcacagggagtatggccaactggacctgttgtcaccttaattgtcatgctggctggttggattttggggtggcagttggactaatgtgaaaaaaacattgctgaaaacctaaaaatgaaagtttgtgagtgtttattggttttcttaagagaaatggactattttgctctcatgtgtaatgttttctatttaaatctttcttaaatataccagctgttctctttccctgaactctcccccaggttctaggacaaatttaataacatgtaattctcctcaaatacttttgtatgtctcagtgttggtgttttcctccctaaaactaacatta

SEQ ID NO: 28826 - DNA, 1909 bp, Homo sapiens
  source 1..1909: mol_type = unassigned DNA
gtgtgcgtcacgccgacgacgcgcgaagggcacacatcttaggacccggaggacgtccggcctctgtgagccgcaacctttccaagggagtggttgtgtgatcgccatcttagggagtgagtgtggccgggccttctcctgtggcgggtgtggggagcggagcccagagctcctgtggggccgctgctttggcggtgggcccagccgggagcagcctctttcgaaggccgccgtgacctcttcaagggcgtggagacgggaaggaaaaggccccggttggggttccagggcgccggtaacgttaaccggcgccttgcctgtcctctaaccgtcgctccctcctcccctagaaagatgttctcgtccgtggcgcacctggcgcgggcgaaccccttcaacacgccacatctgcagctggtgcacgatggtctcggggacctccgcagcagctccccagggcccacgggccagccccgccgccctcgcaacctggcagccgccgccgtggaagagtacagttgtgaatttggctccgcgaagtattatgcactgtgtggctttggtggggtcttaagttgtggtctgacacacactgctgtggttcccctggatttagtgaaatgccgtatgcaggtggacccccaaaagtacaagggcatatttaacggattctcagttacacttaaagaggatggtgttcgtggtttggctaaaggatgggctccgactttccttggctactccatgcagggactctgcaagtttggcttttatgaagtctttaaagtcttgtatagcaatatgcttggagaggagaatacttatctctggcgcacatcactatatttggctgcctctgccagtgctgaattctttgctgacattgccctggctcctatggaagctgctaaggttcgaattcaaacccagccaggttatgccaacactttgagggatgcagctcccaaaatgtataaggaagaaggcctaaaagcattctacaagggggttgctcctctctggatgagacagataccatacaccatgatgaagttcgcctgctttgaacgtactgttgaagcactgtacaagtttgtggttcctaagccccgcagtgaatgttcaaagccagagcagctggttgtaacatttgtagcaggttacatagctggagtcttttgtgcaattgtttctcaccctgctgattctgtggtatctgtgttgaataaagaaaaaggtagcagtgcttctctggtcctcaagagacttggatttaaaggtgtatggaagggactgtttgcccgtatcatcatgattggtaccctgactgcactacagtggtttatctatgactccgtgaaggtctacttcagacttcctcgccctcctccacccgagatgccagagtctctgaagaagaagcttgggttaactcagtagttagatcaaagcaaatgtggactgaatctgcttgttgatcagtgttgaagaaagtgcaaaaggaacttttatatatttgacagtgtaggaaattgtctattcctgatataattactgtagtactcttgcttaaggcaagagtttcagatttactgttgaaataaacccaactcttcatgatttgcctgtgacttatttttaaaacttttttaaaaaagatttagctttaaaatagttggaaagaatgaagtatataagttaaggaaaaaatacaaaactgaccatgaccattgttggttgaatattccagttgctattcagaaattgtcatatgtctcaagttttatcacacaaagttcctgtatttctagggaagcagactttaaatttctaaaaacttgatttaattatagttaaatatgtgtagtcatttgtggttattttggcaagtaaatgtcagtgtatactt

SEQ ID NO: 28827 - DNA, 1678 bp, Homo sapiens
  source 1..1678: mol_type = unassigned DNA
gtgtgcgtcacgccgacgacgcgcgaagggcacacatcttaggacccggaggacgtccggcctctgtgagccgcaacctttccaagggagtggttgtgtgatcgccatcttagggaaaagatgttctcgtccgtggcgcacctggcgcgggcgaaccccttcaacacgccacatctgcagctggtgcacgatggtctcggggacctccgcagcagctccccagggcccacgggccagccccgccgccctcgcaacctggcagccgccgccgtggaagagcagtatagctgtgactatggatctggcagattctttatcctttgtggacttggaggaattattagctgtggcacaacacatacagcattggttcctctagatctggttaaatgcagaatgcaggtggacccccaaaagtacaagggcatatttaacggattctcagttacacttaaagaggatggtgttcgtggtttggctaaaggatgggctccgactttccttggctactccatgcagggactctgcaagtttggcttttatgaagtctttaaagtcttgtatagcaatatgcttggagaggagaatacttatctctggcgcacatcactatatttggctgcctctgccagtgctgaattctttgctgacattgccctggctcctatggaagctgctaaggttcgaattcaaacccagccaggttatgccaacactttgagggatgcagctcccaaaatgtataaggaagaaggcctaaaagcattctacaagggggttgctcctctctggatgagacagataccatacaccatgatgaagttcgcctgctttgaacgtactgttgaagcactgtacaagtttgtggttcctaagccccgcagtgaatgttcaaagccagagcagctggttgtaacatttgtagcaggttacatagctggagtcttttgtgcaattgtttctcaccctgctgattctgtggtatctgtgttgaataaagaaaaaggtagcagtgcttctctggtcctcaagagacttggatttaaaggtgtatggaagggactgtttgcccgtatcatcatgattggtaccctgactgcactacagtggtttatctatgactccgtgaaggtctacttcagacttcctcgccctcctccacccgagatgccagagtctctgaagaagaagcttgggttaactcagtagttagatcaaagcaaatgtggactgaatctgcttgttgatcagtgttgaagaaagtgcaaaaggaacttttatatatttgacagtgtaggaaattgtctattcctgatataattactgtagtactcttgcttaaggcaagagtttcagatttactgttgaaataaacccaactcttcatgatttgcctgtgacttatttttaaaacttttttaaaaaagatttagctttaaaatagttggaaagaatgaagtatataagttaaggaaaaaatacaaaactgaccatgaccattgttggttgaatattccagttgctattcagaaattgtcatatgtctcaagttttatcacacaaagttcctgtatttctagggaagcagactttaaatttctaaaaacttgatttaattatagttaaatatgtgtagtcatttgtggttattttggcaagtaaatgtcagtgtatactt

SEQ ID NO: 28828 - DNA, 1415 bp, Homo sapiens
  source 1..1415: mol_type = unassigned DNA
accaatgggcgacgcgtacttgcagtggcgcgctgtgtgcgtcacgccgacgacgcgcgaagggcacacatcttaggacccggaggacgtccggcctctgtgagccgcaacctttccaagggagtggttgtgtgatcgccatcttagggaatgttctcgtccgtggcgcacctggcgcgggcgaaccccttcaacacgccacatctgcagctggtgcacgatggtctcggggacctccgcagcagctccccagggcccacgggccagccccgccgccctcgcaacctggcagccgccgccgtggaagagtacagttgtgaatttggctccgcgaagtattatgcactgtgtggctttggtggggtcttaagttgtggtctgacacacactgctgtggttcccctggatttagtgaaatgccgtatgcaggtggacccccaaaagtacaagggcatatttaacggattctcagttacacttaaagaggatggtgttcgtggtttggctaaaggatgggctccgactttccttggctactccatgcagggactctgcaagtttggcttttatgaagtctttaaagtcttgtatagcaatatgcttggagaggagaatacttatctctggcgcacatcactatatttggctgcctctgccagtgctgaattctttgctgacattgccctggctcctatggaagctgctaaggttcgaattcaaacccagccaggttatgccaacactttgagggatgcagctcccaaaatgtataaggaagaaggcctaaaagcattctacaagggggttgctcctctctggatgagacagataccatacaccatgatgaagttcgcctgctttgaacgtactgttgaagcactgtacaagtttgtggttcctaagccccgcagtgaatgttcaaagccagagcagctggttgtaacatttgtagcaggttacatagctggagtcttttgtgcaattgtttctcaccctgctgattctgtggtatctgtgttgaataaagaaaaaggtagcagtgcttctctggtcctcaagagacttggatttaaaggtgtatggaagggactgtttgcccgtatcatcatgattggtaccctgactgcactacagtggtttatctatgactccgtgaaggtctacttcagacttcctcgccctcctccacccgagatgccagagtctctgaagaagaagcttgggttaactcagtagttagatcaaagcaaatgtggactgaatctgcttgttgatcagtgttgaagaaagtgcaaaaggaacttttatatatttgacagtgtaggaaattgtctattcctgatataattactgtagtactcttgcttaaggcaagagtttcagatttactgttgaaataaacccaactcttcatg

SEQ ID NO: 28829 - DNA, 1285 bp, Homo sapiens
  source 1..1285: mol_type = unassigned DNA
cgcaacctttccaagggagtggttgtgtgatcgccatcttagggagtgaaaagatgttctcgtccgtggcgcacctggcgcgggcgaaccccttcaacacgccacatctgcagctggtgcacgatggtctcggggacctccgcagcagctccccagggcccacgggccagccccgccgccctcgcaacctggcagccgccgccgtggaagagtacagttgtgaatttggctccgcgaagtattatgcactgtgtggctttggtggggtcttaagttgtggtctgacacacactgctgtggttcccctggatttagtgaaatgccgtatgcaggtggacccccaaaagtacaagggcatatttaacggattctcagttacacttaaagaggatggtgttcgtggtttggctaaaggatgggctccgactttccttggctactccatgcagggactctgcaagtttggcttttatgaagtctttaaagtcttgtatagcaatatgcttggagaggagaatacttatctctggcgcacatcactatatttggctgcctctgccagtgctgaattctttgctgacattgccctggctcctatggaagctgctaaggttcgaattcaaacccagccaggttatgccaacactttgagggatgcagctcccaaaatgtataaggaagaaggcctaaaagcattctacaagggggttgctcctctctggatgagacagataccatacaccatgatgaagttcgcctgctttgaacgtactgttgaagcactgtacaagtttgtggttcctaagccccgcagtgaatgttcaaagccagagcagctggttgtaacatttgtagcaggttacatagctggagtcttttgtgcaattgtttctcaccctgctgattctgtggtatctgtgttgaataaagaaaaaggtagcagtgcttctctggtcctcaagagacttggatttaaaggtgtatggaagggactgtttgcccgtatcatcatgattggtaccctgactgcactacagtggtttatctatgactccgtgaaggtctacttcagacttcctcgccctcctccacccgagatgccagagtctctgaagaagaagcttgggttaactcagtagttagatcaaagcaaatgtggactgaatctgcttgttgatcagtgttgaagaaagtgcaaaaggaacttttatatatttgacagtgtaggaaattgtctattcctgatataattactgtagtactcttgcttaaggcaagagtttca

SEQ ID NO: 28830 - DNA, 1359 bp, Homo sapiens
  source 1..1359: mol_type = unassigned DNA
aagggcacacatcttaggacccggaggacgtccggcctctgtgagccgcaacctttccaagggagtggttgtgtgatcgccatcttagggaatgttctcgtccgtggcgcacctggcgcgggcgaaccccttcaacacgccacatctgcagctggtgcacgatggtctcggggacctccgcagcagctccccagggcccacgggccagccccgccgccctcgcaacctggcagccgccgccgtggaagagcagtatagctgtgactatggatctggcagattctttatcctttgtggacttggaggaattattagctgtggcacaacacatacagcattggttcctctagatctggttaaatgcagaatgcaggtggacccccaaaagtacaagggcatatttaacggattctcagttacacttaaagaggatggtgttcgtggtttggctaaaggatgggctccgactttccttggctactccatgcagggactctgcaagtttggcttttatgaagtctttaaagtcttgtatagcaatatgcttggagaggagaatacttatctctggcgcacatcactatatttggctgcctctgccagtgctgaattctttgctgacattgccctggctcctatggaagctgctaaggttcgaattcaaacccagccaggttatgccaacactttgagggatgcagctcccaaaatgtataaggaagaaggcctaaaagcattctacaagggggttgctcctctctggatgagacagataccatacaccatgatgaagttcgcctgctttgaacgtactgttgaagcactgtacaagtttgtggttcctaagccccgcagtgaatgttcaaagccagagcagctggttgtaacatttgtagcaggttacatagctggagtcttttgtgcaattgtttctcaccctgctgattctgtggtatctgtgttgaataaagaaaaaggtagcagtgcttctctggtcctcaagagacttggatttaaaggtgtatggaagggactgtttgcccgtatcatcatgattggtaccctgactgcactacagtggtttatctatgactccgtgaaggtctacttcagacttcctcgccctcctccacccgagatgccagagtctctgaagaagaagcttgggttaactcagtagttagatcaaagcaaatgtggactgaatctgcttgttgatcagtgttgaagaaagtgcaaaaggaacttttatatatttgacagtgtaggaaattgtctattcctgatataattactgtagtactcttgcttaaggcaagagtttcagatttactgttgaaataaacccaactcttcatg

SEQ ID NO: 28831 - DNA, 1351 bp, Homo sapiens
  source 1..1351: mol_type = unassigned DNA
atcttaggacccggaggacgtccggcctctgtgagccgcaacctttccaagggagtggttgtgtgatcgccatcttagggaaaagatgttctcgtccgtggcgcacctggcgcgggcgaaccccttcaacacgccacatctgcagctggtgcacgatggtctcggggacctccgcagcagctccccagggcccacgggccagccccgccgccctcgcaacctggcagccgccgccgtggaagagtacagttgtgaatttggctccgcgaagtattatgcactgtgtggctttggtggggtcttaagttgtggtctgacacacactgctgtggttcccctggatttagtgaaatgccgtatgcaggtggacccccaaaagtacaagggcatatttaacggattctcagttacacttaaagaggatggtgttcgtggtttggctaaaggatgggctccgactttccttggctactccatgcagggactctgcaagtttggcttttatgaagtctttaaagtcttgtatagcaatatgcttggagaggagaatacttatctctggcgcacatcactatatttggctgcctctgccagtgctgaattctttgctgacattgccctggctcctatggaagctgctaaggttcgaattcaaacccagccaggttatgccaacactttgagggatgcagctcccaaaatgtataaggaagaaggcctaaaagcattctacaagggggttgctcctctctggatgagacagataccatacaccatgatgaagttcgcctgctttgaacgtactgttgaagcactgtacaagtttgtggttcctaagccccgcagtgaatgttcaaagccagagcagctggttgtaacatttgtagcaggttacatagctggagtcttttgtgcaattgtttctcaccctgctgattctgtggtatctgtgttgaataaagaaaaaggtagcagtgcttctctggtcctcaagagacttggatttaaaggtgtatggaagggactgtttgcccgtatcatcatgattggtaccctgactgcactacagtggtttatctatgactccgtgaaggtctacttcagacttcctcgccctcctccacccgagatgccagagtctctgaagaagaagcttgggttaactcagtagttagatcaaagcaaatgtggactgaatctgcttgttgatcagtgttgaagaaagtgcaaaaggaacttttatatatttgacagtgtaggaaattgtctattcctgatataattactgtagtactcttgcttaaggcaagagtttcagatttactgttgaaataaacccaactcttcatga

SEQ ID NO: 28832 - DNA, 1023 bp, Homo sapiens
  source 1..1023: mol_type = unassigned DNA
atcagtaggctgtgcaggctgcgagctcgttgacgcatctcagcccactcccttgtcctcccgcctggcgaagatgtccgccaagcctgaagtcagcttagtgcgcgaggcttctcggcagatcgtggccggtggttctgcaggtcttgtagaaatttgcctgatgcaccccctagatgtggtgaaaaccaggtttcagattcagagatgtgcaaccgatccaaacagttataaaagcttggtagacagctttcgaatgattttccaaatggaagggttatttggtttttacaagggaattctgccacctatcttggctgaaaccccaaaaagagcagtgaagtttttcacctttgagcagtacaagaaattgctgggatatgtgtcactgtcaccagcattgacattcgccattgctggattgggatctggactaacagaagccattgtagttaacccttttgaggtagtaaaagttggcttgcaagcaaatcggaacacatttgcagagcaaccatccactgtgggttatgcaagacaaatcattaagaaggaaggctggggactccagggcctcaacaaaggattaactgcaactttgggacgacatggagttttcaacatggtttattttggcttctactacaatgtcaaaaacatgattcctgtcaataaggatccaatcttggagttttggagaaaatttgggattggtcttctctcggggacaatagcctcagtcattaacatcccttttgatgttgccaaaagtaggattcaagggcctcaaccagttcctggagagatcaagtacagaacctgttttaaaacaatggcaacagtctatcaggaagaagggattttagctttgtacaaaggcctgcttcccaagattatgagacttggaccaggtggtgcagtgatgctgctggtttatgaatacacctattcatggcttcaagagaactgactgggaactccagatgtcaatggaagttttacaagatcaaaggaagactatgg

SEQ ID NO: 28833 - DNA, 2785 bp, Homo sapiens
  source 1..2785: mol_type = unassigned DNA
ttataggacaactaactgaggaatttattcacttgtcccttcttttgaacctcactgtgctctggcttgccaggaggtgcaagtgtcgtccccgctttgtacttggcgctccaggcctgggtcacttcacttgagttatcagaggcaaccgtctagtttgacaaactaccggaggctcctgatagagaagggcgtgggcgccaatctaggagacaaagcctgagccgctgcggtgagccaacccaaacccatccgcgggtcttctttccagagacattttcggagccgagggcgcctctgcgagagcgctgcgaacaggttccgacgcgccggagatcgcgcgacgaatctgcgcctcgaaccctcgctttccagcagtcgccggattgctgctccacagggagccaacgcgcttgaggaccagcccagccggggctctctggatcagtaggctgtgcaggctgcgagctcgttgacgcatctcagcccactcccttgtcctcccgcctggcgaagatgtccgccaagcctgaagtcagcttagtgcgcgaggcttctcggcagatcgtggccggtggttctgcaggtcttgtagaaatttgcctgatgcaccccctagatgtggtgaaaaccaggtttcagattcagagatgtgcaaccgatccaaacagttataaaagcttggtagacagctttcgaatgattttccaaatggaagggttatttggtttttacaagggaattctgccacctatcttggctgaaaccccaaaaagagcagtgaagtttttcacctttgagcagtacaagaaattgctgggatatgtgtcactgtcaccagcattgacattcgccattgctggattgggatctggactaacagaagccattgtagttaacccttttgaggtagtaaaagttggcttgcaagcaaatcggaacacatttgcagagcaaccatccactgtgggttatgcaagacaaatcattaagaaggaaggctggggactccagggcctcaacaaaggattaactgcaactttgggacgacatggagttttcaacatggtttattttggcttctactacaatgtcaaaaacatgattcctgtcaataaggatccaatcttggagttttggagaaaatttgggattggtcttctctcggggacaatagcctcagtcattaacatcccttttgatgttgccaaaagtaggattcaagggcctcaaccagttcctggagagatcaagtacagaacctgttttaaaacaatggcaacagtctatcaggaagaagggattttagctttgtacaaaggcctgcttcccaagattatgagacttggaccaggtggtgcagtgatgctgctggtttatgaatacacctattcatggcttcaagagaactggtgattgcctatgaagtgtttttcccccttgagataatggatatttgctatgcagcaccatgaagaagagagactatcgatcggccaggtgtataattatgaaggagaaaactgttcaagaacaaaatctattttaatactttaaaaaatgtctataggcaacttgagattatagttttggctgtataaataaaactgtgagaagaaaaaaataatatgaaacaatgaggtatttaaagtgaatatagaaaaatagcatagaaatcatatatttatttcataaaataaatagaaactttgtctcctgtgttcctcttcaatgcttcacaatgaaaattcattgtattgatcagcatttttcctaagaggtctagaaatgcttaaactattgaaaataaatcaaattattcaaagactggattaaaaaaaagttaagccaaaatttaagcagtttttataatgaattaaattattccataaataatatttaaagagcacaagaaaaattttttaaagtgcactaaaatgaccttttaagaatgtttaattttatgaatactatgttaaaatgtaaatctgttggttttttttagtaactatgcacatatcagctctattttcctacatctactttatatctcatattgctgtaagataataaataggtattttaaaacattgtttaaaacagaatgttaaaacactgttgtttaagcatgtttaaatcaaggtattccaaatctcttctaacacaagtaggaaacatgaaataaaatttactttcctccacatagttctctttgaagataagttttgttgatgagatattgtcatgttaaatcacaaattggaaacacctttggacccatttgtcagccatcagtatttgcatccaaatacctttattcagcatgcctacctgtgccatttttaggaagaatgtatagaacagaactgcattttcaggttattagttttaaacgacaacttcaggtgggaagtcagctgtctgcagtattaaaatatgtatgatgaaggggaaatgttctgaaaaagaaatacacttagcatttctaaggattactatactaacatgtatcaacaaaaatatctccttggtcttgatgtaaccaaacttgattttatatctgcatccagagatgatgctgattcagtaaagtcaacaagaataactgaaagtccatatgacacctgtcctaagttactaccgtgggctatttctactacggggctatttcactaaagcattttgaaaataaaaagtaaaagataacatggtaattattactttttattaatttagagcatttgaagtataaaaataaaaggcttttgacatactgtatatacat

SEQ ID NO: 28834 - DNA, 1554 bp, Homo sapiens
  source 1..1554: mol_type = unassigned DNA
tgcgcgaggagctagagagagcggagagcgctgagccgggccgcacccgccgagccgtgaaaaaagtacatctcctggaagggatgctttttagctgagctctggtggatgagaggagctagccttgaaaaacttgatactgatggacattgtgtgggccagaggcagggatggttggctatgaccccaaaccagatggcaggaataacaccaagttccaggtggcagtggctgggtctgtgtctggacttgttactcgggcgctgatcagtcccttcgacgtcatcaagatccgtttccagcttcagcatgagcgcctgtctcgcagtgaccccagcgcaaagtaccatggcatcctccaggcctctaggcagattctgcaggaggagggtccgacagctttctggaaaggacacgtcccagctcagattctctccataggctatggagctgtccaattcttgtcatttgaaatgctgacggagctggtccacagaggcagcgtgtatgacgcccgggaattctcagtgcactttgtatgtggtggcctggctgcctgtatggccaccctcactgtgcaccccgtggatgttctgcgcacccgctttgcagctcagggtgagcccaaggtctataatacgctgcgccacgccgtggggaccatgtataggagcgaaggcccccaggttttctacaaaggcttggctcccaccttgatcgccatcttcccctacgccgggctgcagttctcttgctacagctccttgaagcacctgtacaagtgggccataccagccgaaggaaagaaaaatgagaacctccaaaacctgctttgtggcagtggagctggtgtcatcagcaagaccctgacatatccgctggacctcttcaagaagcggctacaggttggagggtttgagcatgccagagctgcctttggccaggtacggagatacaagggcctcatggactgtgccaagcaggtgctgcaaaaggaaggcgccctgggcttcttcaagggcctgtcccccagcttgctgaaggctgccctctccacaggcttcatgttcttctcgtatgaattcttctgtaatgtcttccactgcatgaacaggacagccagccagcgctgagtgcaggaaggaccccaggtcttccctggaggcagcctcctgaaggaaggaagattcagtctccactgagaggtgccgtctggcccttccctgcaggccagctgccccaagcggggtagcagccttgaacccacccagctgggacaccaccagaaggtccagggctctccccatgagagaatcagagggaatgcaggacgtggtctatggtgagccaacgacacagtgagaaggagcaggaagttgctgtttctcctctgaccagcccacactccaaaggaaacagacgccatcctacacctatcagccctgcctgccaggagaacagaacacactcctggtctggatggggctgctgcttgagtgcagagggctgcggtaggccctttgcaggagtcaggtccctacacttggcctgttt

SEQ ID NO: 28835 - DNA, 1651 bp, Homo sapiens
  source 1..1651: mol_type = unassigned DNA
agtagagttttgctgttaagactgcgcgaggagctagagagagcggagagcgctgagccgggccgcacccgccgagccgtcccttctccctgtgatcagttaccaactacctgttgatgaaaaaagtacatctcctggaagggatgctttttagctgagctctggtggatgagaggagctagccttgaaaaacttgatactgatggacattgtgtgggccagaggcagggatggttggctatgaccccaaaccagatggcaggaataacaccaagttccaggtggcagtggctgggtctgtgtctggacttgttactcgggcgctgatcagtcccttcgacgtcatcaagatccgtttccagcttcagcatgagcgcctgtctcgcagtgaccccagcgcaaagtaccatggcatcctccaggcctctaggcagattctgcaggaggagggtccgacagctttctggaaaggacacgtcccagctcagattctctccataggctatggagctgtccaattcttgtcatttgaaatgctgacggagctggtccacagaggcagcgtgtatgacgcccgggaattctcagtgcactttgtatgtggtggcctggctgcctgtatggccaccctcactgtgcaccccgtggatgttctgcgcacccgctttgcagctcagggtgagcccaaggtctataatacgctgcgccacgccgtggggaccatgtataggagcgaaggcccccaggttttctacaaaggcttggctcccaccttgatcgccatcttcccctacgccgggctgcagttctcttgctacagctccttgaagcacctgtacaagtgggccataccagccgaaggaaagaaaaatgagaacctccaaaacctgctttgtggcagtggagctggtgtcatcagcaagaccctgacatatccgctggacctcttcaagaagcggctacaggttggagggtttgagcatgccagagctgcctttggccaggtacggagatacaagggcctcatggactgtgccaagcaggtgctgcaaaaggaaggcgccctgggcttcttcaagggcctgtcccccagcttgctgaaggctgccctctccacaggcttcatgttcttctcgtatgaattcttctgtaatgtcttccactgcatgaacaggacagccagccagcgctgagtgcaggaaggaccccaggtcttccctggaggcagcctcctgaaggaaggaagattcagtctccactgagaggtgccgtctggcccttccctgcaggccagctgccccaagcggggtagcagccttgaacccacccagctgggacaccaccagaaggtccagggctctccccatgagagaatcagagggaatgcaggacgtggtctatggtgagccaacgacacagtgagaaggagcaggaagttgctgtttctcctctgaccagcccacactccaaaggaaacagacgccatcctacacctatcagccctgcctgccaggagaacagaacacactcctggtctggatggggctgctgcttgagtgcagagggctgcggtaggccctttgcaggagtcaggtccctacacttggcctgtttttccaacctatttaatagacattaaagctaaacacac

SEQ ID NO: 28836 - DNA, 792 bp, Homo sapiens
  source 1..792: mol_type = unassigned DNA
atggttggctatgaccccaaaccagatggcaggaataacaccaagttccaggtggcagtggctgggtctgtgtctggacttgttactcgggcgctgatcagtcccttcgacgtcatcaagatccgtttccagcttcagcatgagcgcctgtctcgcagtgaccccagcgcaaagtaccatggcatcctccaggcctctaggcagattctgcaggaggagggtccgacagctttctggaaaggacacgtcccagctcagattctctccataggctatggagctgtccaagtctataatacgctgcgccacgccgtggggaccatgtataggagcgaaggcccccaggttttctacaaaggcttggctcccaccttgatcgccatcttcccctacgccgggctgcagttctcttgctacagctccttgaagcacctgtacaagtgggccataccagccgaaggaaagaaaaatgagaacctccaaaacctgctttgtggcagtggagctggtgtcatcagcaagaccctgacatatccgctggacctcttcaagaagcggctacaggttggagggtttgagcatgccagagctgcctttggccaggtacggagatacaagggcctcatggactgtgccaagcaggtgctgcaaaaggaaggcgccctgggcttcttcaagggcctgtcccccagcttgctgaaggctgccctctccacaggcttcatgttcttctcgtatgaattcttctgtaatgtcttccactgcatgaacaggacagccagccagcgctga

SEQ ID NO: 28837 - DNA, 2331 bp, Homo sapiens
  source 1..2331: mol_type = unassigned DNA
cacttgagtgggctcactcagtgagcaggagtttgctataaagttgccagatgtcttggaaaaccagttgatctctgggaccaacaattgcctatcaagcctgttcattcgattctcaaatattattaagcacttaccatgatgggctctattccaggaaccggaaatttacgagtgaacaaatgagaccaaggtcgtgtttccacgggcttacattctagtcagggagagagacaagaaacaaatgtactgtataaataacccatggcgtgccgggcgctgtggctcatgcatgtaatctcagcaattcaggaggctgaggcaggagaatcacttgaggccaggagttcgagaccagccagggcaacattgagaccttatctctacaaaaataaaaaacttagccaggcctgcacctgttaagtgacagctaattgggaggctgaggcaagagaatcacttgagcccaggagttcaaggctatggtgagttatgatggcaccactgcattccagcctgggcaacagagtgagaccctgtctctaaaaaagtaaacaaatatgccatagtaataagtactgtaaagaggaataaaacaagtgctattttattttatttttaaatttttgtattttttgtagagttggggttttgcagtgttgcccaggctggtcttgaactcctgagctcaagcaatccacccacctcggcctccgaaagtgctgggatacaggcatgaaccgctgcgcccagtccaaaagtgagtgctattttagacagtctagtcagggagggctgctctgaggaggtgatatttgagcagagaccataagaaacttgcctggtgtttattccgtatctcttgcatttagcttgatactgatggacattgtgtgggccagaggcagggatggttggctatgaccccaaaccagatggcaggaataacaccaagttccaggtggcagtggctgggtctgtgtctggacttgttactcgggcgctgatcagtcccttcgacgtcatcaagatccgtttccagcttcagcatgagcgcctgtctcgcagtgaccccagcgcaaagtaccatggcatcctccaggcctctaggcagattctgcaggaggagggtccgacagctttctggaaaggacacgtcccagctcagattctctccataggctatggagctgtccaattcttgtcatttgaaatgctgacggagctggtccacagaggcagcgtgtatgacgcccgggaattctcagtgcactttgtatgtggtggcctggctgcctgtatggccaccctcactgtgcaccccgtggatgttctgcgcacccgctttgcagctcagggtgagcccaaggtctataatacgctgcgccacgccgtggggaccatgtataggagcgaaggcccccaggttttctacaaaggcttggctcccaccttgatcgccatcttcccctacgccgggctgcagttctcttgctacagctccttgaagcacctgtacaagtgggccataccagccgaaggaaagaaaaatgagaacctccaaaacctgctttgtggcagtggagctggtgtcatcagcaagaccctgacatatccgctggacctcttcaagaagcggctacaggttggagggtttgagcatgccagagctgcctttggccaggtacggagatacaagggcctcatggactgtgccaagcaggtgctgcaaaaggaaggcgccctgggcttcttcaagggcctgtcccccagcttgctgaaggctgccctctccacaggcttcatgttcttctcgtatgaattcttctgtaatgtcttccactgcatgaacaggacagccagccagcgctgagtgcaggaaggaccccaggtcttccctggaggcagcctcctgaaggaaggaagattcagtctccactgagaggtgccgtctggcccttccctgcaggccagctgccccaagcggggtagcagccttgaacccacccagctgggacaccaccagaaggtccagggctctccccatgagagaatcagagggaatgcaggacgtggtctatggtgagccaacgacacagtgagaaggagcaggaagttgctgtttctcctctgaccagcccacactccaaaggaaacagacgccatcctacacctatcagccctgcctgccaggagaacagaacacactcctggtctggatggggctgctgcttgagtgcagagggctgcggtaggccctttgcaggagtcaggtccctacacttggcctgtttttccaacctatttaatagacattaaagctaaacacac

SEQ ID NO: 28838 - DNA, 1657 bp, Homo sapiens
  source 1..1657: mol_type = unassigned DNA
agtttcgtccgagctcagtagagttttgctgttaagactgcgcgaggagctagagagagcggagagcgctgagccgggccgcacccgccgagccgtcccttctccctgtgatcagttaccaactacctgttgatgtgtgtggttacagacttctttctatgctttgtacaactctacagaccgtatcttgatactgatggacattgtgtgggccagaggcagggatggttggctatgaccccaaaccagatggcaggaataacaccaagttccaggtggcagtggctgggtctgtgtctggacttgttactcgggcgctgatcagtcccttcgacgtcatcaagatccgtttccagcttcagcatgagcgcctgtctcgcagtgaccccagcgcaaagtaccatggcatcctccaggcctctaggcagattctgcaggaggagggtccgacagctttctggaaaggacacgtcccagctcagattctctccataggctatggagctgtccaattcttgtcatttgaaatgctgacggagctggtccacagaggcagcgtgtatgacgcccgggaattctcagtgcactttgtatgtggtggcctggctgcctgtatggccaccctcactgtgcaccccgtggatgttctgcgcacccgctttgcagctcagggtgagcccaaggtctataatacgctgcgccacgccgtggggaccatgtataggagcgaaggcccccaggttttctacaaaggcttggctcccaccttgatcgccatcttcccctacgccgggctgcagttctcttgctacagctccttgaagcacctgtacaagtgggccataccagccgaaggaaagaaaaatgagaacctccaaaacctgctttgtggcagtggagctggtgtcatcagcaagaccctgacatatccgctggacctcttcaagaagcggctacaggttggagggtttgagcatgccagagctgcctttggccaggtacggagatacaagggcctcatggactgtgccaagcaggtgctgcaaaaggaaggcgccctgggcttcttcaagggcctgtcccccagcttgctgaaggctgccctctccacaggcttcatgttcttctcgtatgaattcttctgtaatgtcttccactgcatgaacaggacagccagccagcgctgagtgcaggaaggaccccaggtcttccctggaggcagcctcctgaaggaaggaagattcagtctccactgagaggtgccgtctggcccttccctgcaggccagctgccccaagcggggtagcagccttgaacccacccagctgggacaccaccagaaggtccagggctctccccatgagagaatcagagggaatgcaggacgtggtctatggtgagccaacgacacagtgagaaggagcaggaagttgctgtttctcctctgaccagcccacactccaaaggaaacagacgccatcctacacctatcagccctgcctgccaggagaacagaacacactcctggtctggatggggctgctgcttgagtgcagagggctgcggtaggccctttgcaggagtcaggtccctacacttggcctgtttttccaacctatttaatagacattaaagctaaacacacattccttatctt

SEQ ID NO: 28839 - DNA, 1567 bp, Homo sapiens
  source 1..1567: mol_type = unassigned DNA
agtttcgtccgagctcagtagagttttgctgttaagactgcgcgaggagctagagagagcggagagcgctgagccgggccgcacccgccgagccgtcttgatactgatggacattgtgtgggccagaggcagggatggttggctatgaccccaaaccagatggcaggaataacaccaagttccaggtggcagtggctgggtctgtgtctggacttgttactcgggcgctgatcagtcccttcgacgtcatcaagatccgtttccagcttcagcatgagcgcctgtctcgcagtgaccccagcgcaaagtaccatggcatcctccaggcctctaggcagattctgcaggaggagggtccgacagctttctggaaaggacacgtcccagctcagattctctccataggctatggagctgtccaattcttgtcatttgaaatgctgacggagctggtccacagaggcagcgtgtatgacgcccgggaattctcagtgcactttgtatgtggtggcctggctgcctgtatggccaccctcactgtgcaccccgtggatgttctgcgcacccgctttgcagctcagggtgagcccaaggtctataatacgctgcgccacgccgtggggaccatgtataggagcgaaggcccccaggttttctacaaaggcttggctcccaccttgatcgccatcttcccctacgccgggctgcagttctcttgctacagctccttgaagcacctgtacaagtgggccataccagccgaaggaaagaaaaatgagaacctccaaaacctgctttgtggcagtggagctggtgtcatcagcaagaccctgacatatccgctggacctcttcaagaagcggctacaggttggagggtttgagcatgccagagctgcctttggccaggtacggagatacaagggcctcatggactgtgccaagcaggtgctgcaaaaggaaggcgccctgggcttcttcaagggcctgtcccccagcttgctgaaggctgccctctccacaggcttcatgttcttctcgtatgaattcttctgtaatgtcttccactgcatgaacaggacagccagccagcgctgagtgcaggaaggaccccaggtcttccctggaggcagcctcctgaaggaaggaagattcagtctccactgagaggtgccgtctggcccttccctgcaggccagctgccccaagcggggtagcagccttgaacccacccagctgggacaccaccagaaggtccagggctctccccatgagagaatcagagggaatgcaggacgtggtctatggtgagccaacgacacagtgagaaggagcaggaagttgctgtttctcctctgaccagcccacactccaaaggaaacagacgccatcctacacctatcagccctgcctgccaggagaacagaacacactcctggtctggatggggctgctgcttgagtgcagagggctgcggtaggccctttgcaggagtcaggtccctacacttggcctgtttttccaacctatttaatagacattaaagctaaacacacattccttatctt

SEQ ID NO: 28840 - DNA, 3136 bp, Homo sapiens
  source 1..3136: mol_type = unassigned DNA
ggccaggaacgcacgctgcctggccgtatcgccgcccccaccgccgccgccgccgggactagaagtgagccgcccgggtcccaaacgccagccagccagtcagtgggtcccgcagtcgcccgcaaccggggcgaatcatggcggccgccaaggtggctttaaccaagagagcagatccagctgagcttagaacaatatttttgaagtatgcaagcattgagaaaaacggtgaatttttcatgtcccccaatgactttgtcactcgatacttgaacatttttggagaaagccagcctaatccaaagactgtggaacttttaagtggagtggtggatcagaccaaagatggattaatatcttttcaagaatttgttgcctttgaatctgtcctgtgtgcccctgatgctttgtttatggtagcctttcagctgtttgacaaagctggcaaaggagaagtaacttttgaggatgttaagcaagtttttggacagaccacaattcatcaacatattccatttaactgggattcagaatttgtgcaactacattttggaaaagaaagaaaaagacacctgacatatgcggaatttactcagtttttattggaaatacaactggagcacgcaaagcaagcctttgtgcaacgggacaatgctaggactgggagagtcacagccatcgacttccgagacatcatggtcaccatccgcccccatgtcttgactccttttgtagaagaatgtctagtagctgctgctggaggtaccacatcccatcaagttagtttctcctattttaatggatttaattcgctccttaacaacatggaactcattagaaagatctatagcactctggctggcaccaggaaagatgttgaagtgactaaggaggagtttgttctggcagctcagaaatttggtcaggttacacccatggaagttgacatcttgtttcagttagcagatttatatgagccaaggggacgtatgaccttagcagacattgaacggattgctcctctggaagagggaactctgccctttaacttggctgaggcccagaggcagaaggcctcaggtgattcagctcgaccagttcttctacaagttgcagagtcggcctacaggtttggtctgggttctgttgctggagctgttggagccactgctgtgtatcctatcgatcttgtaaaaactcgaatgcagaaccaacgatcaactggctcttttgtgggagaactcatgtataaaaacagctttgactgttttaagaaagtgctacgctatgaaggcttctttggactgtatagaggtctgttgccacagttattgggagttgccccagagaaggccataaaacttacagtgaacgattttgtgagggataaatttatgcacaaagatggttcggtcccacttgcagcagaaattcttgctggaggctgcgctggaggctcccaggtgattttcacaaatcctttagaaatcgtcaagatccgtttgcaagtggcaggagaaatcaccactggtcctcgagtcagtgctctgtctgtcgtgcgggacctggggttttttgggatctacaagggtgccaaagcatgctttctgcgggacattcctttctcggccatctactttccgtgctatgctcatgtgaaggcttcctttgcaaatgaagatgggcaggttagcccaggaagcctgctcttagctggtgccatagctggtatgcctgcagcatctttagtgacccctgctgatgttatcaagacgagattacaggtggctgcccgggctggccaaaccacttacagcggagtgatagactgctttagaaagatactgcgtgaagaaggaccaaaagctctgtggaagggagctggtgctcgtgtatttcgatcctcaccccagtttggtgtaactttgctgacttacgaattgctacagcgatggttctacattgattttggaggagtaaaacccatgggatcagagccagttcctaaatccaggatcaacctgcctgccccgaatcctgatcacgttgggggctacaaactggcagttgctacatttgcagggattgaaaacaaatttggactttacctacctctcttcaagccatcagtatctacctcaaaggctattggtggaggcccataggaagatcagccctgggatagtgctgtctttttgtgggtactgcagtaaagaacatccctcctgggaatgaagcaatgcttcatcccttttacgtccatctcttgtttaaattcaagtccaggcttttttatcatgtgaaatcattcattttctgggtgttttcttaaccagatcattgtgaaattattcataattattatttggccctctgcccagaaacctttgtttgcatctgaaaattgatgggatttggtcaacactaacatgatttggggaaaggagcaagtcagaatagaaattagtactcccctccttgaactaggattgtagtcccaaagaggctactgtaaggcaatcatggtgctcagagcagtgtttcgtgtgtgttttaaactggtaggaaactaggtgcatatttataaaaataaaaaacactgggagaaatgaaaaaatatatatcaaatatattcagcctggcttcaaattgtaagcatgcacaaattctgtctctggattatattatgaagcttttatgtgaaacatgtttctttgtaatgaaaaccacattggagatgtttagtaatcatattgttactggtaccaagactactagggaaatgcctttgtactttagggaagtacttttggcattttactgtacagacagaaaaaactgagatgtagcccctctcctggaagtgctaattttgaaaaactgctcatatgatgtacatgtactgattactgcctattttaataaacactcttgaaaaatgcatgttgccctgttgctgcctgccctattctcctcatctccccatcattggtacccacttgcttttaaaatccactttatcttgaataatgtaagacaaatatgttctgacataagtatttaattcatgttgccttgcataatggtcagaggcgcatgaatttgtgaaggtggaaataaactatttgtaaagtga

SEQ ID NO: 28841 - DNA, 3192 bp, Homo sapiens
  source 1..3192: mol_type = unassigned DNA
aatgggcgggcagcatccacatgacccgcgccggcgggagggcgtggggaggcaggccaggaacgcacgctgcctggccgtatcgccgcccccaccgccgccgccgccgggactagaagtgagccgcccgggtcccaaacgccagccagccagtcagtgggtcccgcagtcgcccgcaaccggggcgaatcatggcggccgccaaggtggctttaaccaagagagcagatccagctgagcttagaacaatatttttgaagtatgcaagcattgagaaaaacggtgaatttttcatgtcccccaatgactttgtcactcgatacttgaacatttttggagaaagccagcctaatccaaagactgtggaacttttaagtggagtggtggatcagaccaaagatggattaatatcttttcaagaatttgttgcctttgaatctgtcctgtgtgcccctgatgctttgtttatggtagcctttcagctgtttgacaaagctggcaaaggagaagtaacttttgaggatgttaagcaagtttttggacagaccacaattcatcaacatattccatttaactgggattcagaatttgtgcaactacattttggaaaagaaagaaaaagacacctgacatatgcggaatttactcagtttttattggaaatacaactggagcacgcaaagcaagcctttgtgcaacgggacaatgctaggactgggagagtcacagccatcgacttccgagacatcatggtcaccatccgcccccatgtcttgactccttttgtagaagaatgtctagtagctgctgctggaggtaccacatcccatcaagttagtttctcctattttaatggatttaattcgctccttaacaacatggaactcattagaaagatctatagcactctggctggcaccaggaaagatgttgaagtgactaaggaggagtttgttctggcagctcagaaatttggtcaggttacacccatggaagttgacatcttgtttcagttagcagatttatatgagccaaggggacgtatgaccttagcagacattgaacggattgctcctctggaagagggaactctgccctttaacttggctgaggcccagaggcagcagaaggcctcaggtgattcagctcgaccagttcttctacaagttgcagagtcggcctacaggtttggtctgggttctgttgctggagctgttggagccactgctgtgtatcctatcgatcttgtaaaaactcgaatgcagaaccaacgatcaactggctcttttgtgggagaactcatgtataaaaacagctttgactgttttaagaaagtgctacgctatgaaggcttctttggactgtatagaggtctgttgccacagttattgggagttgccccagagaaggccataaaacttacagtgaacgattttgtgagggataaatttatgcacaaagatggttcggtcccacttgcagcagaaattcttgctggaggctgcgctggaggctcccaggtgattttcacaaatcctttagaaatcgtcaagatccgtttgcaagtggcaggagaaatcaccactggtcctcgagtcagtgctctgtctgtcgtgcgggacctggggttttttgggatctacaagggtgccaaagcatgctttctgcgggacattcctttctcggccatctactttccgtgctatgctcatgtgaaggcttcctttgcaaatgaagatgggcaggttagcccaggaagcctgctcttagctggtgccatagctggtatgcctgcagcatctttagtgacccctgctgatgttatcaagacgagattacaggtggctgcccgggctggccaaaccacttacagcggagtgatagactgctttagaaagatactgcgtgaagaaggaccaaaagctctgtggaagggagctggtgctcgtgtatttcgatcctcaccccagtttggtgtaactttgctgacttacgaattgctacagcgatggttctacattgattttggaggagtaaaacccatgggatcagagccagttcctaaatccaggatcaacctgcctgccccgaatcctgatcacgttgggggctacaaactggcagttgctacatttgcagggattgaaaacaaatttggactttacctacctctcttcaagccatcagtatctacctcaaaggctattggtggaggcccataggaagatcagccctgggatagtgctgtctttttgtgggtactgcagtaaagaacatccctcctgggaatgaagcaatgcttcatcccttttacgtccatctcttgtttaaattcaagtccaggcttttttatcatgtgaaatcattcattttctgggtgttttcttaaccagatcattgtgaaattattcataattattatttggccctctgcccagaaacctttgtttgcatctgaaaattgatgggatttggtcaacactaacatgatttggggaaaggagcaagtcagaatagaaattagtactcccctccttgaactaggattgtagtcccaaagaggctactgtaaggcaatcatggtgctcagagcagtgtttcgtgtgtgttttaaactggtaggaaactaggtgcatatttataaaaataaaaaacactgggagaaatgaaaaaatatatatcaaatatattcagcctggcttcaaattgtaagcatgcacaaattctgtctctggattatattatgaagcttttatgtgaaacatgtttctttgtaatgaaaaccacattggagatgtttagtaatcatattgttactggtaccaagactactagggaaatgcctttgtactttagggaagtacttttggcattttactgtacagacagaaaaaactgagatgtagcccctctcctggaagtgctaattttgaaaaactgctcatatgatgtacatgtactgattactgcctattttaataaacactcttgaaaaatgcatgttgccctgttgctgcctgccctattctcctcatctccccatcattggtacccacttgcttttaaaatccactttatcttgaataatgtaagacaaatatgttctgacataagtatttaattcatgttgccttgcataatggtcagaggcgcatgaatttgtgaaggtggaaataaactatttgtaaagtg

SEQ ID NO: 28842 - DNA, 2258 bp, Homo sapiens
  source 1..2258: mol_type = unassigned DNA
aaacgccagccagccagtcagtgggtcccgcagtcgcccgcaaccggggcgaatcatggcggccgccaaggtggctttaaccaagagagcagatccagctgagcttagaacaatatttttgaagtatgcaagcattgagaaaaacggtgaatttttcatgtcccccaatgactttgtcactcgatacttgaacatttttggagaaagccagcctaatccaaagactgtggaacttttaagtggagtggtggatcagaccaaagatggaggatgttaagcaagtttttggacagaccacaattcatcaacatattccatttaactgggattcagaatttgtgcaactacattttggaaaagaaagaaaaagacacctgacatatgcggaatttactcagtttttattggaaatacaactggagcacgcaaagcaagcctttgtgcaacgggacaatgctaggactgggagagtcacagccatcgacttccgagacatcatggtcaccatccgcccccatgtcttgactccttttgtagaagaatgtctagtagctgctgctggaggtaccacatcccatcaagttagtttctcctattttaatggatttaattcgctccttaacaacatggaactcattagaaagatctatagcactctggctggcaccaggaaagatgttgaagtgactaaggaggagtttgttctggcagctcagaaatttggtcaggttacacccatggaagttgacatcttgtttcagttagcagatttatatgagccaaggggacgtatgaccttagcagacattgaacggattgctcctctggaagagggaactctgccctttaacttggctgaggcccagaggcagaaggcctcaggtgattcagctcgaccagttcttctacaagttgcagagtcggcctacaggtttggtctgggttctgttgctggagctgttggagccactgctgtgtatcctatcgatcttgtaaaaactcgaatgcagaaccaacgatcaactggctcttttgtgggagaactcatgtataaaaacagctttgactgttttaagaaagtgctacgctatgaaggcttctttggactgtatagaggtctgttgccacagttattgggagttgccccagagaaggccataaaacttacagtgaacgattttgtgagggataaatttatgcacaaagatggttcggtcccacttgcagcagaaattcttgctggaggctgcgctggaggctcccaggtgattttcacaaatcctttagaaatcgtcaagatccgtttgcaagtggcaggagaaatcaccactggtcctcgagtcagtgctctgtctgtcgtgcgggacctggggttttttgggatctacaagggtgccaaagcatgctttctgcgggacattcctttctcggccatctactttccgtgctatgctcatgtgaaggcttcctttgcaaatgaagatgggcaggttagcccaggaagcctgctcttagctggtgccatagctggtatgcctgcagcatctttagtgacccctgctgatgttatcaagacgagattacaggtggctgcccgggctggccaaaccacttacagcggagtgatagactgctttagaaagatactgcgtgaagaaggaccaaaagctctgtggaagggagctggtgctcgtgtatttcgatcctcaccccagtttggtgtaactttgctgacttacgaattgctacagcgatggttctacattgattttggaggagtaaaacccatgggatcagagccagttcctaaatccaggatcaacctgcctgccccgaatcctgatcacgttgggggctacaaactggcagttgctacatttgcagggattgaaaacaaatttggactttacctacctctcttcaagccatcagtatctacctcaaaggctattggtggaggcccataggaagatcagccctgggatagtgctgtctttttgtgggtactgcagtaaagaacatccctcctgggaatgaagcaatgcttcatcccttttacgtccatctcttgtttaaattcaagtccaggcttttttatcatgtgaaatcattcattttctgggtgttttcttaaccagatcattgtgaaattattcataattattatttggccctctgcccagaaacctttgtttgcatctgaaaattgatgggatttggtcaacactaacatgatttggggaaaggagcaagtcaga

SEQ ID NO: 28843 - DNA, 2139 bp, Homo sapiens
  source 1..2139: mol_type = unassigned DNA
ttcagaatcacgccggcctcattctaccgctgctctctcctggatctcggccacggatcttttgctcgcgaaagttcctccgtctagctgcacacaacgctgctgcaggaaaccgaggtaagggatttgccgagacttagctccaccacactccccgaggccccgcccctcctctctggccctcccctaggcccaggtgtctcgcgttgcacgtgcagttgttgtggttctacgtcacgtggtcccggaagttcaagacagacccgcctcaaacatggcggcgcccagcgcgcgaggacgtgatccgcttctgctccggcttggattgtagccttgacgaggtctgagcgaccatggaccggccggggttcgtggcagcgctggtgctgctgcattttttatcacctatgaatatgtgaagtggtttttgcatgctgattcatcttcatatttgacacctatgaaacatatgttggctgcctctgctggagaagtggttgcctgcctgattcgagttccatctgaagtggttaagcagagggcacaggtatctgcttctacaagaacatttcagattttctctaacatcttatatgaagagggtatccaagggttgtatcgaggctataaaagcacagttttaagagagattcctttttctttggtccagtttcccttatgggagtccttaaaagccctctggtcctggaggcaggatcatgtggtggattcttggcagtcagcagtctgtggagcttttgcaggtggatttgccgctgcagtcaccacccctctagacgtggcaaagacaagaattacgctggcaaaggctggctccagcactgctgatgggaatgtgctctctgtcctgcatggggtctggcggtcacaggggctggcaggattatttgcaggtgtcttccctcgaatggcagccatcagtctgggaggtttcatctttctgggggcttatgaccgaacgcacagcttgctgttggaagttggcagaaagagtccttgaagcagagacaagcctcacctccacttctgtcaagagaggggcctgcagtgcaaaccctcttccgctgagcagctgtctgaactataggccccagtgctgaagaccagttgtgctaagataccggcatggagattgtgccatccgtggtataggctggctggtatgaagtcattggcctgtatgccagagagctaagagaagaaaacggggtctgtggcggtactctgaacaatttcctcagaacctcttaataaataagtttggtaatgctgaggccaggccttttagagctttcatttgatctgtatctgatctttcatttcctgccacctgatggtggattcagcagaaggcaagatggttataattctaaaagaatagcttgtttgtttgtttgggaaaaggagacttggggaagagttgtgtatgtgggtgtttctccccctagttaattcctgttgtgtaagggtaggctttgttgaaaaagaaagaaagattgaactacaggtgcatagcaagcactctttctgggtaactaggctgctggttttaattaccctcagatttcacccataaaaacgcacaattgtattattttacagagatgtgtccagcgccccctgtggtgtgtgagagaaagcagctgcaactcaagtgactaggtgggcccagctggcttcgtgcaggagggcacggtgggtgagccattctcgccattctcatgtcagactgaaaggagggcctgggccagctttgaaaaggcaggatgaaatggaaaggtcaccacacttagggattttagaccttgactaacaagctccaggtgtagaaaaattcaaaacaaaatgtcaggaatctagcagtgttgtctgccctggagcaaacaaacagtatgtgattttgcttcgcctattttttttttcttttttgggggaagataattaaaggcagaatgactgcgtttgtaaaagaaggaccaccaactatactgacatttataaatgaacctttattaaagacacttcaatgccatttgttagacacttcaatattttacatggttttcaatgtacactgtaccaaaatttctataaataaataactttgtacataaaagt

SEQ ID NO: 28844 - DNA, 2673 bp, Homo sapiens
  source 1..2673: mol_type = unassigned DNA
aacctgaagctctcagagcttccctgtcttcatctatcagcccagggagaggaatcagtggttttccaaaagctgtacctctttccataaatacaaggatgaagggctgagatgatggcagttagaattatattgagaaatggtagcgggatctgagaaagcaaggccatgagttgaaagcagagagaaggcggttcgagtggagccctgatgaagttcatgctcatggttgcccagccattaacacgggctcatcacatctgtttccagattgcttctagaacttagctaccctcgttctataagatggaatgaaaatgcgtactacatacagatcatgaaaagacgcaaagaaaatgcatcttcacattgcagttcagaatcacgccggcctcattctaccgctgctctctcctggatctcggccacggatcttttgctcgcgaaagttcctccgtctagctgcacacaacgctgctgcaggaaaccgaggtaagggatttgccgagacttagctccaccacactccccgaggccccgcccctcctctctggccctcccctaggcccaggtgtctcgcgttgcacgtgcagttgttgtggttctacgtcacgtggtcccggaagttcaagacagacccgcctcaaacatggcggcgcccagcgcgcgaggacgtgatccgcttctgctccggcttggattgtagccttgacgaggtctgagcgaccatggaccggccggggttcgtggcagcgctggtggctggtggggtagcaggtgtttctgttgacttgatattatttcctctggataccattaaaaccaggctgcagagtccccaaggatttagtaaggctggtggttttcatggaatatatgctggcgttccttctgctgctattggatcctttcctaatgctgctgcattttttatcacctatgaatatgtgaagtggtttttgcatgctgattcatcttcatatttgacacctatgaaacatatgttggctgcctctgctggagaagtggttgcctgcctgattcgagttccatctgaagtggttaagcagagggcacaggtatctgcttctacaagaacatttcagattttctctaacatcttatatgaagagggtatccaagggttgtatcgaggctataaaagcacagttttaagagagattcctttttctttggtccagtttcccttatgggagtccttaaaagccctctggtcctggaggcaggatcatgtggtggattcttggcagtcagcagtctgtggagcttttgcaggtggatttgccgctgcagtcaccacccctctagacgtggcaaagacaagaattacgctggcaaaggctggctccagcactgctgatgggaatgtgctctctgtcctgcatggggtctggcggtcacaggggctggcaggattatttgcaggtgtcttccctcgaatggcagccatcagtctgggaggtttcatctttctgggggcttatgaccgaacgcacagcttgctgttggaagttggcagaaagagtccttgaagcagagacaagcctcacctccacttctgtcaagagaggggcctgcagtgcaaaccctcttccgctgagcagctgtctgaactataggccccagtgctgaagaccagttgtgctaagataccggcatggagattgtgccatccgtggtataggctggctggtatgaagtcattggcctgtatgccagagagctaagagaagaaaacggggtctgtggcggtactctgaacaatttcctcagaacctcttaataaataagtttggtaatgctgaggccaggccttttagagctttcatttgatctgtatctgatctttcatttcctgccacctgatggtggattcagcagaaggcaagatggttataattctaaaagaatagcttgtttgtttgtttgggaaaaggagacttggggaagagttgtgtatgtgggtgtttctccccctagttaattcctgttgtgtaagggtaggctttgttgaaaaagaaagaaagattgaactacaggtgcatagcaagcactctttctgggtaactaggctgctggttttaattaccctcagatttcacccataaaaacgcacaattgtattattttacagagatgtgtccagcgccccctgtggtgtgtgagagaaagcagctgcaactcaagtgactaggtgggcccagctggcttcgtgcaggagggcacggtgggtgagccattctcgccattctcatgtcagactgaaaggagggcctgggccagctttgaaaaggcaggatgaaatggaaaggtcaccacacttagggattttagaccttgactaacaagctccaggtgtagaaaaattcaaaacaaaatgtcaggaatctagcagtgttgtctgccctggagcaaacaaacagtatgtgattttgcttcgcctattttttttttcttttttgggggaagataattaaaggcagaatgactgcgtttgtaaaagaaggaccaccaactatactgacatttataaatgaacctttattaaagacacttcaatgccatttgttagacacttcaatattttacatggttttcaatgtacactgtaccaaaatttctataaataaataactttgtacataaaagtaa

SEQ ID NO: 28845 - DNA, 3869 bp, Homo sapiens
  source 1..3869: mol_type = unassigned DNA
ggattgtagccttgacgaggtctgagcgaccatggaccggccggggttcgtggcagcgctggtgctgctgcattttttatcacctatgaatatgtgaagtggtttttgcatgctgattcatcttcatatttgacacctatgaaacatatgttggctgcctctgctggagaagtggttgcctgcctgattcgagttccatctgaagtggttaagcagagggcacaggtatctgcttctacaagaacatttcagattttctctaacatcttatatgaagagggtatccaagggttgtatcgaggctataaaagcacagttttaagagagattcctttttctttggtccagtttcccttatgggagtccttaaaaggttggaagccatataactgcttttgaatagagcagctaaagaagtcccaagttgccctctggtcctggaggcaggatcatgtggtggattcttggcagtcagcagtctgtggagcttttgcaggtggatttgccgctgcagtcaccacccctctagacgtggcaaagacaagaattacgctggcaaaggctggctccagcactgctgatgggaatgtgctctctgtcctgcatggggtctggcggtcacaggggctggcaggattatttgcaggtgtcttccctcgaatggcagccatcagtctgggaggtttcatctttctgggggcttatgaccgaacgcacagcttgctgttggaagttggcagaaagagtccttgaagcagagacaagcctcacctccacttctgtcaagagaggggcctgcagtgcaaaccctcttccgctgagcagctgtctgaactataggccccagtgctgaagaccagttgtgctaagataccggcatggagattgtgccatccgtggtataggctggctggtatgaagtcattggcctgtatgccagagagctaagagaagaaaacggggtctgtggcggtactctgaacaatttcctcagaacctcttaataaataagtttgagatgtgtccagcgccccctgtggtgtgtgagagaaagcagctgcaactcaagtgactaggtgggcccagctggcttcgtgcaggagggcacgatccaagtcctgtgagcgactgatactccacatgggagttacaactatgtacagatgagtgacgcttgaacccaagcttcctcgcagcctctcctacctctctttcccgtagagattggtatgacaagaactgaggtagacaaaacctagctttttggtgccaacagcagtggcaccctctgtttcccggggagctgtcctgtcagtggcgtggactcgggactggcgtcacatgctttggggaggtggccattggaaacaagcaagtactgggcttccgcgcgctctggactgcctgaagttaatgaagatgcaggctgtagctctgtggagtccgggtgatacaaccttgctaaagtccaggaagaatcccctacaaggaaagaacgaacctgtcagacccccacttgaccgtttaagcagctcccaacccacctgttagaagacagtcaaaagttacctttcccatctagagatgccattggctttttcttcacagccgtcagcattctatcgtggttactggggtagagcgacccttggcactcggggcaggacccagcggcagtcctgctgcactggtgatgtggagaatgctcttggtcactcccacccggctccgggccatttggcgcacttggctgtgcgctgtctctggacacaggctgggggtggaaggcttgtcccctggagtaacagtccacttcggtgttgcagtcactgcatacgacccggccaccgtgttctgaaggacagcgccaaagatgggttagagtcactgctgtgggagtcttcgtccccacacagaggacaggctgctcagctccactgtgcaaggcaaaggtcatgggggagctgctgctgctggctgctgagcatgtaaaccggatgtccttgcccaccatagccatggtggtttctggctgggtgatgatctgtggcttcaggaagtcatctggggagagaagggtcaactgtaaagcgctgggttcttggtacacagaggaaccagctgctgttcatgctaacagaaactgacacagacaccaagcaggaaccagagcttgaggtccctgtgcatcctcagccccaccaaccagatgccgtaagagttgcaccatggacatctgacctcatctaattagaagtctgtgagtactgatcacctttatgatcacactccttgattagaaattaacccaccacttctcagttctcaaaccagccagccggcagtttccttaagacaactggctctgcctgctgactttcacacaaaacagtcaggcaccactggtcatgactgcagagatcttacccacaaaccttactccaaaaggagggggtgtaaaacacttccaaaatgtcagaataaggacctccaaaaatctgcacctccattaaaacaaggaaaacacctggaaaaatggtcaaaagcaactttttcagaattctggaaaaccaaaggcttacaacaatccatggattgttgattcaagcaaatagcaacatctcagaaatgtgagctttgtggtattttaacttatccaaagccccattcttccctccccagctccatggtagccttgaaacccagcagcctagcaaccactcaagggtcagaatgggctccccaaaagccccatcctcagaactgacaccatgtggcctatctggcagcaacacggaaagccccattcacaggatttgcattgatttgccctgatctagtttgccgagcaggagaagccctagccccagggcacatgactacaacaatcagtagccactgttcaacagcgcagctgtctgaggggacaatacccatggggcaaacaagcagctggccaaaaaactataaaggaaaatgtggggaatacagtgttaatggtgggctttgaaaaggtccaatacattcctggggatctagacagccacatgcaggtgcaaggccatgtgcacacccaggaaagacgtgagggggtcctcatttgtcacctgtggctgagcatgactgtctacacaaataggaagtgatggcacaccccaacacaaacacacaagccgtcggtaaaggataggagacagtggttgtggtgacttctctgtccaaccattagctaaccactaaactaaacaagcagggacttaaggggacggactttatatagcctttgtccaggaaaagtcactaggcaagctgtaacaataaacagcaacagcagcaaatcctgggggaggagaaagggaatatccaatttccagagttgccacattattttattttaaatgcccaattttcaacaaaatattatgaaacactcaaacaggaaaaaaagcagtcaacagaaactgtctctgagggagcccagacttagattcactaaataaactttttaaatcggcaattataggcatattcaaacacctcaaggaaaccatgtcttaaaaaaaatatcgaaggatagtggccaggtggggtggctcacgcctataatcccagcactttgggaggctgaggcaggaggatcatgaggtcaggagatcaagaccatcctggctaacatggggaaaccctgtctctactaaaaatacaaaaaaaaaaaaaaaattagccgggtgtggtggcaggtgcctgtagtcccagctactagggaggccgaggcaggagaatggcatgaacccaggaggcggagcttgcagtgagccaagatcacgccactgccctccagcctgggtgacagagcaagactctgtctc

SEQ ID NO: 28846 - DNA, 1196 bp, Homo sapiens
  source 1..1196: mol_type = unassigned DNA
actacattgcccagtaacctcctgggctccgctgtgtttttctattctggggtgtaaggggcagctggaccactccagctgggactgctaggaaggttgcgggtccacccggccgagccgaacgagggaaatggtcctcacccggccactcgccggttgaaaaggggccgccctggcagggaagcggccgccgcggcgcggtgcagcgcagcggcgagaaggagtgcgttatcgtcttgcgctactgctgaatgtccgtcccggaggaggaggagaggcttttgccgctgacccagagatggccccgagcgagcaaattcctactgtccggctgcgcggctaccgtggccgagctagcaacctttcccctggatctcacaaaaactcgactccaaatgcaaggagaagcagctcttgctcggttgggagacggtgcaagagaatctgccccctataggggaatggtgcgcacagctctagggatcattgaagaggaaggctttctaaagctttggcaaggagtgacacccgccatttacagacacgtagtgtattctggaggtcgaatggtcacatatgaacatctccgagaggttgtgtttggcaaaagtgaagatgagcattatcccctttggaaatcagtcattggagggatgatggctggtgttattggccagtttttagccaatccaactgacctagtgaaggttcagatgcaaatggaaggaaaaaggaaactggaaggaaaaccattgcgatttcgtggtgtacatcatgcatttgcaaaaatcttagctgaaggaggaatacgagggctttgggcaggctgggtacccaatatacaaagagcagcactggtgaatatgggagatttaaccacttatgatacagtgaaacactacttggtattgaatacaccacttgaggacaatatcatgactcacggtttatcaagtttatgttctggactggtagcttctattctgggaacaccagccgatgtcatcaaaagcagaataatgaatcaaccacgagataaacaaggaaggggacttttgtataaatcatcgactgactgcttgattcaggctgttcaaggtgaaggattcatgagtctatataaaggctttttaccatcttggctgagaatggctgctgtgattgtcaacagcagcaggagccagttgaaggtttga

SEQ ID NO: 28847 - DNA, 2963 bp, Homo sapiens
  source 1..2963: mol_type = unassigned DNA
gactacattgcccagtaacctcctgggctccgctgtgtttttctattctggggtgtaaggggcagctggaccactccagctgggactgctaggaaggttgcgggtccacccggccgagccgaacgagggaaatggtcctcacccggccactcgccggttgaaaaggggccgccctggcagggaagcggccgccgcggcgcggtgcagcgcagcggcgagaaggagtgcgttatcgtcttgcgctactgctgaatgtccgtcccggaggaggaggagaggcttttgccgctgacccagagatggccccgagcgagcaaattcctactgtccggctgcgcggctaccgtggccgagctagcaacctttcccctggatctcacaaaaactcgactccaaatgcaaggagaagcagctcttgctcggttgggagacggtgcaagagaatctgccccctataggggaatggtgcgcacagctctagggatcattgaagaggaaggctttctaaagctttggcaaggagtgacacccgccatttacagacacgtagtgtattctggaggtcgaatggtcacatatgaacatctccgagaggttgtgtttggcaaaagtgaagatgagcattatcccctttggaaatcagtcattggagggatgatggctggtgttattggccagtttttagccaatccaactgacctagtgaaggttcagatgcaaatggaaggaaaaaggaaactggaaggaaaaccattgcgatttcgtggtgtacatcatgcatttgcaaaaatcttagctgaaggaggaatacgagggctttgggcaggctgggtacccaatatacaaagagcagcactggtgaatatgggagatttaaccacttatgatacagtgaaacactacttggtattgaatacaccacttgaggacaatatcatgactcacggtttatcaagtttatgttctggactggtagcttctattctgggaacaccagccgatgtcatcaaaagcagaataatgaatcaaccacgagataaacaaggaaggggacttttgtataaatcatcgactgactgcttgattcaggctgttcaaggtgaaggattcatgagtctatataaaggctttttaccatcttggctgagaatgaccccttggtcaatggtgttctggcttacttatgaaaaaatcagagagatgagtggagtcagtccattttaaacccctaaagatgcaacccttaaagatacagtgttcagtattattgaaatatgggcatctgcaacacataccccctattatttctacctctttaggaagacacctattccacagagactgatttatagggggcagcactttatttttttctggaaacccaagttctctttgactcctctttttgtccaaaagtgatctggtcggatctcacaaggccatccaatgagaccccgcacagcattttctaaagaagaatcgaagcctgaccactttcaccttgggcaagaaggtttggcctttgagttgctattctatgctgaagagcctgcttagaggaggagtaccaggagggagccagcatttcagatctgaagtagacgataggaatgtggaagaacacatacatagtgcttaagaaatacatttaacctgttatgtcagtatttatcaatgaagtttgataattcacttttctgtcattgttaaagcgtacatactgtaaattaaagggaggtgaatggaaattaatgaataaacattttgagtttccctagtgttgaaggaaggtgtactttttcttgtcagaaagataaaaaaaatcaagttgagatgatgtttgaatttcaagaaaagaggctgctttctgtcagtgccctctcattagatctgtgttaattagttagcactccactgcacatgctaatgacttcctctgacagccacacaccgaatcttgatgaaaaaagagaagagcatttgccttgttacatagtctgttacaagccagatatgttgctagctctcaagagttgtaatatattaagaactacaacttatttgattaaaactcagctgtatagatccttttataaagcaccttttgttaaacatcagcctttcattggtattttaaaagcaaggcagatagatatgaagtcagccaactctgacatgcgtcctttcttatctcccttacctgacactaggggctctagagaggcagagagagcactcacaaatcacactaaaactgccagcggcctgactcttactcagtttagcaaaaattcttgcctaaaaagtgataagtaaaaatctgtttatggtatacagttatgtctcgaatctttgaatcaaatccatgttcttattttagaaaggtaagagttcttcaaattcagctacataccaccggctctcccaacctcagacggtgggcatttctggatggatggctgcggttatggataaaggctgtaactgttaacacagaaaaacatgaaaagctcaggcccaagaaaggccttggagccagccaaacagaatttgttctaatggacatggatgatgttgaacagaaaaaagtttacaagtgctttgtggttgcactaatgtatactcactgccattttaagagggggaagtacattttaaaatatatttgaatgtcatgtactgatatgcagtagcttattgtttttctagttgcagagaatgtgaagtttaatctcttaaaatatttagatggtctactttttcattgaatttgtcaatatgtaattgcgttgtaaaatattatatatatatatatatatatatatatatatatatgcttaacttcccaagtgttctgcattgaaccacttagggaaaattttgtttgtttttatgttttgtaatttttaaaattaagtaaagactggatcaaaataattgcatccaacctggaccgtgaacaa

SEQ ID NO: 28848 - DNA, 1322 bp, Homo sapiens
  source 1..1322: mol_type = unassigned DNA
actacattgcccagtaacctcctgggctccgctgtgtttttctattctggggtgtaaggggcagctggaccactccagctgggactgctaggaaggttgcgggtccacccggccgagccgaacgagggaaatggtcctcacccggccactcgccggttgaaaaggggccgccctggcagggaagcggccgccgcggcgcggtgcagcgcagcggcgagaaggagtgcgttatcgtcttgcgctactgctgaatgtccgtcccggaggaggaggagaggcttttgccgctgacccagagatggccccgagcgagcaaattcctactgtccggctgcgcggctaccgtggccgagctagcaacctttcccctggatctcacaaaaactcgactccaaatgcaaggagaagcagctcttgctcggttgggagacggtgcaagagaatctgccccctataggggaatggtgcgcacagctctagggatcattgaagaggaaggctttctaaagctttggcaaggagtgacacccgccatttacagacacgtagtgtattctggaggtcgaatggtcacatatgaacatctccgagaggttgtgtttggcaaaagtgaagatgagcattatcccctttggaaatcagtcattggagggatgatggctggtgttattggccagtttttagccaatccaactgacctagtgaaggttcagatgcaaatggaaggaaaaaggaaactggaaggaaaaccattgcgatttcgtggtgtacatcatgcatttgcaaaaatcttagctgaaggaggaatacgagggctttgggcaggctgggtacccaatatacaaagagcagcactggtgaatatgggagatttaaccacttatgatacagtgaaacactacttggtattgaatacaccacttgaggacaatatcatgactcacggtttatcaagtgatctggtcggatctcacaaggccatccaatgagaccccgcacagcattttctaaagaagaatcgaagcctgaccactttcaccttgggcaagaaggtttggcctttgagttgctattctatgctgaagagcctgcttagaggaggagtaccaggagggagccagcatttcagatctgaagtagacgataggaatgtggaagaacacatacatagtgcttaagaaatacatttaacctgttatgtcagtatttatcaatgaagtttgataattcacttttctgtcattgttaaagcgtacatactgtaaattaaagggaggtgaatggaaattaatgaataaacattttgagtttccctagtgttg

SEQ ID NO: 28849 - DNA, 650 bp, Homo sapiens
  source 1..650: mol_type = unassigned DNA
tgaatatgggagatttaaccacttatgatacagtgaaacactacttggtattgaatacaccacttgaggacaatatcatgactcacggtttatcaagtttatgttctggactggtagcttctattctgggaacaccagccgatgtcatcaaaagcagaataatgaatcaaccacgagataaacaaggaaggggacttttgtataaatcatcgactgactgcttgattcaggctgttcaaggtgaaggattcatgagtctatataaaggctttttaccatcttggctgagaatgtgatctggtcggatctcacaaggccatccaatgagaccccgcacagcattttctaaagaagaatcgaagcctgaccactttcaccttgggcaagaaggtttggcctttgagttgctattctatgctgaagagcctgcttagaggaggagtaccaggagggagccagcatttcagatctgaagtagacgataggaatgtggaagaacacatacatagtgcttaagaaatacatttaacctgttatgtcagtatttatcaatgaagtttgataattcacttttctgtcattgttaaagcgtacatactgtaaattaaagggaggtgaatggaaattaatgaataaacattttgagtttc

SEQ ID NO: 28850 - DNA, 659 bp, Homo sapiens
  source 1..659: mol_type = unassigned DNA
ctgaaaaacatgtttttgagttgagtcctgaaagacaaggagatgttagtaaagcagagaagggagaattcattctagaaagatcagacagtgtgtgggaagggcagagtctgaaaagagcatgccccatttggagaagcatcaagaagcccacgtgttagaagcaccggccccatgagacaaagacacagctagagagattgactaggccatgtcggaatgtcctcttattttatacatacataagcatatagatacatatagccaaagttacctttttaatgatcttttttacccagtgtattctggaggtcgaatggtcacatatgaacatctccgagaggttgtgtttggcaaaagtgaagatgagcattatcccctttggaaatcagtcattggagggatgatggctggtgttattggccagtttttagccaatccaactgacctagtgaaggttcagatgcaaatggaaggaaaaaggaaactggaaggaaaaccattgcgatttcgtggtgtacatcatgcatttgcaaaaatcttagctgaaggaggaatacgagggctttgggcaggctgggtacccaatatacaaagagcagcactggtgaatatgggagatttaaccacttatgatacagtgaaacactacttggtat

SEQ ID NO: 28851 - DNA, 526 bp, Homo sapiens
  source 1..526: mol_type = unassigned DNA
aatggaaggaaaaaggaaactggaaggaaaaccattgcgatttcgtggtgtacatcatgcatttgcaaaaatcttagctgaaggaggaatacgagggctttgggcaggctgggtacccaatatacaaagagcagcactggtgaatatgggagatttaaccacttatgatacagtgaaacactacttggtattgaatacaccacttgaggacaatatcatgactcacggtttatcaagtttatgttctggactggtagcttctattctgggaacaccagccgatgtcatcaaaagcagaataatgaatcaaccacgagataaacaaggaaggggacttttgtataaatcatcgactgactgcttgattcaggctgttcaaggtgaaggattcatgagtctatataaaggctttttaccatcttggctgagaatggctgctgtgattgtcaacagcagcaggagccagttgaaggtttgataaaagcagatgaagatgcttaaagatgtctgtttgctgaaaatatct

SEQ ID NO: 28852 - DNA, 1602 bp, Homo sapiens
  source 1..1602: mol_type = unassigned DNA
attctggggtgtaaggggcagctggaccactccagctgggactgctaggaaggttgcgggtccacccggccgagccgaacgagggaaatggtcctcacccggccactcgccggttgaaaaggggccgccctggcagggaagcggccgccgcggcgcggtgcagcgcagcggcgagaaggagtgcgttatcgtcttgcgctactgctgaatgtccgtcccggaggaggaggagaggcttttgccgctgacccagagatggccccgagcgagcaaattcctactgtccggctgcgcggctaccgtggccgagctagcaacctttcccctggatctcacaaaaactcgactccaaatgcaaggagaagcagctcttgctcggttgggagacggtgcaagagaatctgccccctataggggaatggtgcgcacagctctagggatcattgaagaggaaggctttctaaagctttggcaaggagtgacacccgccatttacagacacctaagattcatttcatacgtttgatgcttagctgaaaaattacaataaattctccaatgaaattatgtatctttatttaatgaaaatgcctgctgcgtaccaagtgtattctggaggtcgaatggtcacatatgaacatctccgagaggttgtgtttggcaaaagtgaagatgagcattatcccctttggaaatcagtcattggagggatgatggctggtgttattggccagtttttagccaatccaactgacctagtgaaggttcagatgcaaatggaaggaaaaaggaaactggaaggaaaaccattgcgatttcgtggtgtacatcatgcatttgcaaaaatcttagctgaaggaggaatacgagggctttgggcaggctgggtacccaatatacaaagagcagcactggtgaatatgggagatttaaccacttatgatacagtgaaacactacttggtattgaatacaccacttgaggacaatatcatgactcacggtttatcaagtttatgttctggactggtagcttctattctgggaacaccagccgatgtcatcaaaagcagaataatgaatcaaccacgagataaacaaggaaggggacttttgtataaatcatcgactgactgcttgattcaggctgttcaaggtgaaggattcatgagtctatataaaggctttttaccatcttggctgagaatgaccccttggtcaatggtgttctggcttacttatgaaaaaatcagagagatgagtggagtcagtccattttaaacccctaaagatgcaacccttaaagatacagtgttcagtattattgaaatatgggcatctgcaacacataccccctattatttctacctctttaggaagacacctattccacagagactgatttatagggggcagcactttatttttttctggaaacccaagttctctttgactcctctttttgtccaaaagtgatctggtcggatctcacaaggccatccaatgagaccccgcacagcattttctaaagaagaatcgaagcctgaccactttcaccttgggcaagaaggtttggcctttgagttgctattctatgctgaag

SEQ ID NO: 28853 - DNA, 1448 bp, Homo sapiens
  source 1..1448: mol_type = unassigned DNA
ggggtgggcgccgcagctggcccgggtggatggagttggaggggcggggtgctggcggtgtggcgggggggccggcggcagggcccgggcggagccccggggagtcggcgctgctggacgggtggctgcagcggggcgtgggccggggggccggcggcggggaggccggggcctgcaggcccccggtacgacaagatccggactccggcccggactacgaggcgctgccggctggagccactgtcaccacgcacatggtggcaggcgccgtggcagggatcctggagcactgcgtgatgtaccccatcgactgcgtcaagacccggatgcagagtctacagcctgacccagctgcccgctatcgcaatgtgttggaggccctctggaggattataagaacggagggcctatggaggcccatgagggggctgaacgtcacagcaacaggcgcagggcctgcccacgccctttattttgcctgctacgaaaagttaaaaaagacattgagtgatgtaatccaccctgggggcaatagccatattgccaatggtgcggccgggtgtgtggcaacattacttcatgatgcagccatgaaccctgcggaagtggtcaagcagaggatgcagatgtacaactcaccataccaccgggtgacagactgtgtacgggcagtgtggcaaaatgaaggggccggggccttttaccgcagctacaccacccagctgaccatgaacgttcctttccaagccattcacttcatgacctatgaattcctgcaggagcactttaacccccagagacggtacaacccaagctcccacgtcctctctggagcttgcgcaggagctgtagctgccgcagccacaaccccactggacgtttgcaaaacactgctcaacacccaggagtccttggctttgaactcacacattacaggacatatcacaggcatggctagtgccttcaggacggtatatcaagtaggtggggtgaccgcctatttccgaggggtgcaggccagagtaatttaccagatcccctccacagccatcgcatggtctgtgtatgagttcttcaaatacctaatcactaaaaggcaagaagagtggagggctggcaagtgaagtagcactgaacgaagccaggggttcagatgacactgctgcatcctggtcacattctctgtctcctggaatgctcccacctcaagtggagttagaaggaaggtagaggggctctcccccaggattttggtgttttgactaacaccagttcctgccaacctctgttgccaccacctttccttccaggccctaagcacgtgcagcaaagcacaccacagcacctttgataacctctctccatcctgggcctgatgacctgctctagactgttatagagggataagcagctcattcccctggttcctaataaaaagcctttaaatt

SEQ ID NO: 28854 - DNA, 1002 bp, Homo sapiens
  source 1..1002: mol_type = unassigned DNA
cgaggcgctgccggctggagccactgtcaccacgcacatggtggcaggcgccgtggcagggatcctggagcactgcgtgatgtaccccatcgactgcgtcaaggtgcggccgggtgtgtggcaacattacttcatgatgcagccatgaaccctgcggaagtggtcaagcagaggatgcagatgtacaactcaccataccaccgggtgacagactgtgtacgggcagtgtggcaaaatgaaggggccggggccttttaccgcagctacaccacccagctgaccatgaacgttcctttccaagccattcacttcatgacctatgaattcctgcaggagcactttaacccccagagacggtacaacccaagctcccacgtcctctctggagcttgcgcaggagctgtagctgccgcagccacaaccccactggacgtttgcaaaacactgctcaacacccaggagtccttggctttgaactcacacattacaggacatatcacaggcatggctagtgccttcaggacggtatatcaagtaggtggggtgaccgcctatttccgaggggtgcaggccagagtaatttaccagatcccctccacagccatcgcatggtctgtgtatgagttcttcaaatacctaatcactaaaaggcaagaagagtggagggctggcaagtgaagtagcactgaacgaagccaggggttcagatgacactgctgcatcctggtcacattctctgtctcctggaatgctcccacctcaagtggagttagaaggaaggtagaggggctctcccccaggattttggtgttttgactaacaccagttcctgccaacctctgttgccaccacctttccttccaggccctaagcacgtgcagcaaagcacaccacagcacctttgataacctctctccatcctgggcctgatgacctgctctagactgttatagagggataagcagctcattcccctggttcctaataaaaagcctttaaatt

SEQ ID NO: 28855 - DNA, 3670 bp, Homo sapiens
  source 1..3670: mol_type = unassigned DNA
ttttttccttttctccagcggcctcaggttcttgttacaactgagtccgggttggaggaggtgtggggccgctgccgccaggaaaaacagcactggaggcaatgtttctataaatcaaagaagagacagtgtgagaatgtcagccctcaactggaagccgtttgtgtacggggggctggcctccatcactgctgagtgcggtacatttccaattgatttaaccaagacacggctccagattcaaggccagacgaatgatgcaaaatttaaggaaattagataccgaggaatgttgcacgcattagtgaggataggcagagaagaagggctgaaagcactctactcggggattgcccccgcgatgttacgccaggcatcctatggcaccatcaagataggcacttaccagagcttgaagcgactattcattgaacgcccagaagatgaaactctaccgataaatgtgatatgtggaattctgtctggagtcatatcttcaaccattgctaatccaactgatgttttgaaaattcggatgcaagcgcaaagcaacaccattcaaggaggaatgataggcaacttcatgaacatttaccagcaagaggggacaagaggactgtggaagggtgtgtcccttactgcgcagagggctgctattgttgttggtgtggagctgccggtctatgacatcaccaagaagcatcttattctctcaggcctgatgggagacactgtgtatacccacttcctctcaagcttcacctgtggtctggcaggggccctggcctcaaaccctgttgatgttgtgaggacacgtatgatgaatcagagagtgcttcgagatggcagatgttctggctacacaggaaccctggattgcttgttacagacatggaagaatgaagggttttttgctctctataaaggcttttggccaaattggttgagacttggtccttggaatatcattttctttgtgacatacgagcagttgaagaaattggatttgtgacaagccaaggctgcatgagacatctttctgaaaatggtaacttctgaaacagcaaagcttcctgtgtttcactctgcttctcactgcttggctcatcacagattctgggatgtgagcaacagatgaagactgggttagttgagattgctgtgtgttggcattggatgctcttcatcaaacgtttaatggcataaactaacatccaaacactagtctttaccactgaagtgcccttcaacatcaaagataatatgtgaaatgcatgtttcttgctaaagaaaacttgcaagaaaatcaggagcgatgtattgttttattcagggagagtagctcctgatgcatctcagctcatgactgagaatcagactgctctagaaaagctcactggaaccatggaatggagcctccgagaaggtgttatggtttctgaatttctgggagattttgctccttgtcaactgaagaaatttcatgtatggagacctggactgttcaaccccaggtataaacggtgcaggaaatggatcctaggaatatcacactgctttatcatttcctattttggcaggatcttccacttataataagtgattttaagctttgaagacttgacatttgtgagaaattgttacaaagtaataatctctaaattcgtggtggtgttatgtgttggctttgaaggttgcaaggtctgtattggtggggggtgttttcaagcagcttaggttctgtcttaggtcatgttagtaattagctttatgatttttagcaaagcatatgtatttctcaatgagtaaaatggggataataacgtctattgatgtagagggtcaaatgaagaacaaatagtagctgctgctacttgactggaaaggtaaatgtgtttacatcatgctgtggaacagctctaaacagtctatgtagaagaggggcatgttctcatgggcttctcatggtaattgtgaatgaagccctttgttaaggtcttgttgaagaaagaacactgtataagttcaggctttagtacattttccttagcaaaatgttggtagtgaatcaaagagttgatttttccaggtttccagtttttactttagtttatgttgtgcctgtcttggactttctgtttagtttggatggaaaatacctgcttgaaattttaaaaatgatttctttagtgcatctatttagctagtttctgataggtggtatgtaatattttccctttttctttccttctgtagacacaataagtcattctccctcttctttttttctttttctattttcttattctttactctaacctgcttcagagaaagagccctcttccttcttgtcttcatcttagtcttttcaaaataaaagatgactgtgagaaccccaagaacttccacttctgggaggcagccacaggacagggaacatatttatttgggtctcttcagttccccctttgagaacaacattaaatacatgttagctggggctccagggcattctccttccacagtagtgcggccaaattcccagtctggccagtctctttgttgagactgaatagaaggactgcaggtttttttggaggatgagataatttttcctcgcaggcatttttcccttgccttccttatgcatgaatggtccctttgaatattatttccaaaagtgagagctaagacaaagtcatcaaaaagagaggataacagaaggtgggggcgggggcggggtgcagtggggtagggttacctgttaattgctgagactcagatgaaagtccagctctccctgggcaaccctagagggcagcagaggaccccagagctcattcaggccttgctgcttgttctaaactacaccttaggattttttcttctttccaaaacattccattgattttataaagactttctatagagaggctttcacttttgagttctttgagtttaaagattgcttttcttgaaatgctctttttttaatgtagaaaaattttactttttcaaatatgcatacaatttttaaaacagtagaagcaaattcattttaatgaccatgtaaagagcgaatgtcagacagtattattaccagtttattcaaattacatacatgttcctaccaaggtggaaagaaattcaaacctcatggtaaaacttaagcacgatttaagataaaagcatagtatttcttcagtgtagacttattaagtgccttattgaacaggatcttaacctgctttttctgtttttttgaaagagttaatgcaattgttgaagcttctaaccaagaaacaacttaaggaattgggagacttggtcccctcgttgtcagggttctggctataagtacctccccacctttgggttttcttaaatatgccaaaaggaattctagtttttataaccaatgggtttttttgtttgtgtgcttatggatttgtgtaatcattgatgcttaatgttgtggattcataatataaaaagtggctcctgtcctttatatttattcatgtgctagaaatagtatgcattatataaagagtatgaagttttcataagcctttatatttcaagctctttatttaaacattgttggaatatgtggcataagccttgtttcatttatttaataaactggagtaatatataataataaaaa

SEQ ID NO: 28856 - DNA, 2240 bp, Homo sapiens
  source 1..2240: mol_type = unassigned DNA
ccttttctccagcggcctcaggttcttgttacaactgagtccgggttggaggaggtgtggggccgctgccgccaggaaaaacagcactggaggcaatgtttctataaatcaaagaagagacagtgtgagaatgtcagccctcaactggaagccgtttgtgtacggggggctggcctccatcactgctgagtgcggattgcccccgcgatgttacgccaggcatcctatggcaccatcaagataggcacttaccagagcttgaagcgactattcattgaacgcccagaagatgaaactctaccgataaatgtgatatgtggaattctgtctggagtcatatcttcaaccattgctaatccaactgatgttttgaaaattcggatgcaagcgcaaagcaacaccattcaaggaggaatgataggcaacttcatgaacatttaccagcaagaggggacaagaggactgtggaagggtgtgtcccttactgcgcagagggctgctattgttgttggtgtggagctgccggtctatgacatcaccaagaagcatcttattctctcaggcctgatgggagacactgtgtatacccacttcctctcaagcttcacctgtggtctggcaggggccctggcctcaaaccctgttgatgttgtgaggacacgtatgatgaatcagagagtgcttcgagatggcagatgttctggctacacaggaaccctggattgcttgttacagacatggaagaatgaagggttttttgctctctataaaggcttttggccaaattggttgagacttggtccttggaatatcattttctttgtgacatacgagcagttgaagaaattggatttgtgacaagccaaggctgcatgagacatctttctgaaaatggtaacttctgaaacagcaaagcttcctgtgtttcactctgcttctcactgcttggctcatcacagattctgggatgtgagcaacagatgaagactgggttagttgagattgctgtgtgttggcattggatgctcttcatcaaacgtttaatggcataaactaacatccaaacactagtctttaccactgaagtgcccttcaacatcaaagataatatgtgaaatgcatgtttcttgctaaagaaaacttgcaagaaaatcaggagcgatgtattgttttattcagggagagtagctcctgatgcatctcagctcatgactgagaatcagactgctctagaaaagctcactggaaccatggaatggagcctccgagaaggtgttatggtttctgaatttctgggagattttgctccttgtcaactgaagaaatttcatgtatggagacctggactgttcaaccccaggtataaacggtgcaggaaatggatcctaggaatatcacactgctttatcatttcctattttggcaggatcttccacttataataagtgattttaagctttgaagacttgacatttgtgagaaattgttacaaagtaataatctctaaattcgtggtggtgttatgtgttggctttgagtttaaagattgcttttcttgaaatgctctttttttaatgtagaaaaattttactttttcaaatatgcatacaatttttaaaacagtagaagcaaattcattttaatgaccatgtaaagagcgaatgtcagacagtattattaccagtttattcaaattacatacatgttcctaccaaggtggaaagaaattcaaacctcatggtaaaacttaagcacgatttaagataaaagcatagtatttcttcagtgtagacttattaagtgccttattgaacaggatcttaacctgctttttctgtttttttgaaagagttaatgcaattgttgaagcttctaaccaagaaacaacttaaggaattgggagacttggtcccctcgttgtcagggttctggctataagtacctccccacctttgggttttcttaaatatgccaaaaggaattctagtttttataaccaatgggtttttttgtttgtgtgcttatggatttgtgtaatcattgatgcttaatgttgtggattcataatataaaaagtggctcctgtcctttatatttattcatgtgctagaaatagtatgcattatataaagagtatgaagttttcataagcctttatatttcaagctctttatttaaacattgttggaatatgtggcataagccttgtttcatttatttaataaactggagtaatatat

SEQ ID NO: 28857 - DNA, 1377 bp, Homo sapiens
  source 1..1377: mol_type = unassigned DNA
ccttttctccagcggcctcaggttcttgttacaactgagtccgggttggaggaggtgtggggccgctgccgccaggtacatttccaattgatttaaccaagacacggctccagattcaaggccagacgaatgatgcaaaatttaaggaaattagataccgaggaatgttgcacgcattagtgaggataggcagagaagaagggctgaaagcactctactcggggattgcccccgcgatgttacgccaggcatcctatggcaccatcaagataggcacttaccagagcttgaagcgactattcattgaacgcccagaagatgaaactctaccgataaatgtgatatgtggaattctgtctggagtcatatcttcaaccattgctaatccaactgatgttttgaaaattcggatgcaagcgcaaagcaacaccattcaaggaggaatgataggcaacttcatgaacatttaccagcaagaggggacaagaggactgtggaagggtgtgtcccttactgcgcagagggctgctattgttgttggtgtggagctgccggtctatgacatcaccaagaagcatcttattctctcaggcctgatgggagacactgtgtatacccacttcctctcaagcttcacctgtggtctggcaggggccctggcctcaaaccctgttgatgttgtgaggacacgtatgatgaatcagagagtgcttcgagatggcagatgttctggctacacaggaaccctggattgcttgttacagacatggaagaatgaagggttttttgctctctataaaggcttttggccaaattggttgagacttggtccttggaatatcattttctttgtgacatacgagcagttgaagaaattggatttgtgacaagccaaggctgcatgagacatctttctgaaaatggtaacttctgaaacagcaaagcttcctgtgtttcactctgcttctcactgcttggctcatcacagattctgggatgtgagcaacagatgaagactgggttagttgagattgctgtgtgttggcattggatgctcttcatcaaacgtttaatggcataaactaacatccaaacactagtctttaccactgaagtgcccttcaacatcaaagataatatgtgaaatgcatgtttcttgctaaagaaaacttgcaagaaaatcaggagcgatgtattgttttattcagggagagtagctcctgatgcatctcagctcatgactgagaatcagactgctctagaaaagctcactggaaccatggaatggagcctccgagaaggtgttatggtttctgaatttctgggagattttgctccttgtcaactgaagaaatttcatgtatggagacctggact

SEQ ID NO: 28858 - DNA, 2891 bp, Homo sapiens
  source 1..2891: mol_type = unassigned DNA
actagagtctccggcttcgctcacgcgccttgggcataagagtcctctcgttggtcccggaggtggggttgcgctcacaaggggcgaccgtcgccacggtggcggccactgcatcgcgtcccacctccgcggccctgggcgccgtggtgtcgacgggccccgagcctatgacgggccagggccagtcggcgtccgggtcgtcggcgtggagcacggtattccgccacgtccggtatgagaacctgatagcgggcgtgagcggcggcgtcttatccaaccttgcgctgcatccgctcgacctcgtgaagatccgcttcgccgtgagtgatggattggaactgagaccgaaatataatggaattttacattgcttgactaccatttggaaacttgatggactacggggactttatcaaggagtaaccccaaatatatggggtgcaggtttatcctggggactctactttttcttttacaatgccatcaagtcatataaaacagaaggaagagctgaacgtttagaggcaacagaataccttgtctcagctgctgaagctggagccatgaccctctgcattacaaacccattatgggtaacaaaaactcgccttatgttacagtatgatgctgttgttaactccccacaccgacaatataaaggaatgtttgatacacttgtgaaaatatataagtatgaaggtgtgcgtggattatataagggatttgttcctgggctgtttggaacatcgcatggtgcccttcagtttatggcatatgaattgctgaagttgaagtacaaccagcatatcaatagattaccagaagcccagttgagcacagtagaatatatatctgttgcagcactatccaaaatatttgctgtcgcagcaacatacccatatcaagtcgtaagagctcgtcttcaggatcaacacatgttttacagtggtgtaatagatgtaatcacaaagacatggaggaaagaaggcgtcggtggattttacaagggaattgctcctaatttgattagagtgactccagcctgctgtattacctttgtggtatatgaaaacgtctcacattttttacttgaccttagagaaaagagaaagtaagctcaaagaggacaattccagtatatctgcccaaggcagcaacaagctcttttgtgtttaaggcataaaagaagaattctgcatagaaacatggctcatattcgaaattgctctatagtcattagaagccagagaactgctaagtctcctgcaatgtttttcttgctttttgccttccccatatatatggaacttggctacctctgcctgaaatggctgccatcaacacaatgttaaaactgacacgaaggatagagtttcacagatttctacgttttattggtggaagctgatttgcaacatttgctaaatggattagatgaatgtacttctttttgtgagcttacttgcctggattgctttaaaattaacctttgtgcaataccaagaaaatagctctttaaaagaatgtctttgtatgtctcaaggtaaattaaggatttactgaataaggtgttgaccaaatccagaccattttattttatttttttatttatttattttttgagatggagtcttgctttgtcgcccaggctggagtgcagtggcgtgatctcagctcactgcaacctccacctcccgggttcacgccattctcctgcctcagcctcctgagtagctgggactacaggcacctgccaccacgcctggctaacttttttttatattttgagtagaaatggggtttcaccatgttagccaggatggtctcaatctcctgaccttgtgatccgcctgccttggcctcccaaagtgctgggattacaggcgtgagccactgcgcctggccagaccattttagaattgggaaattttagtgagaaaaaatgcactgtaaatatgctttagttttaattcagttgggatgcactacctagcgaaaattgagaaactatatacttctcagagaaatatctgacatctattgtcattccattgctattttttttccccagagacttccataatttaaaataaaatcctagatccagttcttgttttttggcataaatacttaatctattttaaatttataaaatctgagcttctaggatccagctgtgtcaacctttatttagcatatataactataaatcacttattacagatgctaaatagatcaccttttacagatgctgaaatgtttgggatatgtttgttgacaaggtaaatggaaatgagaaactttatacttcagttttcagatatatggatctagatcccaaataaatgattaatcttcattggtttctcaaattcaggttgaaatacaaattaatagcctttattgattttacttttatgagtcattgtagacatctataaatataaaagggcctgtacccaaaggatgccagaatactagtatttttatttatcgtaaacatccacgagtgctgttgcactaccatctatttgttgtaaataaaagtgttgttttcaaagccatctttaaatagttctttaaaaataggtcttttttttatattttggaaaaggcattgtttttaaagtaaagataaaatggtaagtacctaattgtatttactgtaatatcttataacatgcagatgaatgctttataagttaaatatgatgtattttttcatacttctggattatactataattcatatgaaatcttgatattagtccccacacggaaaaagtgaactgcagttgatatttggtgtttaagatagcaccattgtttaaataccgcctatgtactcccaaatgaataaaacataattcttgtcctctgagagcatacaa

SEQ ID NO: 28859 - DNA, 2348 bp, Homo sapiens
  source 1..2348: mol_type = unassigned DNA
atgacgggccagggccagtcggcgtccgggtcgtcggcgtggagcggcggcgtcttatccaaccttgcgctgcatccgctcgacctcgtgaagatccgcttcgccgtgagtgatggattggaactgagaccgaaatataatggaattttacattgcttgactaccatttggaaacttgatggactacggggactttatcaaggagtaaccccaaatatatggggtgcaggtttatcctggggactctactttttcttttacaatgccatcaagtcatataaaacagaaggaagagctgaacgtttagaggcaacagaataccttgtctcagctgctgaagctggagccatgaccctctgcattacaaacccattatgggtaacaaaaactcgccttatgttacagtatgatgctgttgttaactccccacaccgacaatataaaggaatgtttgatacacttgtgaaaatatataagtatgaaggtgtgcgtggattatataagggatttgttcctgggctgtttggaacatcgcatggtgcccttcagtttatggcatatgaattgctgaagttgaagtacaaccagcatatcaatagattaccagaagcccagttgagcacagtagaatatatatctgttgcagcactatccaaaatatttgctgtcgcagcaacatacccatatcaagtcgtaagagctcgtcttcaggatcaacacatgttttacagtggtgtaatagatgtaatcacaaagacatggaggaaagaaggcgtcggtggattttacaagggaattgctcctaatttgattagagtgactccagcctgctgtattacctttgtggtatatgaaaacgtctcacattttttacttgaccttagagaaaagagaaagtaagctcaaagaggacaattccagtatatctgcccaaggcagcaacaagctcttttgtgtttaaggcataaaagaagaattctgcatagaaacatggctcatattcgaaattgctctatagtcattagaagccagagaactgctaagtctcctgcaatgtttttcttgctttttgccttccccatatatatggaacttggctacctctgcctgaaatggctgccatcaacacaatgttaaaactgacacgaaggatagagtttcacagatttctacgttttattggtggaagctgatttgcaacatttgctaaatggattagatgaatgtacttctttttgtgagcttacttgcctggattgctttaaaattaacctttgtgcaataccaagaaaatagctctttaaaagaatgtctttgtatgtctcaaggtaaattaaggatttactgaataaggtgttgaccaaatccagaccattttattttatttttttatttatttattttttgagatggagtcttgctttgtcgcccaggctggagtgcagtggcgtgatctcagctcactgcaacctccacctcccgggttcacgccattctcctgcctcagcctcctgagtagctgggactacaggcacctgccaccacgcctggctaacttttttttatattttgagtagaaatggggtttcaccatgttagccaggatggtctcaatctcctgaccttgtgatccgcctgccttggcctcccaaagtgctgggattacaggcgtgagccactgcgcctggccagaccattttagaattgggaaattttagtgagaaaaaatgcactgtaaatatgctttagttttaattcagttgggatgcactacctagcgaaaattgagaaactatatacttctcagagaaatatctgacatctattgtcattccattgctattttttttccccagagacttccataatttaaaataaaatcctagatccagttcttgttttttggcataaatacttaatctattttaaatttataaaatctgagcttctaggatccagctgtgtcaacctttatttagcatatataactataaatcacttattacagatgctaaatagatcaccttttacagatgctgaaatgtttgggatatgtttgttgacaaggtaaatggaaatgagaaactttatacttcagttttcagatatatggatctagatcccaaataaatgattaatcttcattggtttctcaaattcaggttgaaatacaaattaatagcctttattgattttacttttatgagtcattgtagacatctataaatataaaagggcctgtacccaaaggatgccagaatactagtatttttatttatcgtaaacatccacgagtgctgttgcactaccatctatttgttgtaaataaaagtgttgttttcaaagcc

SEQ ID NO: 28860 - DNA, 1347 bp, Homo sapiens
  source 1..1347: mol_type = unassigned DNA
ataagagtcctctcgttggtcccggaggtggggttgcgctcacaaggggcgaccgtcgccacggtggcggccactgcatcgcgtcccacctccgcggccctgggcgccgtggtgtcgacgggccccgagcctatgacgggccagggccagtcggcgtccgggtcgtcggcgtggagcacggtattccgccacgtccggtatgagaacctgatagcgggcgtgagcggcggcgtcttatccaaccttgcgctgcatccgctcgacctcgtgaagatccgcttcgccgtgagtgatggattggaactgagaccgaaatataatggaattttacattgcttgactaccatttggaaacttgatggactacggggactttatcaaggagtaaccccaaatatatggggtgcaggtttatcctggggactctactttttcttgagccatgaccctctgcattacaaacccattatgggtaacaaaaactcgccttatgttacagtatgatgctgttgttaactccccacaccgacaatataaaggaatgtttgatacacttgtgaaaatatataagtatgaaggtgtgcgtggattatataagggatttgttcctgggctgtttggaacatcgcatggtgcccttcagtttatggcatatgaattgctgaagttgaagtacaaccagcatatcaatagattaccagaagcccagttgagcacagtagaatatatatctgttgcagcactatccaaaatatttgctgtcgcagcaacatacccatatcaagtcgtaagagctcgtcttcaggatcaacacatgttttacagtggtgtaatagatgtaatcacaaagacatggaggaaagaaggcgtcggtggattttacaagggaattgctcctaatttgattagagtgactccagcctgctgtattacctttgtggtatatgaaaacgtctcacattttttacttgaccttagagaaaagagaaagtaagctcaaagaggacaattccagtatatctgcccaaggcagcaacaagctcttttgtgtttaaggcataaaagaagaattctgcatagaaacatggctcatattcgaaattgctctatagtcattagaagccagagaactgctaagtctcctgcaatgtttttcttgctttttgccttccccatatatatggaacttggctacctctgcctgaaatggctgccatcaacacaatgttaaaactgacacgaaggatagagtttcacagatttctacgttttattggtggaagctgatttgcaacatttgctaaatggattagatgaatgtacttctttttgtgagcttacttgcct

SEQ ID NO: 28861 - DNA, 1448 bp, Homo sapiens
  source 1..1448: mol_type = unassigned DNA
gcgccgcagaggccggtgaggcgccggcggccacgccgcggaaggcgcgggccgagcagagccgggcgttggagcccgcgcgcgcatggaggcgttgccggcagccccctgagggcagcggggagacaagacccggcgacctcgcgcatccctcgagccgccacgcgctctcgccaccgggcggcgacgggccgcggagccggcgcggccatggcgacgggcggccagcagaaggagaacacgctgcttcacctcttcgccggcgggtgtggaggcacagttggtgctattttcacttgtccactagaagtcattaagacacggttgcagtcttcaagattagctctccggacagtctactatcctcaggttcatctggggaccattagtggagctggaatggtgagaccaacatccgtgacacctggactctttcaggttctgaagtcgatcttggagaaagagggaccaaagtcactttttagaggcttgggtccaaatttggttggagttgcaccatcaagggctgtatactttgcatgttactccaaagccaaagagcaatttaatggcattttcgtgcctaacagcaatattgtgcatattttctcagctggctctgcagcttttatcacaaattccttaatgaatcctatatggatggttaaaacccgaatgcagctagaacagaaagtgaggggctctaagcagatgaatacactccagtgtgctcgttacgtttaccagaccgaaggcattcgtggcttctatagaggattaactgcctcgtatgctggaatttccgaaactataatctgctttgctatttatgaaagtttaaagaagtatctgaaagaagctccattagcctcttctgcaaatgggactgagaaaaattccacaagtttttttggacttatggcagctgctgctctttctaagggctgtgcctcctgcattgcttatccacacgaagtcataaggacgaggctccgggaagagggcaccaagtacaagtcttttgtccagacggcgcgcctggtgttccgggaagaaggctaccttgccttttatagaggactgtttgcccagcttatccggcagatcccaaatactgccattgtgttgtctacttatgagttaattgtgtacctgttagaagaccgtactcagtaacaggccggaaaattgtgctctagaagaataaaactgaaaaactctagagaattttttttccccattgatgtttagaaagtttgagactgaaacaggaaaggccataaaatatctggttcatatcacctgttggacatttccttttggattcatgctttctggaaggtttaaattcattaacgttaatagttaattataactttttttttaacttaagaggattcagggttaagcaccaactaaattaaatcatgctatttaatttaagtata

SEQ ID NO: 28862 - DNA, 2986 bp, Homo sapiens
  source 1..2986: mol_type = unassigned DNA
tacagacagcctaaacgccaccaccacagggcctgtgccgtgcccctgacccgggcacagaaggccactggcccggaggccatggagacggtgcccccagcagtggacctggtgctgggtgcttctgcctgctgcctggcctgtgtcttcaccaaccccctggaggtggtgaagacgcggctgcagctgcagggggagctgcaggcccggggcacctacccacggccctaccatggcttcatagcctctgtcgctgctgtggcccgagcagacgggctgtggggcctgcagaaggggctggctgccggccttctgtaccaaggcctcatgaatggcgttcgtttctactgctacagcctggcgtgccaggctggcctcacgcagcaaccaggtggcaccgtggttgcgggagccgtggcgggggcactgggagccttcgtggggagccctgcttacctgatcaaaacgcagctgcaagctcagacagtggccgcagtggccgtgggacaccagcacaatcaccagactgtcctgggtgccttggagaccatctggcggcagcaagggctcttggggctgtggcagggcgttggtggggctgtgccccgagtcatggtgggctcagctgcccagctggccaccttcgcctctgccaaggcctgggtacagaagcaacagtggctccctgaggacagctggctggtggccctggctgggggcatgatcagcagcatagccgtggttgtcgtcatgactcccttcgatgtggtcagcacgcggctatacaatcagccggtggacacagctggcaggggccagctctatgggggcctcaccgactgcatggtgaagatctggcggcaggagggccccctggcactctacaagggcctgggccccgcctacctgcgcctgggcccccacaccatcctcagcatgctcttctgggacgagcttcggaaactggctgggcgggcccagcacaagggcacctagacgacggccctcacccccacgtcctgacacggccggcacttggccggaagtgagagcctgctccaggacaactggctgtcccggggcgggccatgggcccaggccctgccagaggtcccgggagagtgtggacagctctggtccatccagccccttggcccacccaggtccagagcatccacttcaagttaccacccattctgtcttccagacagttctcttccttctctgtactgcgtactgggtcaccacatcccagagccttgctcagttatagcaactgctgcgggcgtgcacatggcataggcccagtaacttacatacatcggctcacttaggcctcagacagcagcacgaggcaggcacttttacttcttttaccattagaaagccaaggcctagagtggtgggctttgaccacagccacacaattttgaagtggcagagccaggactggagcttagccctgctcaccctagacctatgcgcttgacaagtgcgtgactgtgacaggcccatgggcccggactgcccataggggtcactgtaccatggcaaaggctgaggtgcaccaggaggctgtggcgtcgtcacctgccttatttgctggagaagctgtagcaaagaaccacagactgggcgacttagacaatagaaatgtattttctcacagttctggaggctggatgctggagaccaaggtgtcagtgggctggtttcttctgaggcctctgtccatggcttgcagatgctgctttctctctgtgtctgcacatggtggtccctcgatgtgcgtctgggtcctgatctcctcctcttataaggacacaaatcatgttggcttagggcccaccctcatgaccccactttaatttttttttttttttttgagatgaagtctcactctgccacccaagctggagtgcagtggcacgatctcggttcactgcaaccttggcctcctaggttcaagcaattctcctgccccagcctcctgagtagctgggattacaggtgtgtgccaccacacccggccaatttttgtatctttagtagagatggggttttgccatgttggccagactggtctcgaactcctgacctcaagtgatccactggccttggcctcccaaagtgctgggattacaggcatgagccacctcacttggcccaattttaacttaattatctctgtcaagagcctatctccatatacagtcacatcctgagctactagggggtaggacttcaacatgcacttctgcaggggccgcagttcagccaacatcatctttttttttgagatggagtctcgctttgttgcccaggctggagtgcggtggtgcaatctcggctcaccacaacctccacctcccaggttcaagtgattctcctgcctcagcctcccgagttgctgggactataggtgtgcgccaccatgcccagctaattttgtatttttagtagagacaggctttcgctgtgttggccaggctggtcttgaatgcctgaccttgccgcccgcctcggcctcccaaaatgctgggattacaggcgtgagccaccgcgcctggcctcagccaacatcatctaagggctctcacggagggcctcccagctgcccgccctgtgggcatttgcacatatcctgacaagcctgaaagaagctccgggtgcccattgttcagtccaggtgcccattgttcccgggactgaggcccgggaaagggaagcgacgtggcagggccagcagcagaccctgggcctttctctagactgagcaccattccccgtgggtgtgctctcagcgccgcaccgaccttcacactgcagagatggatgccaactccctggcaggggcaggactgctgccgagcagccccacctgccctcccagccacaccccaagtctgtaagggccgctcccaggaacacctgctactgcacactccaaaccaataaagttttatattttgtttacttcaacgac

SEQ ID NO: 28863 - DNA, 2785 bp, Homo sapiens
  source 1..2785: mol_type = unassigned DNA
ttactttcttactcttgggtcagttcctgctacagctatcccaccatggacttcttgatgagtggcctggcagcctgcggggcctgtgtattcaccaatcccctggaggtggtgaagaccaggatgcagttgcaaggagaactgcaggcccctggcacataccagcggcactaccgaaatgtcttccatgccttcatcaccatcggcaaggtggatggccttgctgccctgcagaaaggcctggcccccgccctcttgtaccagttcctgatgaatggcatccgactgggcacctatgggctggctgaggctgggggctacctgcacacagccgaaggcacccacagtcctgcccgcagcgcagcagctggggccatggctggggtcatgggagcctacttggggagccccatctacatggtgaagacacacctgcaggcacaggcagcctcagaaattgctgtagggcaccagtataagcatcagggcatgtttcaggcgctaaccgagattggccagaaacatggtctggtggggttatggcgtggggctctgggcggcctgccccgagttatcgtcggttcctccacccagctgtgcaccttctcatccaccaaggacctcctgagccagtgggagatctttcctccccagagctggaagttggcgctggtggctgccatgatgagtggcattgcagttgtcttggccatggcaccctttgatgtggcctgcacaaggctctacaaccagcccacagatgcacagggcaagaaccgagtccccaagttctcagcaacatcatgcagtgcttcagcgcctttactggggaccaaagatgttaggatcgtgaagggtcagactggtcaccagctgttcaaagtcacccaggctccagggtgcagcccgattctcctgggaacccagtcatgagatacccgcccgttccttcctccttacgggggctgattgaaggtaagcaagagatcagtctggtactggggcagcctcagcaaggcctgatgaagtgtcacgtcctttgctacctaaggggatcagagtcaggatgcttacctggatctctgcgtccccgctaccgcccttccaggacattacacactctcgggccctcacctgctggttttccttagctatctgctgcttgccagagaggacccaggcttcttgacagcggcccctcagggccaggttctccaaactgagaggctgaacagactccacatggacagccctagccccctgcacgccaccaacatcctcaaagtggtacctggagtagggaagcggggtcaggaagggacatctctggtcgcctccccgggagcatctttaagttgcaggcctggctcccggcccgtgcgtggtctcaccgcccggattaaccgtcggccgcgggccccgcccactggtccgaccccgcccctgccattggccagccgggggccattccctcaccgcgcagccgcttcgccccgtacgtgggcctgcagctcgagaagttccactatcaggctctggtccgtcacgggatggcagaaaacttcttgattgtccgggaccggtcggaggtcgctggagtgaggcgaggcagaccctggttgaccccggtctcttcccacaacccacccagtcagccgcccctgggcgccccggccttctcaccttacgtcaatggcccccatggggaggatggcggaaaaggcgcccccgaacagcgggcagtctctcgtgggctccatgggtctgaggctgggttatgggcattagaaaggtttaaaagaagtccacattgggtcacgtggcatcggctccctgggtttcgcagctgccaccgccacccgggtctggcttagctcccggatcctttaagatttggctccgccctgcgctctcgttggccaatcggcgccaagaccctgggggcgggggtcagcggctttgctccggaagccgcgctcttaggagtgcgcctggcgggacggtggggtctgccttggggttggacttagggttagggtctatgtcgcccccggtggtcacgagcatgctcccgccagcctcctcttgattgattgattgattgattgattgacaggtctcgctgtgtcgcccaggctgtaatgcagtggcgcgatcaccgctcactgcagtctccacctccaggactcaagtgatactcctgcctcagcctcttgagtggctcctgctcccgccaccacgcccggctaaatttttaattacttgtagaaatggggcggggtggggagtgtctcccaatcttgcccaggctggcctcaaactcctggactcaagcgatcctcccgcctcggctccctaagtgctggaattacaggcgagagccacagcgcctggcctcctcgtccttttcaagtggtcacaccttccaagaaggtcgcctgagaccctcctgaggggcaggtgctcgtcaaaggggcccacgtctaggtagggtctcttgagtcaggaaagcatagtttcacggtgttctgggcctctgaaagaagaatgggctgccacccagaccgctaattcatagatctgctgctgggaattaggggaacaatgcgtccaggttaggattcaggtctcacatcttcctgaaagtgagagccaacctgggtattagaaatctaattcctctcaaatatttgccttgggaatgctcccgggcaggtgcaaccccacccccagctccacacacctggacagaagcacagattaaaccctcttttgtttgtctttt

SEQ ID NO: 28864 - DNA, 2211 bp, Homo sapiens
  source 1..2211: mol_type = unassigned DNA
gagctccggtggctgcctggggacgctcagggacgctcattcctggccagagtcctgacttctttctcggatcgagatctcgttgctggctcgaggaaatcaccggctcttctcccggatccttttcttctctcacttgctggctttcttcttcctgcctccctggcttccatctcccaaccccgcgattccctcctctactcccgtgctcccgtcgcccgccatcctgagccatcccacctgcaaccttctgtcttttgcccctccttgacctcagagggtcctgccttaagcttctcaccagaatctcctagatttctatctcttccctgcttgccagctcttgactcccaaattccagctgacgtttgaccacttgacatttgaccctgacacccttgactgcaaatctaaattcttatcttctgcaacctgtactgctgaaacaggccttccccctgtcttccaaccccgctttctgacacccatttttactttcttactcttgggtcagttcctgctacagctatcccaccatggacttcttgatgagtggcctggcagcctgcggggcctgtgtattcaccaatcccctggaggtggtgaagaccaggatgcagttgcaaggagaactgcaggcccctggcacataccagcggcactaccgaaatgtcttccatgccttcatcaccatcggcaaggtggatggccttgctgccctgcagaaaggcctggcccccgccctcttgtaccagttcctgatgaatggcatccgactgggcacctatgggctggctgaggctgggggctacctgcacacagccgaaggcacccacagtcctgcccgcagcgcagcagctggggccatggctggggtcatgggagcctacttggggagccccatctacatggtgaagacacacctgcaggcacaggcagcctcagaaattgctgtagggcaccagtataagcatcagggcatgtttcaggcgctaaccgagattggccagaaacatggtctggtggggttatggcgtggggctctgggcggcctgccccgagttatcgtcggttcctccacccagctgtgcaccttctcatccaccaaggacctcctgagccagtgggagatctttcctccccagagctggaagttggcgctggtggctgccatgatgagtggcattgcagttgtcttggccatggcaccctttgatgtggcctgcacaaggctctacaaccagcccacagatgcacagggcaagggcctcatgtaccgggggatactggacgctctgctgcagacagctcggaccgagggcatttttggcatgtacaaggaaccgagtccccaagttctcagcaacatcatgcagtgcttcagcgcctttactggggaccaaagatgttaggatcgtgaagggtcagactggtcaccagctgttcaaagtcacccaggctccagggtgcagcccgattctcctgggaacccagtcatgagatacccgcccgttccttcctccttacgggggctgattgaaggtctcgctgtgtcgcccaggctgtaatgcagtggcgcgatcaccgctcactgcagtctccacctccaggactcaagtgatactcctgcctcagcctcttgagtggctcctgctcccgccaccacgcccggctaaatttttaattacttgtagaaatggggcggggtggggagtgtctcccaatcttgcccaggctggcctcaaactcctggactcaagcgatcctcccgcctcggctccctaagtgctggaattacaggcgagagccacagcgcctggcctcctcgtccttttcaagtggtcacaccttccaagaaggtcgcctgagaccctcctgaggggcaggtgctcgtcaaaggggcccacgtctaggtagggtctcttgagtcaggaaagcatagtttcacggtgttctgggcctctgaaagaagaatgggctgccacccagaccgctaattcatagatctgctgctgggaattaggggaacaatgcgtccaggttaggattcaggtctcacatcttcctgaaagtgagagccaacctgggtattagaaatctaattcctctcaaatatttgccttgggaatgctcccgggcaggtgcaaccccacccccagctccacacacctggacagaagcacagattaaaccctcttttgtttgtctttt

SEQ ID NO: 28865 - DNA, 1960 bp, Homo sapiens
  source 1..1960: mol_type = unassigned DNA
gaagcgaaatctccccttctacagagttcctccggcgcttcctccaccccgggatacacagaacctcatctcctacggtgctgaagcctgcagcagggcaggatgggcaggagagcagagccgcggagtctgcggcgcgggtgaagagcggcgcgtaattcccgcagcaagattgttccgcgcccgcagcccctggactagcaggatccgaaccccggcggctgcgtgcttataggcgcagacgtcagagagcccgcggcttaaagcgcgtcgcctggctagcgccaccccctagccttcttcaaggcctccagggctgggcccaagcgcccgtcgacggcaccctgggcccagaggactcgcgggcctcatctccaatgattcagaactcacgtccgtcgctgctgcaaccccaagatgtcggagacacggtggaaacgcttatgttacatccggtgatcaaggctttcctgtgtggctccatcagtgggacctgctctaccctccttttccaacctctggatctccttaaaacacgcctgcaaaccctccagccctcagatcatgggtctagacgtgttgggatgttggctgtactcttgaaggtggttcgcacggagagtcttttgggcctttggaaagggatgtccccttccattgtgagatgtgtccctggcgttggaatctactttggcactctctactctttgaagcagtatttcttgcgaggccatcccccaaccgccctggagtcagtcatgctgggggtgggctctcgctctgttgcaggggtctgtatgtcacctatcactgtaatcaagacgcgctatgagagtgggaaatatggctatgagagtatctacgctgccctgaggagcatctatcacagtgaggggcaccggggcctcttcagtggcctgacagcaactctccttcgagatgcgcccttctcaggaatctacctgatgttttacaaccagaccaaaaatatagtgcctcatgaccaggtggatgcaacccttattcctattacaaatttcagctgtgggatatttgctggtattctggcctcactggtaactcaacctgcggatgttatcaaaactcatatgcagctttatccactgaagtttcaatggattggccaagcagtgacacttattttcaaagactatggactacgtggcttcttccaaggtggcatcccccgagccctccgcagaactctaatggcagcaatggcgtggacggtgtatgaagagatgatggccaagatgggcctgaagtcctgaccaagagaggactgggaacgggtgaaatctgttgccctgcttggtttctgccaagggctgctgcttcttactattctgcagtaagatgaagtcctacctggaaaaccaggcagaaattgtgttgcctttgccttcagtaatccccttaaggagaaaatatatggacctgatttcagccttcagaatctccaaaagaggagtcatcaattcatagagcacactagggtgttaggagagagctttgcatactctgagaggctacttggaaaggcattttcccaggagagctctgtcaggtggctgcgcttcagccccacccctacaccacagggtctccttgggtatgttcttgggcaagcaatcacaaagccagagaagctgtaagctgcctgccgggcctgaggagctccaaccagggaagactggatgtgaggagaggagtcactgtcaccaggtcacagactgactgaggtgatggtaggatgaggaggaacagatgcccttctttaattggttctcagttaacttctcagaggctctggagaacgggacagtggctttctagcctctgaatgttccaaataaaattttttggtcttggcccctgtactgttttacctctaaattctggcatttttttttccctgcaattaaagtgctgtacttta

SEQ ID NO: 28866 - DNA, 1607 bp, Homo sapiens
  source 1..1607: mol_type = unassigned DNA
ggggcctcgtggcgcggtgtaggggcggggcccccttggctgctttcggcgtcggcctaggtgcgctgcgagcgcgcgcggaccgcgcacaggcggcggagccggtatgggcccgcctgaccctgggcgccgcgccgcacgagcaccagcctagagccaggactgaagcttcaagatggctgaccaggaccctgcgggcatcagccccctccagcaaatggtggcctcaggcaccggggctgtggttacctctctcttcatgacacccctggacgtggtgaaggttcgcctgcagtctcagcggccctccatggccagcgagctgatgccttcctccagactgtggagcctctcctataccaaatggaagtgcctcctgtattgcaatggtgtcctggagcctctgtacctgtgcccaaatggtgcccgctgtgccacctggtttcaagaccctacccgcttcactggcaccatggatgccttcgtgaagatcgtgaggcacgagggcaccaggaccctctggagcggcctccccgccaccctggtgatgactgtgccagctaccgccatctacttcactgcctatgaccaactgaaggccttcctgtgtggtcgagccctgacctctgacctctacgcacccatggtggctggcgcgctggcccgcctgggcaccgtgactgtgatcagccccctggagcttatgcggacaaagctgcaggctcagcatgtgtcgtaccgggagctgggtgcctgtgttcgaactgcagtggctcagggtggctggcgctcactgtggctgggctggggccccactgcccttcgagatgtgcccttctcagccctgtactggttcaactatgagctggtgaagagctggctcaatgggttcaggccgaaggaccagacttctgtgggcatgagctttgtggctggtggcatctcagggacggtggctgcagtgctgactctaccctttgacgtggtaaagacccaacgccaggtcgctctgggagcgatggaggctgtgagagtgaaccccctgcatgtggactccacctggctgctgctgcggaggatccgggccgagtcgggcaccaagggactctttgcaggcttccttcctcggatcatcaaggctgccccctcctgtgccatcatgatcagcacctatgagttcggcaaaagcttcttccagaggctgaaccaggaccggcttctgggcggctgaaaggggcaaggaggcaaggaccccgtctctcccacggatggggagagggcaggaggagacccagccaagtgccttttcctcagcactgagggagggggcttgtttcccttccctcccggcgacaagctccagggcagggctgtccctctgggcggcccagcacttcctcagacacaacttcttcctgctgctccagtcgtggggatcatcacttacccaccccccaagttcaagaccaaatcttccagctgcccccttcgtgtttccctgtgtttgctgtagctgggcatgtctccaggaaccaagaagccctcagcctggtgtagtctccctgacccttgttaattccttaagtctaaagatgatgaacttctgc

SEQ ID NO: 28867 - DNA, 1610 bp, Homo sapiens
  source 1..1610: mol_type = unassigned DNA
ggggcggggcccccttggctgctttcggcgtcggcctaggtgcgctgcgagcgcgcgcggaccgcgcacaggcggcggagccggtatgggcccgcctgaccctgggcgccgcgccgcacgagcaccagcctagagccaggactgaagcttcaagatggctgaccaggaccctgcgggcatcagccccctccagcaaatggtggcctcaggcaccggggctgtggttacctctctcttcatgacacccctggacgtggtgaaggttcgcctgcagtctcagcggccctccatggccagcgagctgatgccttcctccagactgtggagcctctcctataccaaattgccctcctctctccaatccacagggaagtgcctcctgtattgcaatggtgtcctggagcctctgtacctgtgcccaaatggtgcccgctgtgccacctggtttcaagaccctacccgcttcactggcaccatggatgccttcgtgaagatcgtgaggcacgagggcaccaggaccctctggagcggcctccccgccaccctggtgatgactgtgccagctaccgccatctacttcactgcctatgaccaactgaaggccttcctgtgtggtcgagccctgacctctgacctctacgcacccatggtggctggcgcgctggcccgcctgggcaccgtgactgtgatcagccccctggagcttatgcggacaaagctgcaggctcagcatgtgtcgtaccgggagctgggtgcctgtgttcgaactgcagtggctcagggtggctggcgctcactgtggctgggctggggccccactgcccttcgagatgtgcccttctcagccctgtactggttcaactatgagctggtgaagagctggctcaatgggttcaggccgaaggaccagacttctgtgggcatgagctttgtggctggtggcatctcagggacggtggctgcagtgctgactctaccctttgacgtggtaaagacccaacgccaggtcgctctgggagcgatggaggctgtgagagtgaaccccctgcatgtggactccacctggctgctgctgcggaggatccgggccgagtcgggcaccaagggactctttgcaggcttccttcctcggatcatcaaggctgccccctcctgtgccatcatgatcagcacctatgagttcggcaaaagcttcttccagaggctgaaccaggaccggcttctgggcggctgaaaggggcaaggaggcaaggaccccgtctctcccacggatggggagagggcaggaggagacccagccaagtgccttttcctcagcactgagggagggggcttgtttcccttccctcccggcgacaagctccagggcagggctgtccctctgggcggcccagcacttcctcagacacaacttcttcctgctgctccagtcgtggggatcatcacttacccaccccccaagttcaagaccaaatcttccagctgcccccttcgtgtttccctgtgtttgctgtagctgggcatgtctccaggaaccaagaagccctcagcctggtgtagtctccctgacccttgttaattccttaagtctaaagatgatgaacttctgc

SEQ ID NO: 28868 - DNA, 1289 bp, Homo sapiens
  source 1..1289: mol_type = unassigned DNA
ggcccccttggctgctttcggcgtcggcctaggtgcgctgcgagcgcgcgcggaccgcgcacaggcggcggagccggtatgggcccgcctgaccctgggcgccgcgccgcacgagcaccagcctagagccaggactgaagcttcaagatggctgaccaggaccctgcgggcatcagccccctccagcaaatggtggcctcaggcaccggggctgtggttacctctctcttcatgacacccctggacgtggtgaaggttcgcctgcagtctcagcggccctccatggccagcgggaagtgcctcctgtattgcaatggtgtcctggagcctctgtacctgtgcccaaatggtgcccgctgtgccacctggtttcaagaccctacccgcttcactggcaccatggatgccttcgtgaagatcgtgaggcacgagggcaccaggaccctctggagcggcctccccgccaccctggtgatgactgtgccagctaccgccatctacttcactgcctatgaccaactgaaggccttcctgtgtggtcgagccctgacctctgacctctacgcacccatggtggctggcgcgctggcccgcctgggcaccgtgactgtgatcagccccctggagcttatgcggacaaagctgcaggctcagcatgtgtcgtaccgggagctgggtgcctgtgttcgaactgcagtggctcagggtggctggcgctcactgtggctgggctggggccccactgcccttcgagatgtgcccttctcagccctgtactggttcaactatgagctggtgaagagctggctcaatgggttcaggccgaaggaccagacttctgtgggcatgagctttgtggctggtggcatctcagggacggtggctgcagtgctgactctaccctttgacgtggtaaagacccaacgccaggtcgctctgggagcgatggaggctgtgagagtgaaccccctgcatgtggactccacctggctgctgctgcggaggatccgggccgagtcgggcaccaagggactctttgcaggcttccttcctcggatcatcaaggctgccccctcctgtgccatcatgatcagcacctatgagttcggcaaaagcttcttccagaggctgaaccaggaccggcttctgggcggctgaaaggggcaaggaggcaaggaccccgtctctcccacggatggggagagggcaggaggagacccagccaagtgccttttcctcagcactgagggagggggcttgtttcccttccctcccggcgacaagctcca

SEQ ID NO: 28869 - DNA, 4045 bp, Homo sapiens
  source 1..4045: mol_type = unassigned DNA
gcctcgctctggccctgcaggttgtgtttccgcctctaccccgcctccattccgttgctctctcagtctcagacccgggctctcggtccgccgcttcaggtcttggcgcagcctcagagagttggcgcggctctgtgttgaccaaacctagtggatgcagttagcgccggagcccggccccgcccgtcaccagggttattcccgccttctaggtttgccaggactgccggccctgcagctgccttctgccccaggtttttggctactgatgttacaaacaataaaatattggagcatagagttgaagaacagactcaaaccaggtttttatttaattagttaaaaatatggatcctgagacaaggggacaagagattatcaaagtgacacctcttcaacaaatgcttgcctcatgtactggagctatactgacatcagtaatagtgacacccctggatgttgttaaaattagactccaagcccaaaacaacccactccccaaaggaaaatgttttgtatatagtaatggactcatggatcatctatgtgtctgtgaagagggaggcaacaaactatggtataagaagccaggaaatttccagggaacattggatgcattttttaaaatcattcgaaatgagggcattaaatctctatggagtggccttcctcctaccctagtgatggcagttcctgccacagttatttattttacctgctatgatcaattaagtgctcttctgagatctaagttaggagaaaatgaaacctgcataccaattgttgctggaattgtagccagatttggtgcagtaactgtgataagtccactagaattgattagaaccaagatgcagtccaagaagttttcttacgtggaactgcatcgatttgtcagcaagaaagtatctgaagatggttggatttccctttggaggggctgggctcctactgttcttagagatgtacctttctcagcaatgtactggtataactatgaaattttaaagaagtggttatgtgagaaatctggtttatatgagccaacatttatgatcaactttacttcaggggcattgtctggttcttttgctgctgttgcaactttaccatttgatgtagtaaaaacacaaaagcagacacaactttggacatatgaaagtcataaaatttctatgcctttgcatatgtcaacctggattataatgaagaacattgttgctaaaaatggattttccggattattttcaggcctaattcctcgcttaattaaaattgctcctgcttgtgccattatgatcagtacatatgaatttggaaaggcttttttccagaaacaaaatgttcgaaggcagcaatactagtgatgctgtttcaacttgaaacaacaactatagccaaagaagatggagactcttaggcaagaatgtttttcaccattattctctcacaatgattttatgtctttctttcctataatttaaataaataatttcagctctacctctaaatcataattttaaaataaattttatcttatttttggtgatattgaaaaagatattctagaaatcaccaccattgagcattcttgtaaaaatagattactccttagcatcaaaagcagtctcttgaaagtttaatattatatgtttcagtgtaacataatcttactgggagtgtgttgaatacaccagaactttttgaattgtgtgctgaatgatgtacatagtctagaagaaaaaagcccaagtcttgtgcacatttaaatcgtgtacataagtatttccgtatttcagtaaagtagataaagcactcgttaaatagcattgtttacatcgaccaaatattgcctgtttcctttaattcaaatgcattaggttcccgcctccctctccttccccgccatgttgctgttttaaggcttcatatgtattaacatttctctgatcaaaattgtggctgttttccttatgaaccataatataatcatttgtgtgatgtacattgtgccatttttgatgactaaatgtctatatttctgccattcctgtaagagagggagttttttactgatagtagcaaatgttcacttcagtcaaacttgggtgttcagtggtaaaccatatagtatttagactggtaaaaatagtttgcacacaggaatagcctctgatttttagctctcttgtaatccaagtatcattgttcatggaattctctaggtcatttttattgtgttgttctaacaagacagattattgctacaacaatagttacaagatatttctaaaatatcctttgatttttactctaagtatggtagagtaagaggctaaacaagaagctgtttccttgaagacattgctttcagtcaccatacatgtctaaataatttagcttatcattcattctatgtaggaatgagataagaaaggatatgatggcaggaaaagaaatgctattcattttttatactttagttttattttcttaggatctatatcctatatatatatattttttaaagcactaatttattgcagtctttattttagaaaaatgtgaagcatttttttctcccctaaaatgaatatatttagatgacaagtctttagtgctggtagaggaactaattgattttgtactatagtaggaaagtgtttatatgtttcaccagaaataaaatatgtagggtttgtatgtaatcttctgtgtttatcctatgttgatttaccttaaatttgcaacatacatatccacataaatattcatgactttcttatatttcattaaaatgttttatggcttcttaaaatcatcactgtgcttctaaatatttttacgtaaaatcattgtataatgctatactgtgatatacatgaaagtttatcttgaacagtgctctttaacaatattaaatttaaatttatcttggttttgctatgcttatgggtaattcatagaaaacagaaaaaatactgttcccaaaaggcagttatatatttcagtttaatatcacctataagtatgagaaaggtttccatgtctcctacccctcactgcacttaggaaaattcttatttatgaataaagtaagataagtaaatctaattgcctagtcgtttttttaacacatatacatgcaatgtatctggatgaatagaaggctgaattgaagctttctttatatttaagaggtaaaaagaaatattaatacttttaaaatatactaacaaccaaaaagtgttcagaattttgctataataataatttgtattaaaatagtacctagaaaaattcagtctatggaataggtaaaattttaaaattttaatttgctctcagagttctgtctgataaaataattgaactataattggcatgatgaatattcccaggttttacttcagtatataaatttaactctcagccacatgggctttccagacttttcaatacatatgatgttgcaggaattgcaatatttgcaaacatgtgccacaacagtgttcttggtgatgtttctaaaacagtttttattctattaatgttaaattttctaacataaacatttaattgattaatgtaaaattttaggaaggaacatctttaattttcaatatgagatggttgcaacctttaaagtagtacatatttgattttttttaaaaggcaatatttttttttctaggaaaactattcattatggttatttaactgcatatgttttttaaatttttccctcttggaacaacatgtactggggcctatcaaagggtggagggtgggaggagggagaggaacaggaaaaataactaatgggtactaggcttaatacctgggtgatgaaataatctgtataataaatccccatgacacaaaagtttacctgtgtaacaaacctgcatatgtacccctaaacttaaattcttccctctttttgtcttgggcacaagtttttgggatatggaaaagtttattgtatcccttttgaattttcttctaagatgaactttttaaataaaagatattactgctttta

SEQ ID NO: 28870 - DNA, 1549 bp, Homo sapiens
  source 1..1549: mol_type = unassigned DNA
aatcctcccactagacactcccgcatggtagctggagcagcaaacaactgcttagggatttgaagccaggtgtcctaacttcctccatgggcgctcagcctggggaacctcagaacacttgctctaggatccagacactgtttaggagggtcaagaccttactcatcaaagccccgcctcccccccaacctccgcctccacccccatcctggaaccctggctgtacacacgtgtatgggtacgcgtttggccacatgcatgacaacaaccttgaacatctcccgtcacagcaggtactggacacaggagagcagctgatggtccccgtggaagtcctggaagtggataacaaggaggccttgtggaagtttctactctcaggagctatggccggggcggtgtctcgcacgggcacggcacctctggacagagccaaggtgtacatgcaggtctactcctccaagacgaacttcaccaacctgctgggggggctacagagcatggtccaggagggcggcttccgctccctgtggcggggcaacggcatcaacgtgctcaagattgctcctgagtatgccatcaagttctccgtattcgagcagtgcaagaattacttctgtggaatacaagggtccccgcccttccaggagcgtctccttgctggctccctggctgtggccatctcccagaccctcatcaaccccatggaggtgctgaagacgcggttgaccttgcgtcggacgggccagtacaaggggctgctggactgcgccaggcagatcttgcagcgagagggcacccgcgccctttaccgcggctacctgcccaatatgctcggcatcatcccctatgcctgcaccgacctggctgtctatgagatgctccagtgcttctgggtgaagtcaggcagggatatgggggaccccagtggcctggtcagtctgtcgtctgtgacgctatccacgacctgtggccagatggccagctacccactgactctggtgcgcaccaggatgcaggcccaagataccgtggagggctcaaatcccaccatgcgcggagtcctccagcggatcctggcccagcagggctggctagggctgtaccgaggcatgacccccacgctactgaaggtcttaccagcaggtggcatcagctatgtggtgtacgaagccatgaagaaaaccctgggcatataggctgtgagctggacgacacagcctaggcagaaatgggacaggaggacctgatgacccctggccccaaagagccctcgaggcctcaaggttcaggccctggggcagtttttggtggcaaaagcaggctgggggtgggggtggggctctgggtcagaagattcctgaagctggggttggtggtgggtggaggggggcagtgctgggtcagaaaactcctgggactccctccccagggtgcagcctgagacaagaaacgtggactccagtctggccccttgtgggtcgtcctggctccagggcgaaatggtgaacatgtcacacaacaaggaataaagagatggtttttgctg

SEQ ID NO: 28871 - DNA, 1647 bp, Homo sapiens
  source 1..1647: mol_type = unassigned DNA
aatcctcccactagacactcccgcatggtagctggagcagcaaacaactgcttagggatttgaagccaggtgtcctaacttcctccatgggcgctcagcctggggaacctcagaacacttgctctaggatccagacactgtttaggagggtcaagaccttactcatcaaagccccgcctcccccccaacctccgcctccacccccatcctggaaccctggctgtacacacgtgtatgggtacgcgtttggccacatgcatgacaacaaccttgaacatctcccgtcacagcaggtactggacacaggagagcagctgatggtccccgtggaagtcctggaagtggataacaaggaggccttgtggaagtttctactctcaggagctatggccggggcggtgtctcgcacgggcacggcacctctggacagagccaaggtgtacatgcagctactcgggaggctgaggcaggagaatcgcctgaacctgggaggcggaggttgcagtgagccgagatcccccgaccgcactccagcctgggcgacagagtctactcctccaagacgaacttcaccaacctgctgggggggctacagagcatggtccaggagggcggcttccgctccctgtggcggggcaacggcatcaacgtgctcaagattgctcctgagtatgccatcaagttctccgtattcgagcagtgcaagaattacttctgtggaatacaagggtccccgcccttccaggagcgtctccttgctggctccctggctgtggccatctcccagaccctcatcaaccccatggaggtgctgaagacgcggttgaccttgcgtcggacgggccagtacaaggggctgctggactgcgccaggcagatcttgcagcgagagggcacccgcgccctttaccgcggctacctgcccaatatgctcggcatcatcccctatgcctgcaccgacctggctgtctatgagatgctccagtgcttctgggtgaagtcaggcagggatatgggggaccccagtggcctggtcagtctgtcgtctgtgacgctatccacgacctgtggccagatggccagctacccactgactctggtgcgcaccaggatgcaggcccaagataccgtggagggctcaaatcccaccatgcgcggagtcctccagcggatcctggcccagcagggctggctagggctgtaccgaggcatgacccccacgctactgaaggtcttaccagcaggtggcatcagctatgtggtgtacgaagccatgaagaaaaccctgggcatataggctgtgagctggacgacacagcctaggcagaaatgggacaggaggacctgatgacccctggccccaaagagccctcgaggcctcaaggttcaggccctggggcagtttttggtggcaaaagcaggctgggggtgggggtggggctctgggtcagaagattcctgaagctggggttggtggtgggtggaggggggcagtgctgggtcagaaaactcctgggactccctccccagggtgcagcctgagacaagaaacgtggactccagtctggccccttgtgggtcgtcctggctccagggcgaaatggtgaacatgtcacacaacaaggaataaagagatggtttttgctg

SEQ ID NO: 28872 - DNA, 3132 bp, Homo sapiens
  source 1..3132: mol_type = unassigned DNA
gaggcggggccgtggcggctggaggtagcggcggcggcgacgcgtccgggccggtgagggggcgcggggggcgccgggggggcccaagcgtcagcggcccgcgcctgtcgggctgaactgaggaccgagtctcctgccattccgagcaggcctggtatgggtaatggtgtgaaggaaggcccggtgcgattgcatgaggatgctgaggctgtcctgtcctcgtccgtctcatcaaagcgtgaccacaggcaagtgctcagctccctgctgtctggggccctggctggtgcccttgccaaaacagcggtagctcccctggaccgaaccaaaatcatcttccaagtgtcttcaaaaagattttctgccaaggaggccttccgggtcctctactacacctacctcaacgagggatttctcagcttgtggcgcgggaactcggccaccatggtgcgcgtggtgccctacgccgccatccagttcagcgcacacgaggagtacaagcgcatcctgggcagctactatggcttccgtggagaagccctgcccccttggcctcgcctcttcgccggcgcactggctggaacgacagccgcttcactgacctaccccctggacctggtcagagcgcggatggccgtaaccccgaaggaaatgtacagcaacatctttcatgtcttcatccgcatctcgagagaagaggggctgaagactctctaccatggatttatgcccaccgtgctgggggtcattccctacgctggcctgagcttcttcacctatgagacgctcaagagcttgcacagagagtacagcggccgccggcagccctaccccttcgagcgcatgatcttcggcgcctgcgctggcctcatcgggcagtcggcctcgtacccgctggatgtggtgcggcggcgcatgcagacggccggcgtcacgggctacccgcgcgcctccatcgcccgcacgctgcgcaccatcgtgcgggaggagggcgccgtgcgcggcctctacaaaggcttgagcatgaactgggtcaagggtcccatcgccgtgggcatcagcttcaccaccttcgacctcatgcagatcctgctgcggcacctgcagagctaggggaccctgagctgctctcaggacggtggaccggtgacccctttgtattctgggcccatggaacggtgggggggtgcgcttgattctacttcaggaggcacatggggcgctttatggaacgagcaggtgggcctgaggggcctgggctcagagtccacgtccaaacgcaaagctggcagccctggaagtgcagtgttggggcgatggtgtggggggtcccgcagctcccctcttccttcctctgcagacgctggcgctgtctgccggaggtgttgcccaaaaggccctagtggggcgtggtcagctccacctcctgatcctgtgtgtcctccgacatgctgctgattctagtgacccctgtccccaccaggctcagagccagaccgcgcctggaccttcttgttctgactccacgtgcctgcccggcctccagggtgcgggggcgcctttcttgcaggcggaccctgcccaggatggggccagcctcgtgctcagctttggccacaaatgcagcccctggcccaccccaccctgccggccctgccttctccagtatttcccacatggccacgactcctcagtcactagagcctcctgctgggaacagtgtcccccagagcctcatgtctatcctagaccctgcaagcagctgggtccccaagagtgcatctccccctagagttgcctgcccatgcccacctgctttgtaaccttcccaggagattcatgcttgctctgcacagcagggctcgaggcccaggccatgacacggaactgcctcaggtttgggtcagacctgcatcctggggcatctgctgaaatgtgagcacacaaaccacctcctttggcccagaagccccccaggcctagcatctcagtgccccaaccctctgcccagctgtggtatccagcaggtccttgggtccccacttgagcaggcacttggctgggatatggagcaatttaaagcccacaggggttgttcagtttctatgaaatggagcatggggtgcctgctagcctcaatcccccgaagtgggagcctcatgatagagtatagcttgggggtgggaggtgaggaaaatctgaggtacccaggggaacccccagctaactggtctctcagaggagtcccccagggcccgccagctatcacagggactcagaaacacccatttcctaatgacatggtgagtttcttgatttcttttttttgtttgttttgttttggttttcaacttggctgaccccgggtctatgatctattcacatcgaacccctgactggtctgcctggtgccagggtgagcgtgaccgtgagtgttgctttcgacagctggctcagcacacgctgtgtgaagggatctgagcttgttcatctccagtcgtgacttcatttcccttccttctgtcctcctcctgttcttgccttggacctgcaggtgtgcagaccgctctctctgccttccttgcatgtggccaccagccatccctgatcttgtccccagaggcccaggcagcctgtgatggctgtgaggggctgtcccactgtgtgggtatcccttacccagcacttaaacttggcaggagaggcagggcaaccctcacagggagatgggagggcacccaactcccacaagcatgcaacagcagtaggaattgggggtctgccccaggtgggtgagaccaaatgagtggatttggggccacaggctaggcaggagagacaaggggtaggtgggagggtcccccagtccctgctgaccccagtgtgtctccccggagatggctcctagctgagtgggacccggcaggagttggggacagtgctgtcccccacccctgcacacagccaggccctcaggctctgcggtcactcgcctccctgctggtcactggtcttggtctggagttatattttgatgccatgaagacactgtttatatctaatgtttatatattttaaagatttgtgccaagagagtatatttaataaaaacttaaatgacttcttctcctg

SEQ ID NO: 28873 - DNA, 2783 bp, Homo sapiens
  source 1..2783: mol_type = unassigned DNA
cagggaggggcggcgggggcgcactgaacatttaggaagcaagatgtctagcaggctgggccttgagagaacagtaactgtttcgcaactgaaagtcgctactcgagccttgccaactggggagactatgcccatgatatccgcggcctcggaccccggaccctccaggccctcgcgccccacccccgaccagcctcgggccaggctagggcgtagacggggcttcccgtccctcacgcgggcccgccccatgccgggcggggcctggggcccgccacctccgcccgtggccggagagccccaggcccgagccacgcggtcttccgggcccgggtcggggctcgatggctacgtggaggcgggacggccgactgacaggcggccaaaggctgctgtgcgctgggctggcggggacgctcagcctcagcctcaccgcgcccctggagctcgccaccgtgctggcccaggttggcgtcgtgcgaggccacgcccggggaccgtgggccacagggcaccgggtgtggcgggcagaggggctccgggccctgtggaaggggaacgcggtggcgtgcctgcgcctcttcccctgcagcgccgtgcagctcgccgcctaccgcaaatttgttgtgctgttcacagatgacctgggccacatttcccagtggagctccatcatggctgggagtctcgcaggcatggtttccaccattgtaacatatcctacagacctcatcaaaacccggttgatcatgcagaacatactggaaccatcgtacagggggctcctccatgctttttctactatttaccaacaggaagggttccttgccctttatcgaggggtttccctcactgttgtaggtgctctcccgttctctgctggctcccttcttgtttacatgaacctggagaaaatctggaacggaccccgagatcagttctctctcccacagaactttgctaatgtctgtctggctgctgcagtgacccagaccctctcctttccctttgagaccgtgaagagaaagatgcaggctcagagcccctacctcccacacagtggaggagtagatgtccatttctcaggagcagtggactgcttccggcagatagtgaaggcccagggggtcctggggctctggaatggattgacagccaatttactgaagatagttccatattttggaattatgtttagcacctttgagttctgcaagagaatctgtctttatcaaaatggttacattctgtctccactgagctataaattgaccccaggagtcgatcagagtttgcagccccaggaattacgagaattaaagaagttcttcaaaacgagaaaaccgaagcctaaaaaaccaactctataaaatggaatggaactagaagtgcactgactgacagcatgttgcaatcacagataaatgtagcctcataactgtgcacctgaggagggatgagaagctactgctatctgctgctctgggaaatgagatggtttggccatgcaccacctcagatctccaaactgatgtccctgtgaacacctgcactatgagaaggtttcccaacaagagtgtatcatgatggcattccacgagattttataaccagagtctagcagtgataaaatgtacaatttacgctctgaatagaaacatgacaccaaagaaagggcattgccatgacatctcaaagcaacaggtaattgaagtggctgagtggataccacgttgtgaggtcagccactgggtcacttgtagtcaatgcaaagcttgcacaaaccaacgtcagcctagtttcactcagtttgacctgagactttccaatacaatctgttgttttgttttgtttttagagacagggtcttgctctgtcacccagactggagtacaatgacacaatcatagctcactgcagcctttaactactgggctcaagacatcctcctgcttcagcctccagagagttgggaccataggtgcacaccaccacacctagctaattttttggggaggtcttgctatgttgcccaggctggtcttgaactcctgggctcatgcaatcctcctgccttggcctcccaaagcgctaggattagaggtgtgagccgctgcaccctgccccagtacaatcttttttgaactcaaatttttgctgacatctgagtgcacacaccacagtgtaaattatgccttatcagaatctaaatgaaaatagcgaacatttaaaagctatcaccattgtagtagaatcatccttcttttttgaaatttgaagcatcccaggcttaaaatcttgtgtttcagaaagacagtttataccatgactgcttaattatccccccaaagaccttctgattgaagtcatgtacagttcagtggcctaaattctctgcctttttaacttgctttgcaagcctactctgaaaataagttatttagtcaagttattctcaaagatgtcccagttgcctagaaaggatcaaatggaacatttgacacacatactcaaaaaaatgtaactgactataaacactttaacctaatcatctgtatcaaactttctaaaaatcaaatctcaggattgttccactttagagattctatgtaaagtttatataactatacttgtcaaatagcacctatctatgcatttaaaaatgcattaatatctaacataaaattgttaatttatacacacacatacactcatacatagagagagattttcggtatgttgcaagtattttttccgattaaatttattttccaaagaaaaaa

SEQ ID NO: 28874 - DNA, 2273 bp, Homo sapiens
  source 1..2273: mol_type = unassigned DNA
atggctacgtggaggcgggacggccgactgacaggcggccaaaggctgctgtgcgctgggctggcggggacgctcagcctcagcctcaccgcgcccctggagctcgccgcctaccgcaaatttgttgtgctgttcacagatgacctgggccacatttcccagtggagctccatcatggctgggagtctcgcaggcatggtttccaccattgtaacatatcctacagacctcatcaaaacccggttgatcatgcagaacatactggaaccatcgtacagggggctcctccatgctttttctactatttaccaacaggaagggttccttgccctttatcgaggggtttccctcactgttgtaggtgctctcccgttctctgctggctcccttcttgtttacatgaacctggagaaaatctggaacggaccccgagatcagttctctctcccacagaactttgctaatgtctgtctggctgctgcagtgacccagaccctctcctttccctttgagaccgtgaagagaaagatgcaggctcagagcccctacctcccacacagtggaggagtagatgtccatttctcaggagcagtggactgcttccggcagatagtgaaggcccagggggtcctggggctctggaatggattgacagccaatttactgaagatagttccatattttggaattatgtttagcacctttgagttctgcaagagaatctgtctttatcaaaatggttacattctgtctccactgagctataaattgaccccaggagtcgatcagagtttgcagccccaggaattacgagaattaaagaagttcttcaaaacgagaaaaccgaagcctaaaaaaccaactctataaaatggaatggaactagaagtgcactgactgacagcatgttgcaatcacagataaatgtagcctcataactgtgcacctgaggagggatgagaagctactgctatctgctgctctgggaaatgagatggtttggccatgcaccacctcagatctccaaactgatgtccctgtgaacacctgcactatgagaaggtttcccaacaagagtgtatcatgatggcattccacgagattttataaccagagtctagcagtgataaaatgtacaatttacgctctgaatagaaacatgacaccaaagaaagggcattgccatgacatctcaaagcaacaggtaattgaagtggctgagtggataccacgttgtgaggtcagccactgggtcacttgtagtcaatgcaaagcttgcacaaaccaacgtcagcctagtttcactcagtttgacctgagactttccaatacaatctgttgttttgttttgtttttagagacagggtcttgctctgtcacccagactggagtacaatgacacaatcatagctcactgcagcctttaactactgggctcaagacatcctcctgcttcagcctccagagagttgggaccataggtgcacaccaccacacctagctaattttttggggaggtcttgctatgttgcccaggctggtcttgaactcctgggctcatgcaatcctcctgccttggcctcccaaagcgctaggattagaggtgtgagccgctgcaccctgccccagtacaatcttttttgaactcaaatttttgctgacatctgagtgcacacaccacagtgtaaattatgccttatcagaatctaaatgaaaatagcgaacatttaaaagctatcaccattgtagtagaatcatccttcttttttgaaatttgaagcatcccaggcttaaaatcttgtgtttcagaaagacagtttataccatgactgcttaattatccccccaaagaccttctgattgaagtcatgtacagttcagtggcctaaattctctgcctttttaacttgctttgcaagcctactctgaaaataagttatttagtcaagttattctcaaagatgtcccagttgcctagaaaggatcaaatggaacatttgacacacatactcaaaaaaatgtaactgactataaacactttaacctaatcatctgtatcaaactttctaaaaatcaaatctcaggattgttccactttagagattctatgtaaagtttatataactatacttgtcaaatagcacctatctatgcatttaaaaatgcattaatatctaacataaaattgttaatttatacacacacatacactcatacatagagagagattttcggtatgttgcaagtattttttccgattaaatttattttcc

SEQ ID NO: 28875 - DNA, 1032 bp, Homo sapiens
  source 1..1032: mol_type = unassigned DNA
cttccgggcccgggtcggggctcgatggctacgtggaggcgggacggccgactgacaggcggccaaaggctgctgtgcgctgggctggcggggacgctcagcctcagcctcaccgcgcccctggagctcgccaccgtgctggcccaggttggcgtcgtgcgaggccacgcccggggaccgtgggccacagggcaccgggtgtggcgggcagaggggctccgggccctgtggaaggggaacgcggtggcgtgcctgcgcctcttcccctgcagcgccgtgcagctcgccgcctaccgcaaatttgttgtgctgttcacagatgacctgggccacatttcccagtggagctccatcatggctgggagtctcgcaggcatggtttccaccattgtaacatatcctacagacctcatcaaaacccggttgatcatgcagaacatactggaaccatcgtacagggggctcctccatgctttttctactatttaccaacaggaagggttccttgccctttatcgaggggtttccctcactgttgtaggctcagagcccctacctcccacacagtggaggagtagatgtccatttctcaggagcagtggactgcttccggcagatagtgaaggcccagggggtcctggggctctggaatggattgacagccaatttactgaagatagttccatattttggaattatgtttagcacctttgagttctgcaagagaatctgtctttatcaaaatggttacattctgtctccactgagctataaattgaccccaggagtcgatcagagtttgcagccccaggaattacgagaattaaagaagttcttcaaaacgagaaaaccgaagcctaaaaaaccaactctataaaatggaatggaactagaagtgcactgactgacagcatgttgcaatcacagataaatgtagcctcataactgtgcacctgaggagggatgagaagctactgctatctgctgctctgggaaatgagatggtttggccatgcaccacctcagatctcc

SEQ ID NO: 28876 - DNA, 3482 bp, Homo sapiens
  source 1..3482: mol_type = unassigned DNA
tttccggttccggcagtaccggtagcccagtcgagatggaggaagatgcgaccggcagacggcattcgctgggaacgacggatagactgggggctgcggcctagaggtccgggcttggagttcgcctcagacgcggtggagccgccggagtctgagaaggtcttcaggcaccatggaggacaaacgcaacatccagatcatcgagtgggaacacctggacaagaagaagttctacgtgtttggtgtggcaatgacaatgatgatccgtgtcagtgtctacccattcaccctcatccgcacccggttgcaagttcagaaggggaagagcctctaccatgggaccttcgatgccttcatcaagatcctgcgagcagatggtatcactggcctctaccgagggttcctggtcaataccttcaccctcatctctggccagtgttatgtcaccacttatgagctcacccggaagtttgtagctgactacagccagagtaacacagtcaaatcactggtggctggtggctcagcctcccttgtggcccagagcatcacagtgcccattgatgtagtctcccagcacctgatgatgcaacgcaagggtgagaaaatgggccgctttcaggtgcgggggaacccagagggacaaggggtagttgcctttggccaaaccaaggacatcatcaggcagatcctgcaggctgatggacttcgcggcttctatcgaggctatgtggcttcactgcttacctatatcccaaacagtgctgtctggtggcccttctatcacttctatgcagagcagctctcctacctgtgtcctaaggagtgccctcacattgtctttcaagctgtctcggggcccctggctgcagccactgcctccatcctcaccaatcccatggatgtcatacgaacccgtgtgcaggttgagggcaagaactccatcatcctgaccttcagacagctgatggcagaagaagggccttggggcctcatgaagggcctctcggccagaatcatctcagccacaccttccaccattgtcattgtggtgggctatgagagcctcaagaaactcagcctccgacctgagctggtggactcgagacactggtaaccagtggtggggagagaagcctgctgttttccacactaccgtgggtcaggggcagagtggagaggacagcaccctctccaggtgctcccaccacacacccagccctgccctgggccaagtggcctatctgggatagggatagagactttgaactgctcttgctgaagaggctccacgcctggatcccttgcccccactatttaaaattctcttctgagctgggctccctcactcagtccctgtatttgatactggcctaaagaccccaccccccaccctgccagcccttcttctggcttccccttccatctgtgtccctgagaccctgagaagagctgtacatagagcttgcttactaccactggttcttcctcttgggctttcagcccagactccaagcagctgctatcaaccctctctcccttcatctcttagccttgcttatttttattttgggaccgagctgcccactagatgactctgcttttccctgcatttggggctaaggtgccaggtacttatttgcacagggagcaggagcagcaaaaaatctctggttctccagagcactcgtcctctctttggaggggttattaggttgggagaaatgttgatacttttgttttgtgtgtgtgtgtgtgtgtgtgtgtgtgtgtgtgtgtgtgtgtgttttaacatctgtgaaccaggctattagtcctgctaaagcgccaatcctgctgtcagagctcacccccttcctaagacaggtagaaaaatgtaatgtagctttttccacaagccacttccctgtcccttcagtctcaggagccctaggagagtctaagctggggcatcccctggcccagaggactcccgtggtgggcacagttctaagtggatcaggctgtcttgggtgcactggacttggagcactaccttgagaagtcaggttgagaaagtagttgatctagaaggcaacaagtgggcatgtgttccccagcacattacccaggccagcagagccaaacctaggagagggcagtgggtagattctctgccccaggcagccatgacatacacataaataccccaatcactcagacttacggcaacaagtgttgtctcactatggtgatctctaagatccacatcactggatgcgtagtcatcccagtcatggtaccctgtggaggaatgctggaagaacataaagagcagttcagaaagtcacccaataccaggaccactgcatttaccagcctgatactgccaagattatctgatgctctcctcaggagctaggagaggagtgctccttcctccctaccgctactctccccaagcctgtgttgcaggtagagaggtgcagcaaatagagaaggcatgtcaaaccctgcatttctacctgagacgtgtgacctggatgatcctccaaaccctattggtcccaccccctgggaaaggccatggtgccagtttgaaaggtgctagctacctgaagccttgatatttcttcatggctgccgcacattcttccaccttggccagaacaggttctgaaaaccacttctctaccttcaccaccaccactgcccatcttgatctctttgagggttttcccatttcacttgatcttatttttgtttatcccttcctgcactttgtcaagagagtcctccagtttctatccaggaatgttcacatccaaagggttggacccacggatcattctgaatcttcctgcccctcctcactgcttaaccctgagaaccacaaatataatggaagcagttccccccaccctcaccccatctctttaagctcatcctagcaagacctctagagaccctagagactcgactttagtccttccccgccatggcacagtggggaaggtgtcaatggggagtgtcacggacaggaggtaggatcctgccgctcgcgtcttagtgtttctccctcaagactttccttctgttttgttgtcttgtgcagtattttacagcccctcttgtgtttttctttatttctcgtacacacacgcagttttaagggtgatgtgtgtataattaaaaggacccttggcccatactttcctaattctttagggactgggattgggtttgactgaaatatgttttggtggggatgggacggtggacttccattctccctaaactggagttttggtcggtaatcaaaactaaaagaaacctctgggagactggaaacctgattggagcactgaggaacaagggaatgaaaaggcagactctctgaacgtttgatgaaatggactcttgtgaaaattaacagtgaatattcactgttgcactgtacgaagtctctgaaatgtaattaaaagtttttattgagcccccga

SEQ ID NO: 28877 - DNA, 1324 bp, Homo sapiens
  source 1..1324: mol_type = unassigned DNA
agtcgagatggaggaagatgcgaccggcagacggcattcgctgggaacgacggatagactgggggctgcggcctagaggtccgggcttggagttcgcctcagacgcggtggagccgccggagtctgagaaggtcttcaggcaccatggaggacaaacgcaacatccagatcatcgagtgggaacacctggacaagaagaagttctacgtgtttggtgtggcaatgacaatgatgatccgtgtcagtgtctacccattcaccctcatccgcacccggttgcaagttcagaaggggaagagcctctaccatgggaccttcgatgccttcatcaagatcctgcgagcagatggtatcactggcctctaccgagggttcctggtcaataccttcaccctcatctctggccagtgttatgtcaccacttatgagctcacccggaagtttgtagctgactacagccagagtaacacagtcaaatcactgatggcagaagaagggccttggggcctcatgaagggcctctcggccagaatcatctcagccacaccttccaccattgtcattgtggtgggctatgagagcctcaagaaactcagcctccgacctgagctggtggactcgagacactggtaaccagtggtggggagagaagcctgctgttttccacactaccgtgggtcaggggcagagtggagaggacagcaccctctccaggtgctcccaccacacacccagccctgccctgggccaagtggcctatctgggatagggatagagactttgaactgctcttgctgaagaggctccacgcctggatcccttgcccccactatttaaaattctcttctgagctgggctccctcactcagtccctgtatttgatactggcctaaagaccccaccccccaccctgccagcccttcttctggcttccccttccatctgtgtccctgagaccctgagaagagctgtacatagagcttgcttactaccactggttcttcctcttgggctttcagcccagactccaagcagctgctatcaaccctctctcccttcatctcttagccttgcttatttttattttgggaccgagctgcccactagatgactctgcttttccctgcatttggggctaaggtgccaggtacttatttgcacagggagcaggagcagcaaaaaatctctggttctccagagcactcgtcctctctttggaggggttattaggttgggagaaatgttgatacttttgttttgtgtgtgtgtgtgtgtgtgtgtgtgtgtgtgtgtgtgtgtgtgttttaacatctgtgaaccaggc

SEQ ID NO: 28878 - DNA, 1290 bp, Homo sapiens
  source 1..1290: mol_type = unassigned DNA
cagtcgagatggaggaagatgcgaccggcagacggcattcgctgggaacgacggatagactgggggctgcggcctagaggtccgggcttggagttcgcctcagacgcggtggagccgccggagtctgagaaggtcttcaggcaccatggaggacaaacgcaacatccagatcatcgagtgggaacacctggacaagaagaagttctacgtgtttggtgtggcaatgacaatgatgatccgtgtcagtgtctacccattcaccctcatccgcacccggttgcaagttcagaaggggaagagcctctaccatgggaccttcgatgccttcatcaagatcctgcgagcagatggtatcactggcctctaccgagggttcctggtcaataccttcaccctcatctctggccagtgttatgtcaccacttatgagctcacccggaagtttgtagctgactacagccagagtaacacagtcaaatcactggtggctggtggctcagcctcccttgtggcccagagcatcacagtgcgggggaacccagagggacaaggggtagttgcctttggccaaaccaaggacatcatcaggcagatcctgcaggctgatggacttcgcggcttctatcgaggctatgtggcttcactgcttacctatatcccaaacagtgctgtctggtggcccttctatcacttctatgcagagcagctctcctacctgtgtcctaaggagtgccctcacattgtctttcaagctgtctcggggcccctggctgcagccactgcctccatcctcaccaatcccatggatgtcatacgaacccgtgtgcaggttgagggcaagaactccatcatcctgaccttcagacagctgatggcagaagaagggccttggggcctcatgaagggcctctcggccagaatcatctcagccacaccttccaccattgtcattgtggtgggctatgagagcctcaagaaactcagcctccgacctgagctggtggactcgagacactggtaaccagtggtggggagagaagcctgctgttttccacactaccgtgggtcaggggcagagtggagaggacagcaccctctccaggtgctcccaccacacacccagccctgccctgggccaagtggcctatctgggatagggatagagactttgaactgctcttgctgaagaggctccacgcctggatcccttgcccccactatttaaaattctcttctgagctgggctccctcactcagtccctgtatttgatactggcctaaagaccccac

SEQ ID NO: 28879 - DNA, 2196 bp, Homo sapiens
  source 1..2196: mol_type = unassigned DNA
agaatggtgccattgcagatcaacacgcactttaaataatcaaaacccctatctttcccctgggaaggaggaagccgaggaaggctgtgtttctgactcacacgggggagtcgggggagtcgtaaacaaccctgaagagaacagccaggcctggcgctctgggcttggtcctgggacacccgtttgacactgtaaaggtgaggctgcagacccagaccacctaccggggcatcgttgattgcatggtcaagatttaccgccatgagtccctcctgggcttcttcaagggaatgagcttccccattgccagcatagctgtggtcaactctgtcctgtttggggtctatagcaacaccctgctggtgctcacggccacctcccaccaggagcggcgggcccagccgcccagctacatgcacatcttcctagcgggctgcaccggggggttcctgcaggcctactgtctggctccttttgacctcatcaaagtccggctacaaaaccagacagagccaagggcccagccagggagccccccaccccggtaccaggggcccgtgcactgtgcagcctccatcttccgggaggaggggccccgggggctgttccgaggagcctgggccctgacgctgagggacacccccacggtggggatctacttcatcacctatgaagggctctgtcgccagtacacaccagaaggccagaatcccagctcagccacggtgctggtggcagggggctttgcaggcattgcttcctgggtggcagccacgcccttagacatgatcaagtcccggatgcagatggatggactgagacgcagagtgtaccaggggatgctggactgcatggtgagcagcatccggcaggaaggactgggagtcttcttccggggggtcaccatcaacagtgcccgcgcctttcccgtcaatgctgtcaccttcctcagctacgaatatctcctccgctggtggggatgagccctgcggcaatgccagcagctccccatcaggcccacggcctggaggccagtttgagattggaggccaggttgaaagcttgcaaatcagtgcaagaggctcagcccttcctaaccaaggtgcctcccacccgcgcagatctgggctgggcagacacctgtgggagccggaagccagggggcctgtgcagcctccctgtgtagctggccttgactcctttgcctcccacatctgtgaaacagggagcatgaggcacaagtgagctggcaagtggtgctggtgacatcccagctcctgtcctgtgccttcacctctttttttttttttttttttttttgagatggagtctttctctgtcacccaggctggaatgcagtggcgtgatctcggctcactgcaacctccgcctttccaccttccgggttcaagcaactctcctgcctcagcctcccaagtagctgggactataggcgcccgccaccacacccagctaaatttttgtatttttagtagagacagggtttcaccatgtcagccaggatggtcttgatctcctgactttgtgatccgcccgcgtcggcctctcaaagtgctgggattacaggcgtgagccaccgcgcccggctgccttcacctcttaaggagctctgagactccacttctgagagtccctgcggcctcccacctccctgcctttcaaagctctctcccccatgacccaggataaccctatgtctcctcccccagaatccttcagtggctctcatcaccttcaggaaaagcccaaactccttccaccctccaggttcctccctccccacgaggctttgttctcctggggttgcttcctggaccctgaacaagttgtgctctcattggccgggcctggccagcagtgcacagtgcctggcaggttgactctaccatccccggggctggccccgctctcctccgagacccaggctgagcccagtcccctcacccttccttgacttacctccccacctgaggctgactttggggttcccagacaccctacccacacacatgccttgatcatagcacttgcctgcgcttcttcagagtcattaatttgcttctcggcttccccactggactgtgagctgcctgaggtcagggattgcgctttggatggtttccagcctgagcctggtgcttgaacagacgtgtgcaataaatgctcgttaaatga

SEQ ID NO: 28880 - DNA, 2214 bp, Homo sapiens
  source 1..2214: mol_type = unassigned DNA
agatccttgaaagggttttggttttgactgagcagaatggtgccattgcagatcaacacgcactttaaataatcaaaacccctatctttcccctgggaaggaggaagccgaggaaggctgtgtttctgactcacacgggggagtcgggggagtcgtaaacaaccctgaagagaacagccaggcctgttcccgcaagcccagacaatgccggtggaggaatttgtggctggctggatctctggcgctctgggcttggtcctgggacacccgtttgacactgtaaagctcctgggcttcttcaagggaatgagcttccccattgccagcatagctgtggtcaactctgtcctgtttggggtctatagcaacaccctgctggtgctcacggccacctcccaccaggagcggcgggcccagccgcccagctacatgcacatcttcctagcgggctgcaccggggggttcctgcaggcctactgtctggctccttttgacctcatcaaagtccggctacaaaaccagacagagccaagggcccagccagggagccccccaccccggtaccaggggcccgtgcactgtgcagcctccatcttccgggaggaggggccccgggggctgttccgaggagcctgggccctgacgctgagggacacccccacggtggggatctacttcatcacctatgaagggctctgtcgccagtacacaccagaaggccagaatcccagctcagccacggtgctggtggcagggggctttgcaggcattgcttcctgggtggcagccacgcccttagacatgatcaagtcccggatgcagatggatggactgagacgcagagtgtaccaggggatgctggactgcatggtgagcagcatccggcaggaaggactgggagtcttcttccggggggtcaccatcaacagtgcccgcgcctttcccgtcaatgctgtcaccttcctcagctacgaatatctcctccgctggtggggatgagccctgcggcaatgccagcagctccccatcaggcccacggcctggaggccagtttgagattggaggccaggttgaaagcttgcaaatcagtgcaagaggctcagcccttcctaaccaaggtgcctcccacccgcgcagatctgggctgggcagacacctgtgggagccggaagccagggggcctgtgcagcctccctgtgtagctggccttgactcctttgcctcccacatctgtgaaacagggagcatgaggcacaagtgagctggcaagtggtgctggtgacatcccagctcctgtcctgtgccttcacctctttttttttttttttttttttttgagatggagtctttctctgtcacccaggctggaatgcagtggcgtgatctcggctcactgcaacctccgcctttccaccttccgggttcaagcaactctcctgcctcagcctcccaagtagctgggactataggcgcccgccaccacacccagctaaatttttgtatttttagtagagacagggtttcaccatgtcagccaggatggtcttgatctcctgactttgtgatccgcccgcgtcggcctctcaaagtgctgggattacaggcgtgagccaccgcgcccggctgccttcacctcttaaggagctctgagactccacttctgagagtccctgcggcctcccacctccctgcctttcaaagctctctcccccatgacccaggataaccctatgtctcctcccccagaatccttcagtggctctcatcaccttcaggaaaagcccaaactccttccaccctccaggttcctccctccccacgaggctttgttctcctggggttgcttcctggaccctgaacaagttgtgctctcattggccgggcctggccagcagtgcacagtgcctggcaggttgactctaccatccccggggctggccccgctctcctccgagacccaggctgagcccagtcccctcacccttccttgacttacctccccacctgaggctgactttggggttcccagacaccctacccacacacatgccttgatcatagcacttgcctgcgcttcttcagagtcattaatttgcttctcggcttccccactggactgtgagctgcctgaggtcagggattgcgctttggatggtttccagcctgagcctggtgcttgaacagacgtgtgcaataaatgctcgttaaatgatg

SEQ ID NO: 28881 - DNA, 2100 bp, Homo sapiens
  source 1..2100: mol_type = unassigned DNA
agatccttgaaagggttttggttttgactgagcagaatggtgccattgcagatcaacacgcactttaaataatcaaaacccctatctttcccctgggaaggaggaagccgaggaaggctgtgtttctgactcacacgggggagtcgggggagtcgtaaacaaccctgaagagaacagccaggcctgttcccgcaagcccagacaatgccggtggaggaatttgtggctggctggatctctggcgctctgggcttggtcctgggacacccgtttgacactgtaaaggtgaggctgcagacccagaccacctaccggggcatcgttgattgcatggtcaagatttaccgccatgagtccgcctactgtctggctccttttgacctcatcaaagtccggctacaaaaccagacagagccaagggcccagccagggagccccccaccccggtaccaggggcccgtgcactgtgcagcctccatcttccgggaggaggggccccgggggctgttccgaggagcctgggccctgacgctgagggacacccccacggtggggatctacttcatcacctatgaagggctctgtcgccagtacacaccagaaggccagaatcccagctcagccacggtgctggtggcagggggctttgcaggcattgcttcctgggtggcagccacgcccttagacatgatcaagtcccggatgcagatggatggactgagacgcagagtgtaccaggggatgctggactgcatggtgagcagcatccggcaggaaggactgggagtcttcttccggggggtcaccatcaacagtgcccgcgcctttcccgtcaatgctgtcaccttcctcagctacgaatatctcctccgctggtggggatgagccctgcggcaatgccagcagctccccatcaggcccacggcctggaggccagtttgagattggaggccaggttgaaagcttgcaaatcagtgcaagaggctcagcccttcctaaccaaggtgcctcccacccgcgcagatctgggctgggcagacacctgtgggagccggaagccagggggcctgtgcagcctccctgtgtagctggccttgactcctttgcctcccacatctgtgaaacagggagcatgaggcacaagtgagctggcaagtggtgctggtgacatcccagctcctgtcctgtgccttcacctctttttttttttttttttttttttgagatggagtctttctctgtcacccaggctggaatgcagtggcgtgatctcggctcactgcaacctccgcctttccaccttccgggttcaagcaactctcctgcctcagcctcccaagtagctgggactataggcgcccgccaccacacccagctaaatttttgtatttttagtagagacagggtttcaccatgtcagccaggatggtcttgatctcctgactttgtgatccgcccgcgtcggcctctcaaagtgctgggattacaggcgtgagccaccgcgcccggctgccttcacctcttaaggagctctgagactccacttctgagagtccctgcggcctcccacctccctgcctttcaaagctctctcccccatgacccaggataaccctatgtctcctcccccagaatccttcagtggctctcatcaccttcaggaaaagcccaaactccttccaccctccaggttcctccctccccacgaggctttgttctcctggggttgcttcctggaccctgaacaagttgtgctctcattggccgggcctggccagcagtgcacagtgcctggcaggttgactctaccatccccggggctggccccgctctcctccgagacccaggctgagcccagtcccctcacccttccttgacttacctccccacctgaggctgactttggggttcccagacaccctacccacacacatgccttgatcatagcacttgcctgcgcttcttcagagtcattaatttgcttctcggcttccccactggactgtgagctgcctgaggtcagggattgcgctttggatggtttccagcctgagcctggtgcttgaacagacgtgtgcaataaatgctcgttaaatgatg

SEQ ID NO: 28882 - DNA, 2286 bp, Homo sapiens
  source 1..2286: mol_type = unassigned DNA
agatccttgaaagggttttggttttgactgagcagaatggtgccattgcagatcaacacgcactttaaataatcaaaacccctatctttcccctgggaaggaggaagccgaggaaggctgtgtttctgactcacacgggggagtcgggggagtcgtaaacaaccctgaagagaacagccaggcctgttcccgcaagcccagacaatgccggtggaggaatttgtggctggctggatctctggcgctctgggcttggtcctgggacacccgtttgacactgtaaaggtgaggctgcagacccagaccacctaccggggcatcgttgattgcatggtcaagatttaccgccatgagtccctcctgggcttcttcaagggaatgagcttccccattgccagcatagctgtggtcaactctgtcctgtttggggtctatagcaacaccctgctggtgctcacggccacctcccaccaggagcggcgggcccagccgcccagctacatgcacatcttcctagcgggctgcaccggggggttcctgcaggcctactgtctggctccttttgacctcatcaaagtccggctacaaaaccagacagagccaagggcccagccagggagccccccaccccggtaccaggggcccgtgcactgtgcagcctccatcttccgggaggaggggccccgggggctgttccgaggagcctgggccctgacgctgagggacacccccacggtggggatctacttcatcacctatgaagggctctgtcgccagtacacaccagaaggccagaatcccagctcagccacggtgctggtggcagggggctttgcaggcattgcttcctgggtggcagccacgcccttagacatgatcaagtcccggatgcagatggatggactgagacgcagagtgtaccaggggatgctggactgcatggtgagcagcatccggcaggaaggactgggagtcttcttccggggggtcaccatcaacagtgcccgcgcctttcccgtcaatgctgtcaccttcctcagctacgaatatctcctccgctggtggggatgagccctgcggcaatgccagcagctccccatcaggcccacggcctggaggccagtttgagattggaggccaggttgaaagcttgcaaatcagtgcaagaggctcagcccttcctaaccaaggtgcctcccacccgcgcagatctgggctgggcagacacctgtgggagccggaagccagggggcctgtgcagcctccctgtgtagctggccttgactcctttgcctcccacatctgtgaaacagggagcatgaggcacaagtgagctggcaagtggtgctggtgacatcccagctcctgtcctgtgccttcacctctttttttttttttttttttttttgagatggagtctttctctgtcacccaggctggaatgcagtggcgtgatctcggctcactgcaacctccgcctttccaccttccgggttcaagcaactctcctgcctcagcctcccaagtagctgggactataggcgcccgccaccacacccagctaaatttttgtatttttagtagagacagggtttcaccatgtcagccaggatggtcttgatctcctgactttgtgatccgcccgcgtcggcctctcaaagtgctgggattacaggcgtgagccaccgcgcccggctgccttcacctcttaaggagctctgagactccacttctgagagtccctgcggcctcccacctccctgcctttcaaagctctctcccccatgacccaggataaccctatgtctcctcccccagaatccttcagtggctctcatcaccttcaggaaaagcccaaactccttccaccctccaggttcctccctccccacgaggctttgttctcctggggttgcttcctggaccctgaacaagttgtgctctcattggccgggcctggccagcagtgcacagtgcctggcaggttgactctaccatccccggggctggccccgctctcctccgagacccaggctgagcccagtcccctcacccttccttgacttacctccccacctgaggctgactttggggttcccagacaccctacccacacacatgccttgatcatagcacttgcctgcgcttcttcagagtcattaatttgcttctcggcttccccactggactgtgagctgcctgaggtcagggattgcgctttggatggtttccagcctgagcctggtgcttgaacagacgtgtgcaataaatgctcgttaaatgatg

SEQ ID NO: 28883 - DNA, 3088 bp, Homo sapiens
  source 1..3088: mol_type = unassigned DNA
actgcaacagctgcctctcgggttcaagcgattctcctgcctcagcatcccaagtagctgggactacaggcgcccgtcatcacacccggctaatttttgtatttttggtagagatggggtttcactatgttggtcaggctggtctcgaactcctgacctcaggtggtccttccgcctcggcctcccaaagtgctgggattacaggcgtgagccactgcgcctggcctgtatcagttatagtttttgcaaaggcagtttcaggaataagaagcagaaccaggactgcagcccaagccaccacgagaggccagtctttggggatggtcttttaggatgatctttgggggtggcccaaggagccccaggcagctccagaggcaggagtcactcaggatttattgagagcccaccctgtgccacccgctgtgcacagaacacccagagatccctgtccagacagacaagttcttcccatcgtatgttggcgtgataactgtgatggagaaagagaggaagagccagcagtgcctccggctggggaggcggggcagacctcacccaggtggtgacatttgagccccagctggaggggtgccagggcaagagtgcccaggaagagggaagagccagtccacaggcctggagacagaaggctgactgaagaagagtctggaggctcgggtggctgcagcagagaaagcaagggggaggaagccgaggaaggctgtgtttctgactcacacgggggagtcgggggagtcgtaaacaaccctgaagagaacagccaggcctgttcccgcaagcccagacaatgccggtggaggaatttgtggctggctggatctctggtgagacatttttcttccttctgtcacatcacacccaatgggccctgcagttctgcgtggccagctggcagcagggcctgctctggatcccggcgacgacattatgagttgaagaaagaagagtaaagctctcggagagacttgcttcctgggcctggcacgagggccctcactcatagcaccctcttgtcaccacaggcgctctgggcttggtcctgggacacccgtttgacactgtaaaggtgaggctgcagacccagaccacctaccggggcatcgttgattgcatggtcaagatttaccgccatgagtccctcctgggcttcttcaagggaatgagcttccccattgccagcatagctgtggtcaactctgtcctgtttggggtctatagcaacaccctgctggtgctcacggccacctcccaccaggagcggcgggcccagccgcccagctacatgcacatcttcctagcgggctgcaccggggggttcctgcaggcctactgtctggctccttttgacctcatcaaagtccggctacaaaaccagacagagccaagggcccagccagggagccccccaccccggtaccaggggcccgtgcactgtgcagcctccatcttccgggaggaggggccccgggggctgttccgaggagcctgggccctgacgctgagggacacccccacggtggggatctacttcatcacctatgaagggctctgtcgccagtacacaccagaaggccagaatcccagctcagccacggtgctggtggcagggggctttgcaggcattgcttcctgggtggcagccacgcccttagacatgatcaagtcccggatgcagatggatggactgagacgcagagtgtaccaggggatgctggactgcatggtgagcagcatccggcaggaaggactgggagtcttcttccggggggtcaccatcaacagtgcccgcgcctttcccgtcaatgctgtcaccttcctcagctacgaatatctcctccgctggtggggatgagccctgcggcaatgccagcagctccccatcaggcccacggcctggaggccagtttgagattggaggccaggttgaaagcttgcaaatcagtgcaagaggctcagcccttcctaaccaaggtgcctcccacccgcgcagatctgggctgggcagacacctgtgggagccggaagccagggggcctgtgcagcctccctgtgtagctggccttgactcctttgcctcccacatctgtgaaacagggagcatgaggcacaagtgagctggcaagtggtgctggtgacatcccagctcctgtcctgtgccttcacctctttttttttttttttttttttttgagatggagtctttctctgtcacccaggctggaatgcagtggcgtgatctcggctcactgcaacctccgcctttccaccttccgggttcaagcaactctcctgcctcagcctcccaagtagctgggactataggcgcccgccaccacacccagctaaatttttgtatttttagtagagacagggtttcaccatgtcagccaggatggtcttgatctcctgactttgtgatccgcccgcgtcggcctctcaaagtgctgggattacaggcgtgagccaccgcgcccggctgccttcacctcttaaggagctctgagactccacttctgagagtccctgcggcctcccacctccctgcctttcaaagctctctcccccatgacccaggataaccctatgtctcctcccccagaatccttcagtggctctcatcaccttcaggaaaagcccaaactccttccaccctccaggttcctccctccccacgaggctttgttctcctggggttgcttcctggaccctgaacaagttgtgctctcattggccgggcctggccagcagtgcacagtgcctggcaggttgactctaccatccccggggctggccccgctctcctccgagacccaggctgagcccagtcccctcacccttccttgacttacctccccacctgaggctgactttggggttcccagacaccctacccacacacatgccttgatcatagcacttgcctgcgcttcttcagagtcattaatttgcttctcggcttccccactggactgtgagctgcctgaggtcagggattgcgctttggatggtttccagcctgagcctggtgcttgaacagacgtgtgcaataaatgctcgttaaatg

SEQ ID NO: 28884 - DNA, 2138 bp, Homo sapiens
  source 1..2138: mol_type = unassigned DNA
ggggaattcaactctgtctcctctgctggagccaccagttcccgcaagcccagacaatgccggtggaggaatttgtggctggctggatctctggcgctctgggcttggtcctgggacacccgtttgacactgtaaaggtgaggctgcagacccagaccacctaccggggcatcgttgattgcatggtcaagatttaccgccatgagtccctcctgggcttcttcaagggaatgagcttccccattgccagcatagctgtggtcaactctgtcctgtttggggtctatagcaacaccctgctggtgctcacggccacctcccaccaggagcggcgggcccagccgcccagctacatgcacatcttcctagcgggctgcaccggggggttcctgcaggcctactgtctggctccttttgacctcatcaaagtccggctacaaaaccagacagagccaagggcccagccagggagccccccaccccggtaccaggggcccgtgcactgtgcagcctccatcttccgggaggaggggccccgggggctgttccgaggagcctgggccctgacgctgagggacacccccacggtggggatctacttcatcacctatgaagggctctgtcgccagtacacaccagaaggccagaatcccagctcagccacggtgctggtggcagggggctttgcaggcattgcttcctgggtggcagccacgcccttagacatgatcaagtcccggatgcagatggatggactgagacgcagagtgtaccaggggatgctggactgcatggtgagcagcatccggcaggaaggactgggagtcttcttccggggggtcaccatcaacagtgcccgcgcctttcccgtcaatgctgtcaccttcctcagctacgaatatctcctccgctggtggggatgagccctgcggcaatgccagcagctccccatcaggcccacggcctggaggccagtttgagattggaggccaggttgaaagcttgcaaatcagtgcaagaggctcagcccttcctaaccaaggtgcctcccacccgcgcagatctgggctgggcagacacctgtgggagccggaagccagggggcctgtgcagcctccctgtgtagctggccttgactcctttgcctcccacatctgtgaaacagggagcatgaggcacaagtgagctggcaagtggtgctggtgacatcccagctcctgtcctgtgccttcacctctttttttttttttttttttttttgagatggagtctttctctgtcacccaggctggaatgcagtggcgtgatctcggctcactgcaacctccgcctttccaccttccgggttcaagcaactctcctgcctcagcctcccaagtagctgggactataggcgcccgccaccacacccagctaaatttttgtatttttagtagagacagggtttcaccatgtcagccaggatggtcttgatctcctgactttgtgatccgcccgcgtcggcctctcaaagtgctgggattacaggcgtgagccaccgcgcccggctgccttcacctcttaaggagctctgagactccacttctgagagtccctgcggcctcccacctccctgcctttcaaagctctctcccccatgacccaggataaccctatgtctcctcccccagaatccttcagtggctctcatcaccttcaggaaaagcccaaactccttccaccctccaggttcctccctccccacgaggctttgttctcctggggttgcttcctggaccctgaacaagttgtgctctcattggccgggcctggccagcagtgcacagtgcctggcaggttgactctaccatccccggggctggccccgctctcctccgagacccaggctgagcccagtcccctcacccttccttgacttacctccccacctgaggctgactttggggttcccagacaccctacccacacacatgccttgatcatagcacttgcctgcgcttcttcagagtcattaatttgcttctcggcttccccactggactgtgagctgcctgaggtcagggattgcgctttggatggtttccagcctgagcctggtgcttgaacagacgtgtgcaataaatgctcgttaaatgatg

SEQ ID NO: 28885 - DNA, 561 bp, Homo sapiens
  source 1..561: mol_type = unassigned DNA
cacagatccttgaaagggttttggttttgactgagcagaatggtgccattgcagatcaacacgcactttaaataatcaaaacccctatctttcccctgggaaggaggaagccgaggaaggctgtgtttctgactcacacgggggagtcgggggagtcgtaaacaaccctgaagagaacagccaggcctgttcccgcaagcccagacaatgccggtggaggaatttgtggctggctggatctctggcgctctgggcttggtcctgggacacccgtttgacactgtaaaggtgaggctgcagacccagaccacctaccggggcatcgttgattgcatggtcaagatttaccgccatgagtccctcctgggcttcttcaagggaatgagcttccccattgccagcatagctgtggtcaactctgtcctgtttggggtctatagcaacaccctgctggtgctcacggccacctcccaccaggagcggcgggcccagccgcccagctacatgcacatcttcctagcgggctgcaccggggggttcctgcaggcctactgtctggct

SEQ ID NO: 28886 - DNA, 2385 bp, Homo sapiens
  source 1..2385: mol_type = unassigned DNA
acttccggttgtcagaatttacccctgacgcggcggcggccgacgggaagctgtgtgtgcttaggtcgtggtggccccggtggtggtgggctccgggcgggctcgcgtcatcctgcccccgctgcgatgcatccgcggcgcccggacggatttgatggcttgggctaccggggtggtgcccgggacgagcagggctttggcggcgccttccctgcaaggtccttcagcaccgggtcggacctgggccactgggtgacgactcccccagatatccccggcagccgcaacctgcactggggcgagaagagcccgccctacggcgtgcccaccacctccaccccgtacgaaggccccacggaggaacccttttccagtggcggcggcggcagtgtgcaggggcagagcagtgaacagctgaatagatttgctggatttggtattggacttgcaagtctctttacagaaaatgtattggcacatccttgcattgttctacgccgccaatgtcaggttaattaccatgctcagcattaccatctcactccatttacagtcatcaatattatgtacagtttcaacaaaactcagggacctagagccctgtggaaaggaatgggaagtacatttattgtccagggagtcacacttggagcagaaggcataattagtgaatttacacctttgccaagggaggttttacataaatggagtcctaaacaaataggagaacaccttctactgaaatccctaacttacgtggtggcaatgcctttttattcagcaagtctgattgaaacagtgcagagtgagataattcgagataatactggcattttggagtgtgttaaagaaggaattggaagagtgataggcatgggagtgcctcatagcaaacgacttcttccgcttctttccttgatcttccctacggtgcttcatggagttcttcattacatcatcagctcagttattcagaagtttgtcctactaattctaaagagaaagacttacaatagccacctagctgagagcactagccctgtgcagagtatgttggatgcttattttccagaacttattgctaactttgctgccagtctttgttctgacgttatactttacccattggaaacagttttgcaccgccttcacattcaaggaacacgcacaataattgacaatacagaccttggctatgaagtgcttccaattaatacacaatatgagggaatgagagactgtatcaataccataaggcaggaggaaggagtgtttggtttttataaagggtttggtgctgttataatacagtacacactgcatgcagctgttttacagattaccaaaattatttactctacacttcttcaaaataacatttgagatttaggttccttcactgagtagtctggaagatataatctggataatttgctatgaagttatgagggatacaagtgaaatactggggaagaaaatggattggaaagtaaaattggtactaaagcccatactgattatcttgactttgttttttaaggcataggtatatattttggatcaaaatccttccaaatttgaaaactcaataaaaataacacttattaaattctagttagtgtagcactcatgctgaagtaaacatgatcgtaggcagaagcaaaattttattataaaatctaaaacaaaactttatagagttgaatctattccatctgacttcaatatttgccaaacgtttattttacctcctagattgatgttggtatagtatccttaatacagtgtagtatattaatgtccttaatacaatcaggaggtttttacctttaagcaaataaattatgtcattattgaaaaagacttaagggatgattagacttggcaatctgtaagcaggagtataaatgttttaaattgcattgtccctatgtaactatcttaatggctatatatatgtattttataaagccatttatgtatacacatgtaacttggaatttccttcatccctacacattttctacacttacatcaccttattgcataaaacaaagtcacgcgctttctgcttgaacatcaaaatatcaaaaaccaaggtacccaaaagatacaagtcagagacaacatccttgtccatatccaaacccagtgtttcagtgctagcaacttaatttctcatacatttatagagtttggtttgctttgctagttgtgtgaatcattgggctgtttttagagccactgttaagagagaatataaaataatcatgacaattactactgtttccacatttacaaattgtgtacttaaatgaacctcatttcccttttatttctgaatggcttgtctgagaggaaacaaaattaaaattcatctgggaa

SEQ ID NO: 28887 - DNA, 1575 bp, Homo sapiens
  source 1..1575: mol_type = unassigned DNA
aagctgtgtgtgcttaggtcgtggtggccccggtggtggtgggctccgggcgggctcgcgtcatcctgcccccgctgcgatgcatccgcggcgcccggacggatttgatggcttgggctaccggggtggtgcccgggacgagcagggctttggcggcgccttccctgcaaggtccttcagcaccgggtcggacctgggccactgggtgacgactcccccagatatccccggcagccgcaacctgcactggggcgagaagagcccgccctacggcgtgcccaccacctccaccccgtacgaaggccccacggaggaacccttttccagtggcggcggcggcagtgtgcaggggcagagcagtgaacagctgaatagatttgctggatttggtattggacttgcaagtctctttacagaaaatgtattggcacatccttgcattgttctacgccgccaatgtcaggttaattaccatgctcagcattaccatctcactccatttacagtcatcaatattatgtacagtttcaacaaaactcagggacctagagccctgtggaaaggaatgggaagtacatttattgtccagggagtcacacttggagcagaaggcataattagtgaatttacacctttgccaagggaggttttacataaatggagtcctaaacaaataggagaacaccttctactgaaatccctaacttacgtggtggcaatgcctttttattcagcaagtctgattgaaacagtgcagagtatgttggatgcttattttccagaacttattgctaactttgctgccagtctttgttctgacgttatactttacccattggaaacagttttgcaccgccttcacattcaaggaacacgcacaataattgacaatacagaccttggctatgaagtgcttccaattaatacacaatatgagggaatgagagactgtatcaataccataaggcaggaggaaggagtgtttggtttttataaagggtttggtgctgttataatacagtacacactgcatgcagctgttttacagattaccaaaattatttactctacacttcttcaaaataacatttgagatttaggttccttcactgagtagtctggaagatataatctggataatttgctatgaagttatgagggatacaagtgaaatactggggaagaaaatggattggaaagtaaaattggtactaaagcccatactgattatcttgactttgttttttaaggcataggtatatattttggatcaaaatccttccaaatttgaaaactcaataaaaataacacttattaaattctagttagtgtagcactcatgctgaagtaaacatgatcgtaggcagaagcaaaattttattataaaatctaaaacaaaactttatagagttgaatctattccatctgacttcaatatttgccaaacgtttattttacctcctagattgatgttggtatagtatccttaatacagtgtagtatattaatgtccttaatacaatcaggaggtttttacctttaagcaaataaattatgtcattattgaaaaagact

SEQ ID NO: 28888 - DNA, 2345 bp, Homo sapiens
  source 1..2345: mol_type = unassigned DNA
acagtttttgaaatagttgtccaggactttaaaattggaagcttttatataaaatgagaatatctttttttgaaaaaattacaacttcaaaaccctgggcccacactctaatgtggcaacaatgaattggagtgaaagcgtaattgtgctttaaacactctacaccttgcaatttgccacagaccccagcagagtccttcattcatttaaattatttacctggcccctatcagaatttgactttgaggtttaaatgaacagcaggttaataaaataaattttttaaaattgttttgagactaaacctaaattgtcagtaattggttatcagtaatcttatttttttatttctatttttttttactttagaacagctgaatagatttgctggatttggtattggacttgcaagtctctttacagaaaatgtattggcacatccttgcattgttctacgccgccaatgtcaggttaattaccatgctcagcattaccatctcactccatttacagtcatcaatattatgtacagtttcaacaaaactcagggacctagagccctgtggaaaggaatgggaagtacatttattgtccagggagtcacacttggagcagaaggcataattagtgaatttacacctttgccaagggaggttttacataaatggagtcctaaacaaataggagaacaccttctactgaaatccctaacttacgtggtggcaatgcctttttattcagcaagtctgattgaaacagtgcagagtgagataattcgagataatactggcattttggagtgtgttaaagaaggaattggaagagtgataggcatgggagtgcctcatagcaaacgacttcttccgcttctttccttgatcttccctacggtgcttcatggagttcttcattacatcatcagctcagttattcagaagtttgtcctactaattctaaagagaaagacttacaatagccacctagctgagagcactagccctgtgcagagtatgttggatgcttattttccagaacttattgctaactttgctgccagtctttgttctgacgttatactttacccattggaaacagttttgcaccgccttcacattcaaggaacacgcacaataattgacaatacagaccttggctatgaagtgcttccaattaatacacaatatgagggaatgagagactgtatcaataccataaggcaggaggaaggagtgtttggtttttataaagggtttggtgctgttataatacagtacacactgcatgcagctgttttacagattaccaaaattatttactctacacttcttcaaaataacatttgagatttaggttccttcactgagtagtctggaagatataatctggataatttgctatgaagttatgagggatacaagtgaaatactggggaagaaaatggattggaaagtaaaattggtactaaagcccatactgattatcttgactttgttttttaaggcataggtatatattttggatcaaaatccttccaaatttgaaaactcaataaaaataacacttattaaattctagttagtgtagcactcatgctgaagtaaacatgatcgtaggcagaagcaaaattttattataaaatctaaaacaaaactttatagagttgaatctattccatctgacttcaatatttgccaaacgtttattttacctcctagattgatgttggtatagtatccttaatacagtgtagtatattaatgtccttaatacaatcaggaggtttttacctttaagcaaataaattatgtcattattgaaaaagacttaagggatgattagacttggcaatctgtaagcaggagtataaatgttttaaattgcattgtccctatgtaactatcttaatggctatatatatgtattttataaagccatttatgtatacacatgtaacttggaatttccttcatccctacacattttctacacttacatcaccttattgcataaaacaaagtcacgcgctttctgcttgaacatcaaaatatcaaaaaccaaggtacccaaaagatacaagtcagagacaacatccttgtccatatccaaacccagtgtttcagtgctagcaacttaatttctcatacatttatagagtttggtttgctttgctagttgtgtgaatcattgggctgtttttagagccactgttaagagagaatataaaataatcatgacaattactactgtttccacatttacaaattgtgtacttaaatgaacctcatttcccttttatttctgaatggcttgtctgagaggaaacaaaattaaaattcatctgggaa

SEQ ID NO: 28889 - DNA, 1596 bp, Homo sapiens
  source 1..1596: mol_type = unassigned DNA
ttttaatcctgttctttgtttccatatctattctctttcttttaaccaatcatcttaattttcttcctttaatttctcatgtttactttcataatcagttgtgcctcttgcttctctgccagccccttctatcagcacgtatgaaaacaccttgtatttttttctctcaaaccatcacagttgtttacactgtgttctagaaaagaaaatgttcaccattagaatatatttctcctacagattgaaaaaaattagaagttgattactgttttgaaaattgggctaattccagatgttttaaataacatggcttttgttttatttaagtttatttttatgttttagggaggttttacataaatggagtcctaaacaaataggagaacaccttctactgaaatcattgtgaattggaaatcccccagcttgctggctccctcagtgggacattccagcacattattacttagtgatgttccattcaccttgaaaaccactacttgccaggacctggcccataagggttagcctaacttacgtggtggcaatgcctttttattcagcaagtctgattgaaacagtgcagagtgagataattcgagataatactggcattttggagtgtgttaaagaaggaattggaagagtgataggcatgggagtgcctcatagcaaacgacttcttccgcttctttccttgatcttccctacggtgcttcatggagttcttcattacatcatcagctcagttattcagaagtttgtcctactaattctaaagagaaagacttacaatagccacctagctgagagcactagccctgtgcagagtatgttggatgcttattttccagaacttattgctaactttgctgccagtctttgttctgacgttatactttacccattggaaacagttttgcaccgccttcacattcaaggaacacgcacaataattgacaatacagaccttggctatgaagtgcttccaattaatacacaatatgagggaatgagagactgtatcaataccataaggcaggaggaaggagtgtttggtttttataaagggtttggtgctgttataatacagtacacactgcatgcagctgttttacagattaccaaaattatttactctacacttcttcaaaataacatttgagatttaggttccttcactgagtagtctggaagatataatctggataatttgctatgaagttatgagggatacaagtgaaatactggggaagaaaatggattggaaagtaaaattggtactaaagcccatactgattatcttgactttgttttttaaggcataggtatatattttggatcaaaatccttccaaatttgaaaactcaataaaaataacacttattaaattctagttagtgtagcactcatgctgaagtaaacatgatcgtaggcagaagcaaaattttattataaaatctaaaacaaaactttatagagttgaatctattccatctgacttcaatatttgccaaacgtttattttacctcctagattgatgttggtatagtatccttaatacagtgtagtatattaatgtccttaatacaatc

SEQ ID NO: 28890 - DNA, 1534 bp, Homo sapiens
  source 1..1534: mol_type = unassigned DNA
gaaggaacataggatgaaaccatggaagtcttcctcagatctggggagggagcctggcccaagagcccgtggagctaatgaaaacagaacagctgaatagatttgctggatttggtattggacttgcaagtctctttacagaaaatgtattggcacatccttgcattgttctacgccgccaatgtcaggttaattaccatgctcagcattaccatctcactccatttacagtcatcaatattatgtacagtttcaacaaaactcagggacctagagccctgtggaaaggaatgggaagtacatttattgtccagggagtcacacttggagcagaaggcataattagtgaatttacacctttgccaagggaggttttacataaatggagtcctaaacaaataggagaacaccttctactgaaatccctaacttacgtggtggcaatgcctttttattcagcaagtctgattgaaacagtgcagagtgagataattcgagataatactggcattttggagtgtgttaaagaaggaattggaagagtgataggcatgggagtgcctcatagcaaacgacttcttccgcttctttccttgatcttccctacggtgcttcatggagttcttcattacatcatcagctcagttattcagaagtttgtcctactaattctaaagagaaagacttacaatagccacctagctgagagcactagccctgtgcagagtatgttggatgcttattttccagaacttattgctaactttgctgccagtctttgttctgacgttatactttacccattggaaacagttttgcaccgccttcacattcaaggaacacgcacaataattgacaatacagaccttggctatgaagtgcttccaattaatacacaatatgagggaatgagagactgtatcaataccataaggcaggaggaaggagtgtttggtttttataaagggtttggtgctgttataatacagtacacactgcatgcagctgttttacagattaccaaaattatttactctacacttcttcaaaataacatttgagatttaggttccttcactgagtagtctggaagatataatctggataatttgctatgaagttatgagggatacaagtgaaatactggggaagaaaatggattggaaagtaaaattggtactaaagcccatactgattatcttgactttgttttttaaggcataggtatatattttggatcaaaatccttccaaatttgaaaactcaataaaaataacacttattaaattctagttagtgtagcactcatgctgaagtaaacatgatcgtaggcagaagcaaaattttattataaaatctaaaacaaaactttatagagttgaatctattccatctgacttcaatatttgccaaacgtttattttacctcctagattgatgttggtatagtatccttaatacagtgtagtatattaatgtccttaatacaatcaggaggtttttacctttaagcaaataaattatgtcattattg

SEQ ID NO: 28891 - DNA, 1546 bp, Homo sapiens
  source 1..1546: mol_type = unassigned DNA
gaaggaacataggatgaaaccatggaagtcttcctcagatctggggagggagcctggcccaagagcccgtggagctaatgaaaacagaacagctgaatagatttgctggatttggtattggacttgcaagtctctttacagaaaatgtattggcacatccttgcattgttctacgccgccaatgtcaggttaattaccatgctcagcattaccatctcactccatttacagtcatcaatattatgtacagtttcaacaaaactcagggacctagagccctgtggaaaggaatgggaagtacatttattgtccagggagtcacacttggagcagaaggcataattagtgaatttacacctttgccaagggaggttttacataaatggagtcctaaacaaataggagaacaccttctactgaaatccctaacttacgtggtggcaatgcctttttattcagcaagtctgattgaaacagtgcagagtgagataattcgagataatactggcattttggagtgtgttaaagaaggaattggaagagtgataggcatgggagtgcctcatagcaaacgacttcttccgcttctttccttgatcttccctacggtgcttcatggagttcttcattacatcatcagctcagttattcagaagtttgtcctactaattctaaagagaaagacttacaatagccacctagctgagagcactagccctgtgcagagtatgttggatgcttattttccagaacttattgctaactttgctgccagtctttgttctgacgttatactttacccattggaaacagttttgcaccgccttcacattcaaggaacacgcacaataattgacaatacagaccttggctatgaagtgcttccaattaatacacaatatgagggaatgagagactgtatcaataccataaggcaggaggaaggagtgtttggtttttataaagggtttggtgctgttataatacagtacacactgcatgcagctgttttacagattaccaaaattatttactctacacttcttcaaaataacatttgagatttaggttccttcactgagtagtctggaagatataatctggataatttgctatgaagttatgagggatacaagtgaaatactggggaagaaaatggattggaaagtaaaattggtactaaagcccatactgattatcttgactttgttttttaaggcataggtatatattttggatcaaaatccttccaaatttgaaaactcaataaaaataacacttattaaattctagttagtgtagcactcatgctgaagtaaacatgatcgtaggcagaagcaaaattttattataaaatctaaaacaaaactttatagagttgaatctattccatctgacttcaatatttgccaaacgtttattttacctcctagattgatgttggtatagtatccttaatacagtgtagtatattaatgtccttaatacaatcaggaggtttttacctttaagcaaataaattatgtcattattgaaaaagacttaa

SEQ ID NO: 28892 - DNA, 2624 bp, Homo sapiens
  source 1..2624: mol_type = unassigned DNA
gacgcggcggcggccgacgggaagctgtgtgtgcttaggtcgtggtggccccggtggtggtgggctccgggcgggctcgcgtcatcctgcccccgctgcgatgcatccgcggcgcccgggacgagcagggctttggcggcgccttccctgcaaggtccttcagcaccgggtcggacctgggccactgggtgacgactcccccagatatccccggcagccgcaacctgcactggggcgagaagagcccgccctacggcgtgcccaccacctccaccccgtacgaaggccccacggaggaacccttttccagtggcggcggcggcagtgtgcaggggcagagcagtgaacagctgaatagatttgctggatttggtattggacttgcaagtctctttacagaaaatgtattggcacatccttgcattgttctacgccgccaatgtcaggttaattaccatgctcagcattaccatctcactccatttacagtcatcaatattatgtacagtttcaacaaaactcagggacctagagccctgtggaaaggaatgggaagtacatttattgtccagggagtcacacttggagcagaaggcataattagtgaatttacacctttgccaagggaggttttacataaatggagtcctaaacaaataggagaacaccttctactgaaatccctaacttacgtggtggcaatgcctttttattcagcaagtctgattgaaacagtgcagagtgagataattcgagataatactggcattttggagtgtgttaaagaaggaattggaagagtgataggcatgggagtgcctcatagcaaacgacttcttccgcttctttccttgatcttccctacggtgcttcatggagttcttcattacatcatcagctcagttattcagaagtttgtcctactaattctaaagagaaagacttacaatagccacctagctgagagcactagccctgtgcagagtatgttggatgcttattttccagaacttattgctaactttgctgccagtctttgttctgacgttatactttacccattggaaacagttttgcaccgccttcacattcaaggaacacgcacaataattgacaatacagaccttggctatgaagtgcttccaattaatacacaatatgagggaatgagagactgtatcaataccataaggcaggaggaaggagtgtttggtttttataaagggtttggtgctgttataatacagtacacactgcatgcagctgttttacagattaccaaaattatttactctacacttcttcaaaataacatttgagatttaggttccttcactgagtagtctggaagatataatctggataatttgctatgaagttatgagggatacaagtgaaatactggggaagaaaatggattggaaagtaaaattggtactaaagcccatactgattatcttgactttgttttttaaggcataggtatatattttggatcaaaatccttccaaatttgaaaactcaataaaaataacacttattaaattctagttagtgtagcactcatgctgaagtaaacatgatcgtaggcagaagcaaaattttattataaaatctaaaacaaaactttatagagttgaatctattccatctgacttcaatatttgccaaacgtttattttacctcctagattgatgttggtatagtatccttaatacagtgtagtatattaatgtccttaatacaatcaggaggtttttacctttaagcaaataaattatgtcattattgaaaaagacttaagggatgattagacttggcaatctgtaagcaggagtataaatgttttaaattgcattgtccctatgtaactatcttaatggctatatatatgtattttataaagccatttatgtatacacatgtaacttggaatttccttcatccctacacattttctacacttacatcaccttattgcataaaacaaagtcacgcgctttctgcttgaacatcaaaatatcaaaaaccaaggtacccaaaagatacaagtcagagacaacatccttgtccatatccaaacccagtgtttcagtgctagcaacttaatttctcatacatttatagagtttggtttgctttgctagttgtgtgaatcattgggctgtttttagagccactgttaagagagaatataaaataatcatgacaattactactgtttccacatttacaaattgtgtacttaaatgaacctcatttcccttttatttctgaatggcttgtctgagaggaaacaaaattaaaattcatctgggaatttgtgcctcttgtctagtatatagtcaccactaaataatggcttccgtttttattttctttcaggttttgctttaaattttgttttccaaaatagatgtacgtggagggaaaagcaattattcttatcaccttttatttaaacttctttagatgaatactgaagaaaaatccaaaccttaaaggaaatgtgcccttgtattttatgggtgaggggaaaaagtacatttgtacatttcaacatataataagcaaaaaaattactaatcagtttaataaaaacattttgtctattcctaaatgt

SEQ ID NO: 28893 - DNA, 8080 bp, Homo sapiens
  source 1..8080: mol_type = unassigned DNA
gtgacggcctcggccgcgggcgtttacactggctctgcctccggcatctcttcgccggtgcgtcctcgccgcgcccgtaggtcccggcagccgggccccgcctccttcggagtccgagcgatgggcggggaaagggacaggcaggtatagctctgtcggcgccgcggtgtccacctcagtcaggccacggtggaagacgcgtgccgcggcgcctggttgcctgcagcggcccggacccgagaggaagctgaaccatctatctccagaaatgtcttcagaaagtaaagagcaacataacgtttcacccagagactcagctgaaggaaatgacagttatccatctgggatccatctggaacttcaaagggaatcaagtactgacttcaagcaatttgagaccaatgatcaatgcagaccttatcataggatccttattgagcgtcaagagaaatcagatacaaacttcaaggagtttgttattaaaaagctgcagaagaattgccagtgcagtccagccaaagccaaaaatatgattttaggtttccttcctgttttgcagtggctcccaaaatacgacctaaagaaaaacattttaggggatgtgatgtcaggcttgattgtgggcatattattggtgccccagtccattgcttattccctgctggctggccaagaacctgtctatggtctgtacacatctttttttgccagcatcatttattttctcttgggtacctcccgtcacatctctgtgggcatttttggagtactgtgccttatgattggtgagacagttgaccgagaactacagaaagctggctatgacaatgcccatagtgctccttccttaggaatggtttcaaatgggagcacattattaaatcatacatcagacaggatatgtgacaaaagttgctatgcaattatggttggcagcactgtaacctttatagctggagtttatcaggtagcgatgggcttctttcaagtgggttttgtttctgtctacctctcagatgccttgctgagtggatttgtcactggtgcctccttcactattcttacatctcaggccaagtatcttcttgggctcaaccttcctcggactaatggtgtgggctcactcatcactacctggatacatgtcttcagaaacatccataagaccaatctctgtgatcttatcaccagccttttgtgccttttggttcttttgccaaccaaagaactcaatgaacacttcaaatccaagcttaaggcaccgattcctattgaacttgttgttgttgtagcagccacattagcctctcattttggaaaactacatgaaaattataattctagtattgctggacatattcccactgggtttatgccacccaaagtaccagaatggaacctaattcctagtgtggctgtagatgcaatagctatttccatcattggttttgctatcactgtatcactttctgagatgtttgccaagaaacatggttacacagtcaaagcaaaccaggaaatgtatgccattggcttttgtaatatcatcccttccttcttccactgttttactactagtgcagctcttgcaaagacattggttaaagaatcaacaggctgccatactcagctttctggtgtggtaacagccctggttcttttgttggtcctcctagtaatagctcctttgttctattcccttcaaaaaagtgtccttggtgtgatcacaattgtaaatctacggggagcccttcgtaaatttagggatcttcccaaaatgtggagtattagtagaatggatacagttatctggtttgttactatgctgtcctctgcactgctaagtactgaaataggcctacttgttggggtttgtttttctatattttgtgtcatcctccgcactcagaagccaaagagttcactgcttggcttggtggaagagtctgaggtctttgaatctgtgtctgcttacaagaaccttcagattaagccaggcatcaagattttccgctttgtagcccctctctactacataaacaaagaatgctttaaatctgctttatacaaacaaactgtcaacccaatcttaataaaggtggcttggaagaaggcagcaaagagaaagatcaaagaaaaagtagtgactcttggtggaatccaggatgaaatgtcagtgcaactttcccatgatcccttggagctgcatactatagtgattgactgcagtgcaattcaatttttagatacagcagggatccacacactgaaagaagttcgcagagattatgaagccattggaatccaggttctgctggctcagtgcaatcccactgtgagggattccctaaccaacggagaatattgcaaaaaggaagaagaaaaccttctcttctatagtgtgtatgaagcgatggcttttgcagaagtatctaaaaatcagaaaggagtatgtgttcccaatggtctgagtcttagtagtgattaattgagaaggtagatagaagaatgtctagccaataggttaaaatttcaagtgtccaacatttcccagttccacagtgggaaattttgcacacttgaaattttaaccaagtggctagatattattcctcctttgaagctaatggcatttgtatatacacactgcagcagagcttgtagctggacagagtcaaaaagaagaaaatacggtttcaggctttcttgcagatatgaagtattcttggaatgcaataagtatgtattgaactgtactgtaaagtagctccaaaacttaattactctcctgttttaggggttatacatttggactgtgcattctccaagagatgaagcggtgaagttgggatttacattggaagtgctgtagacttctttatgtggctcagtggagagagggaaagaatgttgcacctgctctagtaccataggtcaagaggcttctggatcacaaagtcataactagacaggtttgttcttgtagttttctatccccagtctttgctccccagatggcagtagtttttagtaggaaagtgccattcctgtccttaaggcacagtctcatcagaagtctaatacctgggcaggtttataacatcctgagagccagcctgacattagacagaataccctttgtaatacattggaaatttttactcatgcctttttgtttaggataaataggtaagcacaaagagctcttcaaaatcagaaaaaacaataggagtccttccttgtcttttctgtgatctctgtccttgtttctgagactttctctaccattaagctctattttagctttcagttattctagtttgtttcccatggaatctgtcctaaactggtgtttttgtcagtgacagtcttgccagtcagcaatttctaacagcattttaaatgagtttgatgtacagtaaatattgatgacaatgacagcttttaactcttcaagtcacctaaagctattatgcaggaggatttagaagtcacattcataaaacccaagtgctatgggtgtattattcatgatagctggcccacaggtcatgaattgaggaggaatttgctttcaaaaagcaagaatgtccaacactgaaagtttatagttttatatttggaccttgaaaggtaagaaaaaaccaggttctccaaagttaggaatagggaactaatttatgaaacagccatcttaaaaaaaaaaaaagtaaactgcaaaagtacaaaatcatttttcaatctgttcccagtttctaaacaattttaaatatttatgagaagcaaaccctatgtgtagggcatctgttggagtgggatgcttttagacatatattaagtatgtacatgtttaatatgtatatttaaaatgcatatatattttattatatctatattatcctatatagatatatgtaacttagctttattgttagctccataagctgccagtgttgcttttctgttggtagagctctcccatttggtgacatggaaaatacctttccattatcacaacaaagcagttgctcagtagaaagtctagatttctgtcttataggtgatttctgtcttataggtgattataatcaagtgtaggcttcctgaattttgacatccttttagaacttgggtctggaattccagaaatgttaattgctgcttgtatttgttcttgtttgttttttagccagtatttgccctttctatccagccttatgaataatagcagtaaaatcacagtatcttggtcagtctttatttttttccttttttcttttttaagagacagtcatccaggccagagtgcagtttgatgatagcttactgaagcttcccactcctgggctcaagttatccttccattttggcctcctgagtagctagaccataggtatgcatcaccacaccctgctaattttttaaatttttttctagagagagggtctcactgtgttgcccaggctggtctcaaactccaggctcaagcaatccttcagcctcagcctcccagagtgttgggattacaggcgtgagccactgcacttggccaagttatttatttttaatctctcttgcccttctcccaaggcaggcttaagttgagactattataggtgtctaataacctgtgacagagtaatgagtacatgcttaagatgttataattagccaacaccaacacagcaaaaaatataattccagccaaagattctggaaaatccctcagaaggagggataacaggatttgacctttaccagcgatttctgtccatatgtggatgtaaacagttctggaacgttatgcatgcagttagcgaatccttgaattatgttctggtttgtacttgtcccatccatccaaacaagagattctgcttttggtagccatctgtagaaacatttaagatgtcactagaatttacatttcatcctctctacttgggttgaggttgcctatacttgcatattgttaaaatgttttggttgctgatattcagaggaatgaaacctggaaccaaagcctaatttgccgataaaaaaactgttttcggccaggtgcagtggctcatgcctgtaatcccagcacgttgggaggccgaggcgggtggatcacctgaagtcaggagttcgagaccatcctggctaacactgtgaaaccccgtctctactaaaaatacaaaaaattagcggggcatggtggcacgcgcctgtagtcccagctactcaggaggctgaggcaggagaattacttgaacccgggaggcggaggttgcagtaagcagagattgtgccactggactccagcctgggtgacagagcgagactccgtctcaaacaaacaaacaaaaaactgttttcatttgctctcttgaccaaaggataggactttagttctttaagcattattttaaacactatattgatacaaaaatatcttgcttactctaaactttagagtctaaatgaagctttttctcagtacaagattctgagtatcataaaatggttatttaattgaaacgtagtgtggtatactcttgatggttagaactcttacagccttatttatttttaagtttgttacagccaaagggttggagtgtgccagtgcacaggtagactaaggaaaacattatagaggagtgaagagaacagaccattgaaaagactattatctgaccagcggaggcagaaaagagaggaacccagttgaataggatccaatccctggttagcctctacacaataatagggagacaaggattaggagccatacctcccagagcaaggtatctttctagagcaaatttctctttctagaaggggagggtcacagggtcacagattcaccaaagctgaaagggctgaggagctcatggtagcctgggctgacctactctggagcacggtgtcttccttctaaactgagtgactgtagtactatctgtgcctctgatggtaataaaactgacaagatgtctaatttttttttaagtaggaccaaaggaaaacaagatttagatagtctgactttgcttttgaacaacagacattgcaagtcaaaattgttgtcaaatttacatatggtaaatgatgaactttaaaaatgtgtccaggtgttagatgagttcattagactcttttaatgctaatggctagtacgtttaaacaaaacagcagttctctgctgcaatattcccattgaccacttaaatgaccataagtggtcatttaagaacatgttagggttagccctgatctgaatataaaagtgagaaaagggctacagtgcatttcttggtaacttaaactgagtcttgaagttataatgatccattcgagttctgtgatccttattgttcttaattgtgtttctctacgtattgttacagatgagccatacgtttctttgtatcaatgtagacatgacttcagatacctctgaggacctacccagcagtctaggaccctgggccaagtgctgggactatggtactaaatccagtagatgggctgtgtagcaactctcccagggaacacactagggtacttagggaggtgctttgtggagcatgttgaagctttgagatctgagcaggaggcagtgatgtccctggtctattcagggaaagatttcagtgtgaaatggtaaacatccaattgacaggatttagattttgcttagtttttctgctttttaatgtttctatcccccatctcagtgttttctttatccatcccagtgatgccttatttgaaactgggcttaaactgcaaaaagaatgaagttggatttaggaagctgttagatcattgagtggtgttgagagtgaagtttcactagcagggaagtttccttgagcctaaaataaaaagaaaaaattaaaaagaatcagtttttttaattaaaaaaatagaaagctgttaggctcctaattcgtggggtttttttttgtaaaaacagtttagataatcctgaatgcaatcattaacttggttgctaattacaagaatgaaaattataatggaaaaggacaaaataatataccagctggtttgttattatagtccgtgtattaaaatactattgaaatacgttaaaggtaaatttttaaggtttaaaaaaaatttagtaacttacagggatggagaatttagatgtcagaggtggggagatttatttttataaggtaatttttatcctgataaggacttaaaaaaaagttttgcaactgaaattttaaagtaaacatgttaagtacagttaaaaagtaagcattgtagtaaatagtggattctctggtgtgtattttttatctcagtgttgaaaattggaaaagaatggactgaagtctaaaaactggaataatgaaggacactaaatgcctttattgtagatactatgtttgtaagtctatagctaagcaacttaagccaaaaaggtctttcaactgaagctttaatcaacttattttggagatgttctcttcccttatctcatgcgtcatccctaaaataataagatacatgggatcaaatagcccttgccttttcaacacaaatcagttggaaaattatggtttgagtcctgttgctgccatggcttctgtttctcagaaatgagtgtgtatgaacataccaatctatgtaataggctacctttttttgtcttctttggaactttgtacacaaaccaagacaatatcagggtgacaggtgaatgaacttaaattctcagtcttgtctattcaccaaaaaagtatactgcctgttttttctttaattattcaaggttgatgacttttaggaacatgttttatactgtattttttaattaaagcaagtgccttgatgtaattccatgtaaatcattgcttaaccctcttatgggatgaggatgagttattaatgtattgcagcctactggaaaggagggggagttggttaatagcagatacttttcttctagaagcttatgttttatgctgtttattatgtaagatcctgtatgtgtgttgagatttagaggtttcatttgttttgtctgctaataaattgttactctaataatacatta

SEQ ID NO: 28894 - DNA, 570 bp, Homo sapiens
  source 1..570: mol_type = unassigned DNA
tcttcgccggtgcgtcctcgccgcgcccgtaggtcccggcagccgggccccgcctccttcggagtccgagcgatgggcggggaaagggacaggcaggtatagctctgtcggcgccgcggtgtccacctcagtcaggccacggtggaagacgcgtgccgcggcgcctggttgcctgcagcggcccggacccgagaggtcagaaattgatgctgagtacagtgaagttttacaaaaccattgccatatgactgctgagcagtatagctgggatctgaacagagatctgtttgacttccagaacacatccagtgattctccaagtgtggtcctaagctcactcgttcagcatcatctagcgtgtggagtcctggatctcatccttggatttgcagggatggtcctaagaagctaacggctctctgtatttgacaattattgtactgtaatgtgctgcctcctaggggaagatctagaggaagctgaaccatctatctccagaaatgtcttcagaaagtaaagagcaacataacgtttcacccagagactcagctgaaggaaatgacagttatc

SEQ ID NO: 28895 - DNA, 2863 bp, Homo sapiens
  source 1..2863: mol_type = unassigned DNA
cctgagtggatggacactgcctcttagaactagaacttagaactttatcttgaaaatgtaccactgttgcagaagctcctcacagagtatgtgtcaggcatttttaacctgctaaaggcaagaagaagtgttcaccacatagttgcaaaggtcttcaacttgccacagccaacagaaaaatcaaaatgattgaaccctttgggaatcagtatattgtggccaggccagtgtattctacaaatgcttttgaggaaaatcataaaaagacaggaagacatcataagacatttctggatcatctcaaagtgtgttgtagctgttccccacaaaaggccaagagaattgtcctctctttgttccccatagcatcttggttgccagcataccggcttaaagaatggttgctcagtgatattgtttctggtatcagcacagggattgtggccgtactacaaggtttagcatttgctctgctggtcgacattcccccagtctatgggttgtatgcatcctttttcccagccataatctaccttttcttcggcacttccagacacatatccgtgggtccgtttccgattctgagtatgatggtgggactagcagtttcaggagcagtttcaaaagcagtcccagatcgcaatgcaactactttgggattgcctaacaactcgaataattcttcactactggatgacgagagggtgagggtggcggcggcggcatcagtcacagtgctttctggaatcatccagttggcttttgggattctgcggattggatttgtagtgatatacctgtctgagtccctcatcagtggcttcactactgctgctgctgttcatgttttggtttcccaactcaaattcatttttcagttgacagtcccgtcacacactgatccagtttcaattttcaaagtactatactctgtattctcacaaatagagaagactaatattgcagacctggtgacagctctgattgtccttttggttgtatccattgttaaagaaataaatcagcgcttcaaagacaaacttccagtgcccattccaatcgaattcattatgaccgtgattgcagcaggtgtatcctacggctgtgactttaaaaacaggtttaaagtggctgtggttggggacatgaatcctggatttcagccccctattacacctgacgtggagactttccaaaacaccgtaggagattgcttcggcatcgcaatggttgcatttgcagtggccttttcagttgccagcgtctattccctcaaatacgattatccacttgatggcaatcaggagttaatagccttgggactgggtaacatagtctgtggagtattcagaggatttgctgggagtactgccctctccagatcagcagttcaggagagcacaggaggcaaaacacagattgctgggcttattggtgccatcatcgtgctgattgtcgttctagccattggatttctcctggcgcctctacaaaagtccgtcctggcagctttagcattgggaaacttaaagggaatgctgatgcagtttgctgaaataggcagattgtggcgaaaggacaaatatgattgtttaatttggatcatgaccttcatcttcaccattgtcctgggactcgggttaggcctggcagctagtgtggcatttcaactgctaaccatcgtgttcaggacccaatttccaaaatgcagcacgctggctaatattggaagaaccaacatctataagaataaaaaagattattatgatatgtatgagccagaaggagtgaaaattttcagatgtccatctcctatctactttgcaaacattggtttctttaggcggaaacttatcgatgctgttggctttagtccacttcgaattctacgcaagcgcaacaaagctttgaggaaaatccgaaaactgcagaagcaaggcttgctacaagtgacaccaaaaggatttatatgtactgttgacaccataaaagattctgacgaagagctggacaacaatcagatagaagtactggaccagccaatcaataccacagacctgcctttccacattgactggaatgatgatcttcctctcaacattgaggtccccaaaatcagcctccacagcctcattcttgacttttcagcagtgtcctttcttgatgtttcttcagtgaggggccttaaatcgattttgcaagaatttatcaggatcaaggtagatgtgtatatcgttggaactgatgatgacttcattgagaagcttaaccggtatgaattttttgatggtgaagtgaaaagctcaatatttttcttaacaatccatgatgctgttttgcatattttgatgaagaaagattacagtacttcaaagtttaatcccagtcaggaaaaagatggaaaaattgattttaccataaatacaaatggaggattacgtaatcgggtatatgaggtgccagttgaaacaaaattctaatcaacatataattcagaaggatcttcatctgactatgacataaaaacaactttatacccagaaagttattgataagttcatacattgtacgaagagtatttttgacagaatatgtttcaaactttggaacaagatggttctagcatggcatatttttcacatatctagtatgaaattatataagtattctaaattttatatcttgtagctttatcaaagggtgaaaattattttgttcatacatatttttgtagcactgacagatttccatcctagtcactaccttcatgcataggtttagcagtatagtggcgccactgttttgaatctcataatttatacaggtcatattaatatatttccattaaaaaatcagttgtaca

SEQ ID NO: 28896 - DNA, 2601 bp, Homo sapiens
  source 1..2601: mol_type = unassigned DNA
gcacacagagcctgtagacctgagtggatggacactgcctcttagaactagaacttagaactttatcttgaaaatgtaccactgttgcagaagctcctcacagagtatgtgtcaggcatttttaacctgctaaaggcaagaagaagtgttcaccacatagttgcaaaggtcttcaacttgccacagccaacagaaaaatcaaaatgattgaaccctttgggaatcagtatattgtggccaggccagtgtattctacaaatgcttttgaggaaaatcataaaaagacaggaagacatcataagacatttctggatcatctcaaagtgtgttgtagcatcttggttgccagcataccggcttaaagaatggttgctcagtgatattgtttctggtatcagcacagggattgtggccgtactacaaggtttagcatttgctctgctggtcgacattcccccagtctatgggttgtatgcatcctttttcccagccataatctaccttttcttcggcacttccagacacatatccgtgggtccgtttccgattctgagtatgatggtgggactagcagtttcaggagcagtttcaaaagcagtcccagatcgcaatgcaactactttgggattgcctaacaactcgaataattcttcactactggatgacgagagggtgagggtggcggcggcggcatcagtcacagtgctttctggaatcatccagttggcttttgggattctgcggattggatttgtagtgatatacctgtctgagtccctcatcagtggcttcactactgctgctgctgttcatgttttggtttcccaactcaaattcatttttcagttgacagtcccgtcacacactgatccagtttcaattttcaaagtactatactctgtattctcacaaatagagaagactaatattgcagacctggtgacagctctgattgtccttttggttgtatccattgttaaagaaataaatcagcgcttcaaagacaaacttccagtgcccattccaatcgaattcattatgaccgtgattgcagcaggtgtatcctacggctgtgactttaaaaacaggtttaaagtggctgtggttggggacatgaatcctggatttcagccccctattacacctgacgtggagactttccaaaacaccgtaggagattgcttcggcatcgcaatggttgcatttgcagtggccttttcagttgccagcgtctattccctcaaatacgattatccacttgatggcaatcaggagttaatagccttgggactgggtaacatagtctgtggagtattcagaggatttgctgggagtactgccctctccagatcagcagttcaggagagcacaggaggcaaaacacagattgctgggcttattggtgccatcatcgtgctgattgtcgttctagccattggatttctcctggcgcctctacaaaagtccgtcctggcagctttagcattgggaaacttaaagggaatgctgatgcagtttgctgaaataggcagattgtggcgaaaggacaaatatgattgtttaatttggatcatgaccttcatcttcaccattgtcctgggactcgggttaggcctggcagctagtgtggcatttcaactgctaaccatcgtgttcaggacccaatttccaaaatgcagcacgctggctaatattggaagaaccaacatctataagaataaaaaagattattatgatatgtatgagccagaaggagtgaaaattttcagatgtccatctcctatctactttgcaaacattggtttctttaggcggaaacttatcgatgctgttggctttagtccacttcgaattctacgcaagcgcaacaaagctttgaggaaaatccgaaaactgcagaagcaaggcttgctacaagtgacaccaattttgcaagaatttatcaggatcaaggtagatgtgtatatcgttggaactgatgatgacttcattgagaagcttaaccggtatgaattttttgatggtgaagtgaaaagctcaatatttttcttaacaatccatgatgctgttttgcatattttgatgaagaaagattacagtacttcaaagtttaatcccagtcaggaaaaagatggaaaaattgattttaccataaatacaaatggaggattacgtaatcgggtatatgaggtgccagttgaaacaaaattctaatcaacatataattcagaaggatcttcatctgactatgacataaaaacaactttatacccagaaagttattgataagttcatacattgtacgaagagtatttttgacagaatatgtttcaaactttggaacaagatggttctagcatggcatatttttcacatatctagtatgaaattatataagtattctaaattttatatcttgtagctttatcaaagggtgaaaattattttgttcatacatatttttgtagcactgacagatttccatcctagtcactaccttcatgcataggtttagcagtatagtggcgccactgttttgaatctcataatttatacaggtcatattaatatatttccattaaaaaatcagttgtacagtgg

SEQ ID NO: 28897 - DNA, 552 bp, Homo sapiens
  source 1..552: mol_type = unassigned DNA
gcacacagagcctgtagacctgagtggatggacactgcctcttagaactagaacttagaactttatcttgaaaatgtaccactgttgcagaagctcctcacagagcatttttaacctgctaaaggcaagaagaagtgttcaccacatagttgcaaaggtcttcaacttgccacagccaacagaaaaatcaaaatgattgaaccctttgggaatcagtatattgtggccaggccagtgtattctacaaatgcttttgaggaaaatcataaaaagacaggaagacatcataagacatttctggatcatctcaaagtgtgttgtagctgttccccacaaaaggccaagagaattgtcctctctttgttccccatagcatcttggttgccagcataccggcttaaagaatggttgctcagtgatattgtttctggtatcagcacagggattgtggccgtactacaaggtttagcatttgctctgctggtcgacattcccccagtctatgggttgtatgcatcctttttcccagccataatctaccttttcttcggc

SEQ ID NO: 28898 - DNA, 4930 bp, Homo sapiens
  source 1..4930: mol_type = unassigned DNA
ctcagccttcccggttcgggaaaggggaagaatgcaggaggggtaggatttctttcctgataggatcggttgggaaagaccgcagcctgtgtgtgtctttcccttcgaccaaggtgtctgttgctccgtaaataaaacgtcccactgccttctgagagcgctataaaggcagcggaagggtagtccgcggggcattccgggcggggcgcgagcagagacaggtcatggcagcgccaggcggcaggtcggagccgccgcagctccccgagtacagctgcagctacatggtgtcgcggccggtctacagcgagctcgctttccagcaacagcacgagcggcgcctgcaggagcgcaagacgctgcgggagagcctggccaagtgctgcagttgttcaagaaagagagcctttggtgtgctaaagactcttgtgcccatcttggagtggctccccaaataccgagtcaaggaatggctgcttagtgacgtcatttcgggagttagtactgggctagtggccacgctgcaagggatggcatatgccctactagctgcagttcctgtcggatatggtctctactctgcttttttccctatcctgacatactttatctttggaacatcaagacatatctcagttggaccttttccagtggtgagtttaatggtgggatctgttgttctgagcatggcccccgacgaacactttctcgtatccagcagcaatggaactgtattaaatactactatgatagacactgcagctagagatacagctagagtcctgattgccagtgccctgactctgctggttggaattatacagttgatatttggtggcttgcagattggattcatagtgaggtacttggcagatcctttggttggtggcttcacaacagctgctgccttccaagtgctggtctcacagctaaagattgtcctcaatgtttcaaccaaaaactacaatggagttctctctattatctatacgctggttgagatttttcaaaatattggtgataccaatcttgctgatttcactgctggattgctcaccattgtcgtctgtatggcagttaaggaattaaatgatcggtttagacacaaaatcccagtccctattcctatagaagtaattgtgacgataattgctactgccatttcatatggagccaacctggaaaaaaattacaatgctggcattgttaaatccatcccaagggggtttttgcctcctgaacttccacctgtgagcttgttctcggagatgctggctgcatcattttccatcgctgtggtggcttatgctattgcagtgtcagtaggaaaagtatatgccaccaagtatgattacaccatcgatgggaaccaggaattcattgcctttgggatcagcaacatcttctcaggattcttctcttgttttgtggccaccactgctctttcccgcacggccgtccaggagagcactggaggaaagacacaggttgctggcatcatctctgctgcgattgtgatgatcgccattcttgccctggggaagcttctggaacccttgcagaagtcggtcttggcagctgttgtaattgccaacctgaaagggatgtttatgcagctgtgtgacattcctcgtctgtggagacagaataagattgatgctgttatctgggtgtttacgtgtatagtgtccatcattctggggctggatctcggtttactagctggccttatatttggactgttgactgtggtcctgagagttcagtttccttcttggaatggccttggaagcatccctagcacagatatctacaaaagtaccaagaattacaaaaacattgaagaacctcaaggagtgaagattcttagattttccagtcctattttctatggcaatgtcgatggttttaaaaaatgtatcaagtccacagttggatttgatgccattagagtatataataagaggctgaaagcgctgaggaaaatacagaaactaataaaaagtggacaattaagagcaacaaagaatggcatcataagtgatgctgtttcaacaaataatgcttttgagcctgatgaggatattgaagatctggaggaacttgatatcccaaccaaggaaatagagattcaagtggattggaactctgagcttccagtcaaagtgaacgttcccaaagtgccaatccatagccttgtgcttgactgtggagctatatctttcctggacgttgttggagtgagatcactgcgggtgattgtcaaagaattccaaagaattgatgtgaatgtgtattttgcatcacttcaagattatgtgatagaaaagctggagcaatgcgggttctttgacgacaacattagaaaggacacattctttttgacggtccatgatgctatactctatctacagaaccaagtgaaatctcaagagggtcaaggttccattttagaaacgatcactctcattcaggattgtaaagatacccttgaattaatagaaacagagctgacggaagaagaacttgatgtccaggatgaggctatgcgtacacttgcatcctgaaagtgggttcgggaggtctctatgagcaaggaatacaagacaaaacttcctcaatgcattgactatttcttcagactcaaaacactcattcttttttctattaagccattgaaagagaagcactaagactgcttctaggctttatttataaaataaacaccttatccctaacatgggcaaaatggctagaattattcagacgatttggcagcgtccagggtaagctggtgttataatacgctgctgatctacatcacagatttgctaataatgttcacgtgggccctggcatatctctgttcagttagagtgagtgctgacccaacagcctctgtggtcaagcgagtcacgaatgattaatcataaagaaaaatcagtttttgactgacctggatatccatgagctgcactgatcaccatgtaaggtcacatttagtaaatgctgaaataaaatgattaatgcatttatcaataaaagcctttgaaaatactttggataataaattggagttttaaaaatgcaaatttgcttagtatctaataatgaagtgttattacatatagccggaattgaggatctctttgatcctggaaatggtttacctaaaagctacagaaccaggccaatatattttgaaatattgatgcagacaaatgaaataataaagagattttcatggtttataaaaatcttttttgatatgataataatcatgatcacaactgagatcaaaaaaatatatgacagattattttgtttaaaaatgcagttttaattatcttagtctatagaaatgatcattgcatggaggcatgtataggtatgatctgtgtaaaatctgacataaaaacagtgctattctgagtgaaaatttttttgatgtgcttacataaccatggtgattaaaatgagtttatattttttctcaaaaattttagcagtgtgtaaagtaagtaatctttaactgaactctgaccacttaaaaaaaaatctaaaaattgaactacctatagtagtctgtgtttaaagtgaatttttaaagacaaagcattctaaatgaactcaatataaaaacattcatttggaatgtacatactgaaaaatacaggtttttttgaccaaaagtttttatatcttttctttttatttatttttttcctaagtgccaacaattttctagatattatatacaacacaggctttgatcttggggacttttcccatatatttcacactggagtgaatgaagttgtacttcatttctagagaaaagttatacccaggtccccaattgagaatgtcttgcttgattgaaaacgacatcatcccttggtatactccagggattggtttcaggacccctgcatttaccaaaatttgtgcacactcaagtcctgcagtcacccctgcctaaagatagaatggcttctctgtttttcttctgaaatacaaccagaaacaatgtgtctatttctgaaagaataggattaatgatcatacaaatgggttaatcctgaattctggttgtaaatctggttacagcataactaggattataatgctgcctcattttcacagcactacttgcttatattgacaacaaatcatctcgctaaagagtgaatgtaggccaggcgcggtggctcatgcctgtaatcccagcactttgggaggccgaggcgggtggatcacgaggtcaggagatcgagaccatcctggctaacatggtaaaaccccgtctctactaaaaatagaaaaaaagaaattagcctagcgtggtggctggcgggcgcctgtagtcccagctatttgggaggctaaggcaggagaatggcgtgaacccgggaggcggagcttgcagtgagccgaggtcgtgccactgcactccagcctgggcgacagagcaagactccgtctcaaaaaaaaaaaaaaaaaaaaaaaaagagtgaatgtaatagtcttgcagaaaatgaatgaatacctttgttcaataaaggaaatatgcactgctcacttttttgaaggaaatgccaaagttacgttttacaacaaggctagagtttgtaaattctgggttcatttgtgatgacataagtcagcaaactgcgggaatactgtctcttctatgtattttgtgaatagtaagcataattttagttttgtattatcaatgaaaatttcacttgaaattaaagctgccttttgttatatttttaacctataggataagattccagtattgtatatgagttttaacaaattaaaaaatcaaatcatgtacatttgaaaatatttgcacacatttaaaaataaatgtaaagttgtcttttaaactactcggatgtgtcctttctgaacaaaa

SEQ ID NO: 28899 - DNA, 600 bp, Homo sapiens
  source 1..600: mol_type = unassigned DNA
aggctgctcggaaaacaggacgaggggagagacttgctcaataagctgaaagttctgcccccgagagggctgcgacagctgctggaatgtgcctgcagcgtccgcctcttggggacccgcggagcgcgccctgacggttccacgcctggcccgggggtctgcacctctcctccagtgcgcacctggagctgcgtcccgggtcaggtcatggcagcgccaggcggcaggtcggagccgccgcagctccccgagtacagctgcagctacatggtgtcgcggccggtctacagcgagctcgctttccagcaacagcacgagcggcgcctgcaggagcgcaagacgctgcgggagagcctggccaagtgctgcagttgttcaagaaagagagcctttggtgtgctaaagactcttgtgcccatcttggagtggctccccaaataccgagtcaaggaatggctgcttagtgacgtcatttcgggagttagtactgggctagtggccacgctgcaagggatggcatatgccctactagctgcagttcctgtcggatatggtctctactctgcttttttccctatcctgacatactttatctttgga

SEQ ID NO: 28900 - DNA, 1471 bp, Homo sapiens
  source 1..1471: mol_type = unassigned DNA
aaagctgtgcacatttcaggctgcagctgtcagcagcaggaacttctgctgctttcatttgagacggagcactgacaagctctccagagcacatggtcttcagcgggtgcaggcaaatctcaaactgctgatgtccattctcctgatgttacctccaggctcaaatgaggcatgggctggctgtcccatcggtcttggcagctgttgtaattgccaacctgaaagggatgtttatgcagctgtgtgacattcctcgtctgtggagacagaataagattgatgctgttatctgggtgtttacgtgtatagtgtccatcattctggggctggatctcggtttactagctggccttatatttggactgttgactgtggtcctgagagttcagtttccttcttggaatggccttggaagcatccctagcacagatatctacaaaagtaccaagaattacaaaaacattgaagaacctcaaggagtgaagattcttagattttccagtcctattttctatggcaatgtcgatggttttaaaaaatgtatcaagtccacagttggatttgatgccattagagtatataataagaggctgaaagcgctgaggaaaatacagaaactaataaaaagtggacaattaagagcaacaaagaatggcatcataagtgatgctgtttcaacaaataatgcttttgagcctgatgaggatattgaagatctggaggaacttgatatcccaaccaaggaaatagagattcaagtggattggaactctgagcttccagtcaaagtgaacgttcccaaagtgccaatccatagccttgtgcttgactgtggagctatatctttcctggacgttgttggagtgagatcactgcgggtgattgtcaaagaattccaaagaattgatgtgaatgtgtattttgcatcacttcaagattatgtgatagaaaagctggagcaatgcgggttctttgacgacaacattagaaaggacacattctttttgacggtccatgatgctatactctatctacagaaccaagtgaaatctcaagagggtcaaggttccattttagaaacgatcactctcattcaggattgtaaagatacccttgaattaatagaaacagagctgacggaagaagaacttgatgtccaggatgaggctatgcgtacacttgcatcctgaaagtgggttcgggaggtctctatgagcaaggaatacaagacaaaacttcctcaatgcattgactatttcttcagactcaaaacactcattcttttttctattaagccattgaaagagaagcactaagactgcttctaggctttatttataaaataaacaccttatccctaacatgggcaaaatggctagaattattcagacgatttggcagcgtccagggtaagctggtgttataatacgctgctgatctacatcacagatttgctaataatgttcacgtg

SEQ ID NO: 28901 - DNA, 1726 bp, Homo sapiens
  source 1..1726: mol_type = unassigned DNA
tattgcctcaggctgacccaactataatctaaatataaatgatcaatttgccaggtagagcaagtgctttctaattttctgtttatatttgctgtgtctgtctcccgtaactcagaccttttgcactagacagtacttgtgctcaacaaaatcttcccagttgtttcctctctgattgctttgcttgtagttccctgtctccttttcttctttgtttcagagcttctaatcttcatcttggctctgccccagctgtctcaacagagaattcattggtcatctaatcaaacgagagagtagtccccaccccctcagcctctctcctaactagtatggatcttaggagagctatttttgccagcgaaggttgctggcatcatctctgctgcgattgtgatgatcgccattcttgccctggggaagcttctggaacccttgcagaagtcggtcttggcagctgttgtaattgccaacctgaaagggatgtttatgcagctgtgtgacattcctcgtctgtggagacagaataagattgatgctgttatctgggtgtttacgtgtatagtgtccatcattctggggctggatctcggtttactagctggccttatatttggactgttgactgtggtcctgagagttcagtttccttcttggaatggccttggaagcatccctagcacagatatctacaaaagtaccaagaattacaaaaacattgaagaacctcaaggagtgaagattcttagattttccagtcctattttctatggcaatgtcgatggttttaaaaaatgtatcaagtccacagttggatttgatgccattagagtatataataagaggctgaaagcgctgaggaaaatacagaaactaataaaaagtggacaattaagagcaacaaagaatggcatcataagtgatgctgtttcaacaaataatgcttttgagcctgatgaggatattgaagatctggaggaacttgatatcccaaccaaggaaatagagattcaagtggattggaactctgagcttccagtcaaagtgaacgttcccaaagtgccaatccatagccttgtgcttgactgtggagctatatctttcctggacgttgttggagtgagatcactgcgggtgattgtcaaagaattccaaagaattgatgtgaatgtgtattttgcatcacttcaagattatgtgatagaaaagctggagcaatgcgggttctttgacgacaacattagaaaggacacattctttttgacggtccatgatgctatactctatctacagaaccaagtgaaatctcaagagggtcaaggttccattttagaaacgatcactctcattcaggattgtaaagatacccttgaattaatagaaacagagctgacggaagaagaacttgatgtccaggatgaggctatgcgtacacttgcatcctgaaagtgggttcgggaggtctctatgagcaaggaatacaagacaaaacttcctcaatgcattgactatttcttcagactcaaaacactcattcttttttctattaagccattgaaagagaagcactaagactgcttctaggctttatttataaaataaacaccttatccctaacatgggcaaaatggctagaattattcagacgatttggcagcgtccagggtaagctggtgttataatacgctgctgatctacatcacagatttgctaataatgttcacgt

SEQ ID NO: 28902 - DNA, 1440 bp, Homo sapiens
  source 1..1440: mol_type = unassigned DNA
gtgcacatttcaggctgcagctgtcagcagcaggaacttctgctgctttcatttgagacggagcactgacaagctctccagagcacatggtcttcagcgggtgcaggcaaatctcaaactgctgatgtccattctcctgatgttacctccaggctcaaatgaggcatgggctggctgtcccagttgctggcatcatctctgctgcgattgtgatgatcgccattcttgccctggggaagcttctggaacccttgcagaagtcggtcttggcagctgttgtaattgccaacctgaaagggatgtttatgcagctgtgtgacattcctcgtctgtggagacagaataagattgatgctgttatctgggtgtttacgtgtatagtgtccatcattctggggctggatctcggtttactagctggccttatatttggactgttgactgtggtcctgagagttcagtttccttcttggaatggccttggaagcatccctagcacagatatctacaaaagtaccaagaattacaaaaacattgaagaacctcaaggagtgaagattcttagattttccagtcctattttctatggcaatgtcgatggttttaaaaaatgtatcaagtccacagttggatttgatgccattagagtatataataagaggctgaaagcgctgaggaaaatacagaaactaataaaaagtggacaattaagagcaacaaagaatggcatcataagtgatgctgtttcaacaaataatgcttttgagcctgatgaggatattgaagatctggaggaacttgatatcccaaccaaggaaatagagattcaagtggattggaactctgagcttccagtcaaagtgaacgttcccaaagtgccaatccatagccttgtgcttgactgtggagctatatctttcctggacgttgttggagtgagatcactgcgggtgattgtcaaagaattccaaagaattgatgtgaatgtgtattttgcatcacttcaagattatgtgatagaaaagctggagcaatgcgggttctttgacgacaacattagaaaggacacattctttttgacggtccatgatgctatactctatctacagaaccaagtgaaatctcaagagggtcaaggttccattttagaaacgatcactctcattcaggattgtaaagatacccttgaattaatagaaacagagctgacggaagaagaacttgatgtccaggatgaggctatgcgtacacttgcatcctgaaagtgggttcgggaggtctctatgagcaaggaatacaagacaaaacttcctcaatgcattgactatttcttcagactcaaaacactcattcttttttctattaagccattgaaagagaagcactaagactgcttctaggctttatttataaaataaacaccttatccctaacatgggc

SEQ ID NO: 28903 - DNA, 2689 bp, Homo sapiens
  source 1..2689: mol_type = unassigned DNA
acctggaggcagcgcgcgcgtcgaagaggcagcggctgtggagcgcggcggggcggctccgcccagggcagcccgggctgggccaaggagcgagctctcccttctcctgctctcagcctcagtgatcaaggcttcagtgaactgcactggagctcccagcgggggatcttgtcccctgtcccgacttttgtgctgcacattggatctggtgacactcaggaaatgcttgtctccggctgttaaggaataatttcagagtactatggatcatgctgaagaaaatgaaatccttgcagcaacccagaggtactatgtggaaaggcctatctttagtcatccggtcctccaggaaagactacacacaaaggacaaggttcctgattccattgcggataagctgaaacaggcattcacatgtactcctaaaaaaataagaaatatcatttatatgttcctacccataactaaatggctgccagcatacaaattcaaggaatatgtgttgggtgacttggtctcaggcataagcacaggggtgcttcagcttcctcaaggcttagcctttgcaatgctggcagctgtgcctccaatatttggcctgtactcttcattttaccctgttatcatgtattgttttcttggaacctccagacacatatccataggtccttttgctgttattagcctgatgattggtggtgtagctgttcgattagtaccagatgatatagtcattccaggaggagtaaatgcaaccaatggcacagaggccagagatgccttgagagtgaaagtcgccatgtctgtgaccttactttcaggaatcattcagttttgcctaggtgtctgtaggtttggatttgtggccatatatctcacagagcctctggtccgtgggtttaccaccgcagcagctgtgcatgtcttcacctccatgttaaaatatctgtttggagttaaaacaaagcggtacagtggaatcttttccgtggtgtatagtacagttgctgtgttgcagaatgttaaaaacctcaacgtgtgttccctaggcgtcgggctgatggtttttggtttgctgttgggtggcaaggagtttaatgagagatttaaagagaaattgccggcgcctattcctttagagttctttgcggtcgtaatgggaactggcatttcagctgggtttaacttgaaagaatcatacaatgtggatgtcgttggaacacttcctctagggctgctacctccagccaatccggacaccagcctcttccaccttgtgtacgtagatgccattgccatagccatcgttggattttcagtgaccatctccatggccaagaccttagcaaataaacatggctaccaggttgacggcaatcaggagctcattgccctgggactgtgcaattccattggctcactcttccagaccttttcaatttcatgctccttgtctcgaagccttgttcaggagggaaccggtgggaagacacagcttgcaggttgtttggcctcattaatgattctgctggtcatattagcaactggattcctctttgaatcattgccccaggctgtgctgtcggccattgtgattgtcaacctgaagggaatgtttatgcagttctcagatctcccctttttctggagaaccagcaaaatagagctgaccatctggcttaccacttttgtgtcctccttgttcctgggattggactatggtttgatcactgctgtgatcattgctctgctgactgtgatttacagaacacagagtccaagctacaaagtccttggaaagcttcctgaaactgatgtgtatattgatatagacgcatatgaggaggtgaaagaaattcctggaataaaaatatttcaaataaatgcaccaatttactatgcaaatagcgacttgtatagcaatgcattaaaacgaaagactggagtgaacccagcagtcatcatgggagcaaggagaaaggccatgcggaagtacgctaaggaagtcggaaatgcaaatatggccaacgcaactgttgtcaaagcagatgcagaagtagatggagaggatgctaccaagcctgaagaagaggatggtgaagtaaaatatcccccaatagtgatcaaaagcacatttcctgaggaaatgcaaagatttatgcccccaggggataacgtccacactgtcattttggatttcactcaagtcaattttattgattctgttggagtgaaaactctggcagggattgtaaaagaatatggagacgtcggtatatatgtatacttagcaggatgcagtgcacaagttgtgaatgacctcactcggaatagattttttgaaaatcctgccctatgggagctgctgttccacagcattcatgatgcagttttaggcagccaacttagagaggcacttgctgaacaggaagcctcggctcccccttcccaggaggacttggagcccaatgccactcctgccactcctgaggcatagatgaggacctcaccctaggatggggttataagcctctcatgaagttcataatttacacgttttaaatactagacgctagatttttttttctaagggtgaatactagtagtccaggcttgatttggagggtgaatgacgcctagcaagatgtattgtacttgtgtttttttaattgaatacttcaaagataaa

SEQ ID NO: 28904 - DNA, 2474 bp, Homo sapiens
  source 1..2474: mol_type = unassigned DNA
aggcagcggctgtggagcgcggcggggcggctccgcccagggcagcccgggctgggccaaggagcgagctctcccttctcctgctctcagcctcagtgatcaaggcttcagtgaactgcactggagctcccagcgggggatcttgtcccctgtcccgacttttgtgctgcacattggatctggtgacactcaggaaatgcttgtctccggctgttaaggaataatttcagagtactatggatcatgctgaagaaaatgaaatccttgcagcaacccagaggtactatgtggaaaggcctatctttagtcatccggtcctccaggaaagactacacacaaaggacaaggttcctgattccattgcggataagctgaaacaggcattcacatgtactcctaaaaaaataagaaatatcatttatatgttcctacccataactaaatggctgccagcatacaaattcaaggaatatgtgttgggtgacttggtctcaggcataagcacaggggtgcttcagcttcctcaaggcttagcctttgcaatgctggcagctgtgcctccaatatttggcctgtactcttcattttaccctgttatcatgtattgttttcttggaacctccagacacatatccataggtccttttgctgttattagcctgatgattggtggtgtagctgttcgattagtaccagatgatatagtcattccaggaggagtaaatgcaaccaatggcacagaggccagagatgccttgagagtgaaagtcgccatgtctgtgaccttactttcaggaatcattcagttttgcctaggtgtctgtaggtttggatttgtggccatatatctcacagagcctctggtccgtgggtttaccaccgcagcagctgtgcatgtcttcacctccatgttaaaatatctgtttggagttaaaacaaagcggtacagtggaatcttttccgtggtgtatagtacagttgctgtgttgcagaatgttaaaaacctcaacgtgtgttccctaggcgtcgggctgatggtttttggtttgctgttgggtggcaaggagtttaatgagagatttaaagagaaattgccggcgcctattcctttagagttctttgcggtcgtaatgggaactggcatttcagctgggtttaacttgaaagaatcatacaatgtggatgtcgttggaacacttcctctagggctgctacctccagccaatccggacaccagcctcttccaccttgtgtacgtagatgccattgccatagccatcgttggattttcagtgaccatctccatggccaagaccttagcaaataaacatggctaccaggttgacggcaatcaggagctcattgccctgggactgtgcaattccattggctcactcttccagaccttttcaatttcatgctccttgtctcgaagccttgttcaggagggaaccggtgggaagacacagcttgcaggttgtttggcctcattaatgattctgctggtcatattagcaactggattcctctttgaatcattgccccaggctgtgctgtcggccattgtgattgtcaacctgaagggaatgtttatgcagttctcagatctcccctttttctggagaaccagcaaaatagagctgaccatctggcttaccacttttgtgtcctccttgttcctgggattggactatggtttgatcactgctgtgatcattgctctgctgactgtgatttacagaacacagagtccaagctacaaagtccttggaaagcttcctgaaactgatgtgtatattgatatagacgcatatgaggaggtgaaagaaattcctggaataaaaatatttcaaataaatgcaccaatttactatgcaaatagcgacttgtatagcaatgcattaaaacgaaagactggagtgaacccagcagtcatcatgggagcaaggagaaaggccatgcggaagtacgctaaggaagtcggaaatgcaaatatggccaacgcaactgttgtcaaagcagatgcagaagtagatggagaggatgctaccaagcctgaagaagaggatggtgaagtaaaatatcccccaatagtgatcaaaagcacatttcctgaggaaatgcaaagatttatgcccccaggggataacgtccacactgtcattttggatttcactcaagtcaattttattgattctgttggagtgaaaactctggcagggattgtaaaagaatatggagacgtcggtatatatgtatacttagcaggatgcagtgctttcatacagagatgaccagaagatggagaccgtaggggaaatgccgtgtaatccaagcagttcaggctttggggccaggtggacagggtttgaatgccagctctggaatctgttagtggggtgacctcagccaagtcacttaacacttctgaactttgttttctcttttgtgaaataaagaaaaaatgaatctac

SEQ ID NO: 28905 - DNA, 2270 bp, Homo sapiens
  source 1..2270: mol_type = unassigned DNA
tctcccttctcctgctctcagcctcagtgatcaaggcttcagtgaactgcactggagctcccagcgggggatcttgtcccctgtcccgacttttgtgctgcacattggatctggtgacactcaggaaatgcttgtctccggctgttaaggaataatttcagagtactatggatcatgctgaagaaaatgaaatccttgcagcaacccagaggtactatgtggaaaggcctatctttagtcatccggtcctccaggaaagactacacacaaaggacaaggttcctgattccattgcggataagctgaaacaggcattcacatgtactcctaaaaaaataagaaatatcatttatatgttcctacccataactaaatggctgccagcatacaaattcaaggaatatgtgttgggtgacttggtctcaggcataagcacaggggtgcttcagcttcctcaaggcttagcctttgcaatgctggcagctgtgcctccaatatttggcctgtactcttcattttaccctgttatcatgtattgttttcttggaacctccagacacatatccataggtccttttgctgttattagcctgatgattggtggtgtagctgttcgattagtaccagatgatatagtcattccaggaggagtaaatgcaaccaatggcacagaggccagagatgccttgagagtgaaagtcgccatgtctgtgaccttactttcaggaatcattcagttttgcctaggtgtctgtaggtttggatttgtggccatatatctcacagagcctctggtccgtgggtttaccaccgcagcagctgtgcatgtcttcacctccatgttaaaatatctgtttggagttaaaacaaagcggtacagtggaatcttttccgtggtgtatgcgtcgggctgatggtttttggtttgctgttgggtggcaaggagtttaatgagagatttaaagagaaattgccggcgcctattcctttagagttctttgcggtcgtaatgggaactggcatttcagctgggtttaacttgaaagaatcatacaatgtggatgtcgttggaacacttcctctagggagctcattgccctgggactgtgcaattccattggctcactcttccagaccttttcaatttcatgctccttgtctcgaagccttgttcaggagggaaccggtgggaagacacagcttgcaggttgtttggcctcattaatgattctgctggtcatattagcaactggattcctctttgaatcattgccccaggctgtgctgtcggccattgtgattgtcaacctgaagggaatgtttatgcagttctcagatctcccctttttctggagaaccagcaaaatagagctgaccatctggcttaccacttttgtgtcctccttgttcctgggattggactatggtttgatcactgctgtgatcattgctctgctgactgtgatttacagaacacagaggtgaaagaaattcctggaataaaaatatttcaaataaatgcaccaatttactatgcaaatagcgacttgtatagcaatgcattaaaacgaaagactggagtgaacccagcagtcatcatgggagcaaggagaaaggccatgcggaagtacgctaaggaagtcggaaatgcaaatatggccaacgcaactgttgtcaaagcagatgcagaagtagatggagaggatgctaccaagcctgaagaagaggatggtgaagtaaaatatcccccaatagtgatcaaaagcacatttcctgaggaaatgcaaagatttatgcccccaggggataacgtccacactgtcattttggatttcactcaagtcaattttattgattctgttggagtgaaaactctggcagggattgtaaaagaatatggagacgtcggtatatatgtatacttagcaggatgcagtgcacaagttgtgaatgacctcactcggaatagattttttgaaaatcctgccctatgggagctgctgttccacagcattcatgatgcagttttaggcagccaacttagagaggcacttgctgaacaggaagcctcggctcccccttcccaggaggacttggagcccaatgccactcctgccactcctgaggcatagatgaggacctcaccctaggatggggttataagcctctcatgaagttcataatttacacgttttaaatactagacgctagatttttttttctaagggtgaatactagtagtccaggcttgatttggagggtgaatgacg

SEQ ID NO: 28906 - DNA, 1404 bp, Homo sapiens
  source 1..1404: mol_type = unassigned DNA
aggcagcggctgtggagcgcggcggggcggctccgcccagggcagcccgggctgggccaaggagcgagctctcccttctcctgctctcagcctcagtgatcaaggcttcagtgaactgcactggagctcccagcgggggatcttgtcccctgtcccgacttttgtgctgcacattggatctggtgacactcaggaaatgcttgtctccggctgttaaggaataatttcagagtactatggatcatgctgaagaaaatgaaatccttgcagcaacccagaggtactatgtggaaaggcctatctttagtcatccggtcctccaggaaagactacacacaaaggacaaggttcctgattccattgcggataagctgaaacaggcattcacatgtactcctaaaaaaataagaaatatcatttatatgttcctacccataactaaatggctgccagcatacaaattcaaggaatatgtgttgggtgacttggtctcaggcataagcacaggggtgcttcagcttcctcaaggcttagcctttgcaatgctggcagctgtgcctccaatatttggcctgtactcttcattttaccctgttatcatgtattgttttcttggaacctccagacacatatccataggtccttttgctgttattagcctgatgattggtggtgtagctgttcgattagtaccagatgatatagtcattccaggaggagtaaatgcaaccaatggcacagaggccagagatgccttgagagtgaaagtcgccatgtctgtgaccttactttcaggaatcattcagttttgcctaggtgtctgtaggtttggatttgtggccatatatctcacagagcctctggtccgtgggtttaccaccgcagcagctgtgcatgtcttcacctccatgttaaaatatctgtttggagttaaaacaaagcggtacagtggaatcttttccgtggtgtatagtacagttgctgtgttgcagaatgttaaaaacctcaacgtgtgttccctaggcgtcgggctgatggtttttggtttgctgttgggtggcaaggagtttaatgagagatttaaagagaaattgccggcgcctattcctttagagttctttgcggtcgtaatgggaactggcatttcagctgggtttaacttgaaagaatcatacaatgtggatgtcgttggaacacttcctctaggctttcatacagagatgaccagaagatggagaccgtaggggaaatgccgtgtaatccaagcagttcaggctttggggccaggtggacagggtttgaatgccagctctggaatctgttagtggggtgacctcagccaagtcacttaacacttctgaactttgttttctcttttgtgaaataaagaaaaaatgaatctac

SEQ ID NO: 28907 - DNA, 2174 bp, Homo sapiens
  source 1..2174: mol_type = unassigned DNA
agagtactatggatcatgctgaagaaaatgaaatccttgcagcaacccagaggtactatgtggaaaggcctatctttagtcatccggtcctccaggaaagactacacacaaaggacaaggttcctgattccattgcggataagctgaaacaggcattcacatgtactcctaaaaaaataagaaatatcatttatatgttcctacccataactaaatggctgccagcatacaaattcaaggaatatgtgttgggtgacttggtctcaggcataagcacaggggtgcttcagcttcctcaaggcttagcctttgcaatgctggcagctgtgcctccaatatttggcctgtactcttcattttaccctgttatcatgtattgttttcttggaacctccagacacatatccataggtccttttgctgttattagcctgatgattggtggtgtagctgttcgattagtaccagatgatatagtcattccaggaggagtaaatgcaaccaatggcacagaggccagagatgccttgagagtgaaagtcgccatgtctgtgaccttactttcaggaatcattcagttttgcctaggtgtctgtaggtttggatttgtggccatatatctcacagagcctctggtccgtgggtttaccaccgcagcagctgtgcatgtcttcacctccatgttaaaatatctgtttggagttaaaacaaagcggtacagtggaatcttttccgtggtgtatagtacagttgctgtgttgcagaatgttaaaaacctcaacgtgtgttccctaggcgtcgggctgatggtttttggtttgctgttgggtggcaaggagtttaatgagagatttaaagagaaattgccggcgcctattcctttagagttctttgcggtcgtaatgggaactggcatttcagctgggtttaacttgaaagaatcatacaatgtggatgtcgttggaacacttcctctagggctgctacctccagccaatccggacaccagcctcttccaccttgtgtacgtagatgccattgccatagccatcgttggattttcagtgaccatctccatggccaagaccttagcaaataaacatggctaccaggttgacggcaatcaggagctcattgccctgggactgtgcaattccattggctcactcttccagaccttttcaatttcatgctccttgtctcgaagccttgttcaggagggaaccggtgggaagacacagcttgcaggttgtttggcctcattaatgattctgctggtcatattagcaactggattcctctttgaatcattgccccagaccatctggcttaccacttttgtgtcctccttgttcctgggattggactatggtttgatcactgctgtgatcattgctctgctgactgtgatttacagaacacagagtccaagctacaaagtccttggaaagcttcctgaaactgatgtgtatattgatatagacgcatatgaggaggtgaaagaaattcctggaataaaaatatttcaaataaatgcaccaatttactatgcaaatagcgacttgtatagcaatgcattaaaacgaaagactggagtgaacccagcagtcatcatgggagcaaggagaaaggccatgcggaagtacgctaaggaagtcggaaatgcaaatatggccaacgcaactgttgtcaaagcaacacaggatgcagaagtagatggagaggatgctaccaagcctgaagaagaggatggtgaagtaaaatatcccccaatagtgatcaaaagcacatttcctgaggaaatgcaaagatttatgcccccaggggataacgtccacactgtcattttggatttcactcaagtcaattttattgattctgttggagtgaaaactctggcagggattgtaaaagaatatggagacgtcggtatatatgtatacttagcaggatgcagtgcacaagttgtgaatgacctcactcggaatagattttttgaaaatcctgccctatgggagctgctgttccacagcattcatgatgcagttttaggcagccaacttagagaggcacttgctgaacaggaagcctcggctcccccttcccaggaggacttggagcccaatgccactcctgccactcctgaggcatagatgaggacctcaccctaggat

SEQ ID NO: 28908 - DNA, 2270 bp, Homo sapiens
  source 1..2270: mol_type = unassigned DNA
agagtactatggatcatgctgaagaaaatgaaatccttgcagcaacccagaggtactatgtggaaaggcctatctttagtcatccggtcctccaggaaagactacacacaaaggacaaggttcctgattccattgcggataagctgaaacaggcattcacatgtactcctaaaaaaataagaaatatcatttatatgttcctacccataactaaatggctgccagcatacaaattcaaggaatatgtgttgggtgacttggtctcaggcataagcacaggggtgcttcagcttcctcaaggcttagcctttgcaatgctggcagctgtgcctccaatatttggcctgtactcttcattttaccctgttatcatgtattgttttcttggaacctccagacacatatccataggtccttttgctgttattagcctgatgattggtggtgtagctgttcgattagtaccagatgatatagtcattccaggaggagtaaatgcaaccaatggcacagaggccagagatgccttgagagtgaaagtcgccatgtctgtgaccttactttcaggaatcattcagttttgcctaggtgtctgtaggtttggatttgtggccatatatctcacagagcctctggtccgtgggtttaccaccgcagcagctgtgcatgtcttcacctccatgttaaaatatctgtttggagttaaaacaaagcggtacagtggaatcttttccgtggtgtatagtacagttgctgtgttgcagaatgttaaaaacctcaacgtgtgttccctaggcgtcgggctgatggtttttggtttgctgttgggtggcaaggagtttaatgagagatttaaagagaaattgccggcgcctattcctttagagttctttgcggtcgtaatgggaactggcatttcagctgggtttaacttgaaagaatcatacaatgtggatgtcgttggaacacttcctctagggctgctacctccagccaatccggacaccagcctcttccaccttgtgtacgtagatgccattgccatagccatcgttggattttcagtgaccatctccatggccaagaccttagcaaataaacatggctaccaggttgacggcaatcaggagctcattgccctgggactgtgcaattccattggctcactcttccagaccttttcaatttcatgctccttgtctcgaagccttgttcaggagggaaccggtgggaagacacagcttgcaggttgtttggcctcattaatgattctgctggtcatattagcaactggattcctctttgaatcattgccccaggctgtgctgtcggccattgtgattgtcaacctgaagggaatgtttatgcagttctcagatctcccctttttctggagaaccagcaaaatagagctgaccatctggcttaccacttttgtgtcctccttgttcctgggattggactatggtttgatcactgctgtgatcattgctctgctgactgtgatttacagaacacagagtccaagctacaaagtccttggaaagcttcctgaaactgatgtgtatattgatatagacgcatatgaggaggtgaaagaaattcctggaataaaaatatttcaaataaatgcaccaatttactatgcaaatagcgacttgtatagcaatgcattaaaacgaaagactggagtgaacccagcagtcatcatgggagcaaggagaaaggccatgcggaagtacgctaaggaagtcggaaatgcaaatatggccaacgcaactgttgtcaaagcaacacaggatgcagaagtagatggagaggatgctaccaagcctgaagaagaggatggtgaagtaaaatatcccccaatagtgatcaaaagcacatttcctgaggaaatgcaaagatttatgcccccaggggataacgtccacactgtcattttggatttcactcaagtcaattttattgattctgttggagtgaaaactctggcagggattgtaaaagaatatggagacgtcggtatatatgtatacttagcaggatgcagtgcacaagttgtgaatgacctcactcggaatagattttttgaaaatcctgccctatgggagctgctgttccacagcattcatgatgcagttttaggcagccaacttagagaggcacttgctgaacaggaagcctcggctcccccttcccaggaggacttggagcccaatgccactcctgccactcctgaggcatagatgaggacctcaccctaggat

SEQ ID NO: 28909 - DNA, 2422 bp, Homo sapiens
  source 1..2422: mol_type = unassigned DNA
tcccttctcctgctctcagcctcagtgatcaaggcttcagtgaactgcactggagctcccagcgggggatcttgtcccctgtcccgacttttgtgctgcacattggatctggtgacactcaggaaatgcttgtctccggctgttaaggaataatttcagagtactatggatcatgctgaagaaaatgaaatccttgcagcaacccagaggtactatgtggaaaggcctatctttagtcatccggtcctccaggaaagactacacacaaaggacaaggttcctgattccattgcggataagctgaaacaggcattcacatgtactcctaaaaaaataagaaatatcatttatatgttcctacccataactaaatggctgccagcatacaaattcaaggaatatgtgttgggtgacttggtctcaggcataagcacaggggtgcttcagcttcctcaaggtccttttgctgttattagcctgatgattggtggtgtagctgttcgattagtaccagatgatatagtcattccaggaggagtaaatgcaaccaatggcacagaggccagagatgccttgagagtgaaagtcgccatgtctgtgaccttactttcaggaatcattcagttttgcctaggtgtctgtaggtttggatttgtggccatatatctcacagagcctctggtccgtgggtttaccaccgcagcagctgtgcatgtcttcacctccatgttaaaatatctgtttggagttaaaacaaagcggtacagtggaatcttttccgtggtgtatagtacagttgctgtgttgcagaatgttaaaaacctcaacgtgtgttccctaggcgtcgggctgatggtttttggtttgctgttgggtggcaaggagtttaatgagagatttaaagagaaattgccggcgcctattcctttagagttctttgcggtcgtaatgggaactggcatttcagctgggtttaacttgaaagaatcatacaatgtggatgtcgttggaacacttcctctagggctgctacctccagccaatccggacaccagcctcttccaccttgtgtacgtagatgccattgccatagccatcgttggattttcagtgaccatctccatggccaagaccttagcaaataaacatggctaccaggttgacggcaatcaggagctcattgccctgggactgtgcaattccattggctcactcttccagaccttttcaatttcatgctccttgtctcgaagccttgttcaggagggaaccggtgggaagacacagcttgcaggttgtttggcctcattaatgattctgctggtcatattagcaactggattcctctttgaatcattgccccaggctgtgctgtcggccattgtgattgtcaacctgaagggaatgtttatgcagttctcagatctcccctttttctggagaaccagcaaaatagagctgaccatctggcttaccacttttgtgtcctccttgttcctgggattggactatggtttgatcactgctgtgatcattgctctgctgactgtgatttacagaacacagagtccaagctacaaagtccttggaaagcttcctgaaactgatgtgtatattgatatagacgcatatgaggaggtgaaagaaattcctggaataaaaatatttcaaataaatgcaccaatttactatgcaaatagcgacttgtatagcaatgcattaaaacgaaagactggagtgaacccagcagtcatcatgggagcaaggagaaaggccatgcggaagtacgctaaggaagtcggaaatgcaaatatggccaacgcaactgttgtcaaagcagatgcagaagtagatggagaggatgctaccaagcctgaagaagaggatggtgaagtaaaatatcccccaatagtgatcaaaagcacatttcctgaggaaatgcaaagatttatgcccccaggggataacgtccacactgtcattttggatttcactcaagtcaattttattgattctgttggagtgaaaactctggcagggattgtaaaagaatatggagacgtcggtatatatgtatacttagcaggatgcagtgcacaagttgtgaatgacctcactcggaatagattttttgaaaatcctgccctatgggagctgctgttccacagcattcatgatgcagttttaggcagccaacttagagaggcacttgctgaacaggaagcctcggctcccccttcccaggaggacttggagcccaatgccactcctgccactcctgaggcatagatgaggacctcaccctaggatggggttataagcctctcatgaagttcataatttacacgttttaaatactagacgctagatttttttttctaagggtgaatactagtagtccaggcttgatttggagggtgaa

SEQ ID NO: 28910 - DNA, 2498 bp, Homo sapiens
  source 1..2498: mol_type = unassigned DNA
tctcccttctcctgctctcagcctcagtgatcaaggcttcagtgaactgcactggagctcccagcgggggatcttgtcccctgtcccgacttttgtgctgcacattggatctggtgacactcaggaaatgcttgtctccggctgttaaggaataatttcagagtactatggatcatgctgaagaaaatgaaatccttgcagcaacccagaggtactatgtggaaaggcctatctttagtcatccggtcctccaggaaagactacacacaaaggacaaggttcctgattccattgcggataagctgaaacaggcattcacatgtactcctaaaaaaataagaaatatcatttatatgttcctacccataactaaatggctgccagcatacaaattcaaggaatatgtgttgggtgacttggtctcaggcataagcacaggggtgcttcagcttcctcaaggcttagcctttgcaatgctggcagctgtgcctccaatatttggcctgtactcttcattttaccctgttatcatgtattgttttcttggaacctccagacacatatccataggtccttttgctgttattagcctgatgattggtggtgtagctgttcgattagtaccagatgatatagtcattccaggaggagtaaatgcaaccaatggcacagaggccagagatgccttgagagtgaaagtcgccatgtctgtgaccttactttcaggaatcattcagttttgcctaggtgtctgtaggtttggatttgtggccatatatctcacagagcctctggtccgtgggtttaccaccgcagcagctgtgcatgtcttcacctccatgttaaaatatctgtttggagttaaaacaaagcggtacagtggaatcttttccgtggtgtatagtacagttgctgtgttgcagaatgttaaaaacctcaacgtgtgttccctaggcgtcgggctgatggtttttggtttgctgttgggtggcaaggagtttaatgagagatttaaagagaaattgccggcgcctattcctttagagttctttgcggtcgtaatgggaactggcatttcagctgggtttaacttgaaagaatcatacaatgtggatgtcgttggaacacttcctctagggctgctacctccagccaatccggacaccagcctcttccaccttgtgtacgtagatgccattgccatagccatcgttggattttcagtgaccatctccatggccaagaccttagcaaataaacatggctaccaggttgacggcaatcaggagctcattgccctgggactgtgcaattccattggctcactcttccagaccttttcaatttcatgctccttgtctcgaagccttgttcaggagggaaccggtgggaagacacagcttgcaggttgtttggcctcattaatgattctgctggtcatattagcaactggattcctctttgaatcattgccccagaccatctggcttaccacttttgtgtcctccttgttcctgggattggactatggtttgatcactgctgtgatcattgctctgctgactgtgatttacagaacacagagtccaagctacaaagtccttggaaagcttcctgaaactgatgtgtatattgatatagacgcatatgaggaggtgaaagaaattcctggaataaaaatatttcaaataaatgcaccaatttactatgcaaatagcgacttgtatagcaatgcattaaaacgaaagactggagtgaacccagcagtcatcatgggagcaaggagaaaggccatgcggaagtacgctaaggaagtcggaaatgcaaatatggccaacgcaactgttgtcaaagcagatgcagaagtagatggagaggatgctaccaagcctgaagaagaggatggtgaagtaaaatatcccccaatagtgatcaaaagcacatttcctgaggaaatgcaaagatttatgcccccaggggataacgtccacactgtcattttggatttcactcaagtcaattttattgattctgttggagtgaaaactctggcagggattgtaaaagaatatggagacgtcggtatatatgtatacttagcaggatgcagtgcacaagttgtgaatgacctcactcggaatagattttttgaaaatcctgccctatgggagctgctgttccacagcattcatgatgcagttttaggcagccaacttagagaggcacttgctgaacaggaagcctcggctcccccttcccaggaggacttggagcccaatgccactcctgccactcctgaggcatagatgaggacctcaccctaggatggggttataagcctctcatgaagttcataatttacacgttttaaatactagacgctagatttttttttctaagggtgaatactagtagtccaggcttgatttggagggtgaatgacgcctagcaagatgtattgtacttgtgtttttttaattgaatacttcaaagataaa

SEQ ID NO: 28911 - DNA, 1947 bp, Homo sapiens
  source 1..1947: mol_type = unassigned DNA
aggcagcggctgtggagcgcggcggggcggctccgcccagggcagcccgggctgggccaaggagcgagctctcccttctcctgctctcagcctcagtgatcaaggcttcagtgaactgcactggagctcccagcgggggatcttgtcccctgtcccgacttttgtgctgcacattggatctggtgacactcaggaaatgcttgtctccggctgttaaggaataatttcagagtactatggatcatgctgaagaaaatgaaatccttgcagcaacccagaggtactatgtggaaaggcctatctttagtcatccggtcctccaggaaagactacacacaaaggacaaggttcctgattccattgcggataagctgaaacaggcattcacatgtactcctaaaaaaataagaaatatcatttatatgttcctacccataactaaatggctgccagcatacaaattcaaggaatatgtgttgggtgacttggtctcaggcataagcacaggggtgcttcagcttcctcaaggcttagcctttgcaatgctggcagctgtgcctccaatatttggcctgtactcttcattttaccctgttatcatgtattgttttcttggaacctccagacacatatccataggtccttttgctgttattagcctgatgattggtggtgtagctgttcgattagtaccagatgatatagtcattccaggaggagtaaatgcaaccaatggcacagaggccagagatgccttgagagtgaaagtcgccatgtctgtgaccttactttcaggaatcattcagttttgcctaggtgtctgtaggtttggatttgtggccatatatctcacagagcctctggtccgtgggtttaccaccgcagcagctgtgcatgtcttcacctccatgttaaaatatctgtttggagttaaaacaaagcggtacagtggaatcttttccgtggtgtatagtacagttgctgtgttgcagaatgttaaaaacctcaacgtgtgttccctaggcgtcgggctgatggtttttggtttgctgttgggtggcaaggagtttaatgagagatttaaagagaaattgccggcgcctattcctttagagttctttgcggtcgtaatgggaactggcatttcagctgggtttaacttgaaagaatcatacaatgtggatgtcgttggaacacttcctctagggctgctacctccagccaatccggacaccagcctcttccaccttgtgtacgtagatgccattgccatagccatcgttggattttcagtgaccatctccatggccaagaccttagcaaataaacatggctaccaggttgacggcaatcaggagctcattgccctgggactgtgcaattccattggctcactcttccagaccttttcaatttcatgctccttgtctcgaagccttgttcaggagggaaccggtgggaagacacagcttgcaggttgtttggcctcattaatgattctgctggtcatattagcaactggattcctctttgaatcattgccccaggctgtgctgtcggccattgtgattgtcaacctgaagggaatgtttatgcagttctcagatctcccctttttctggagaaccagcaaaatagagctgaccatctggcttaccacttttgtgtcctccttgttcctgggattggactatggtttgatcactgctgtgatcattgctctgctgactgtgatttacagaacacagagctttcatacagagatgaccagaagatggagaccgtaggggaaatgccgtgtaatccaagcagttcaggctttggggccaggtggacagggtttgaatgccagctctggaatctgttagtggggtgacctcagccaagtcacttaacacttctgaactttgttttctcttttgtgaaataaagaaaaaatgaatctac

SEQ ID NO: 28912 - DNA, 2374 bp, Homo sapiens
  source 1..2374: mol_type = unassigned DNA
tctcccttctcctgctctcagcctcagtgatcaaggcttcagtgaactgcactggagctcccagcgggggatcttgtcccctgtcccgacttttgtgctgcacattggatctggtgacactcaggaaatgcttgtctccggctgttaaggaataatttcagagtactatggatcatgctgaagaaaatgaaatccttgcagcaacccagaggtactatgtggaaaggcctatctttagtcatccggtcctccaggaaagactacacacaaaggacaaggttcctgattccattgcggataagctgaaacaggcattcacatgtactcctaaaaaaataagaaatatcatttatatgttcctacccataactaaatggctgccagcatacaaattcaaggaatatgtgttgggtgacttggtctcaggcataagcacaggggtgcttcagcttcctcaaggcttagcctttgcaatgctggcagctgtgcctccaatatttggcctgtactcttcattttaccctgttatcatgtattgttttcttggaacctccagacacatatccataggtccttttgctgttattagcctgatgattggtggtgtagctgttcgattagtaccagatgatatagtcattccaggaggagtaaatgcaaccaatggcacagaggccagagatgccttgagagtgaaagtcgccatgtctgtgaccttactttcaggaatcattcagttttgcctaggtgtctgtaggtttggatttgtggccatatatctcacagagcctctggtccgtgggtttaccaccgcagcagctgtgcatgtcttcacctccatgttaaaatatctgtttggagttaaaacaaagcggtacagtggaatcttttccgtggtgtatagtacagttgctgtgttgcagaatgttaaaaacctcaacgtgtgttccctaggcgtcgggctgatggtttttggtttgctgttgggtggcaaggagtttaatgagagatttaaagagaaattgccggcgcctattcctttagagttctttgcggtcgtaatgggaactggcatttcagctgggtttaacttgaaagaatcatacaatgtggatgtcgttggaacacttcctctagggctgctacctccagccaatccggacaccagcctcttccaccttgtgtacgtagatgccattgccatagccatcgttggattttcagtgaccatctccatggccaagaccttagcaaataaacatggctaccaggttgacggcaatcaggagctcattgccctgggactgtgcaattccattggctcactcttccagaccttttcaatttcatgctccttgtctcgaagccttgttcaggagggaaccggtgggaagacacagcttgcaggttgtttggcctcattaatgattctgctggtcatattagcaactggattcctctttgaatcattgccccagaccatctggcttaccacttttgtgtcctccttgttcctgggattggactatggtttgatcactgctgtgatcattgctctgctgactgtgatttacagaacacagaggtgaaagaaattcctggaataaaaatatttcaaataaatgcaccaatttactatgcaaatagcgacttgtatagcaatgcattaaaacgaaagactggagtgaacccagcagtcatcatgggagcaaggagaaaggccatgcggaagtacgctaaggaagtcggaaatgcaaatatggccaacgcaactgttgtcaaagcagatgcagaagtagatggagaggatgctaccaagcctgaagaagaggatggtgaagtaaaatatcccccaatagtgatcaaaagcacatttcctgaggaaatgcaaagatttatgcccccaggggataacgtccacactgtcattttggatttcactcaagtcaattttattgattctgttggagtgaaaactctggcagggattgtaaaagaatatggagacgtcggtatatatgtatacttagcaggatgcagtgcacaagttgtgaatgacctcactcggaatagattttttgaaaatcctgccctatgggagctgctgttccacagcattcatgatgcagttttaggcagccaacttagagaggcacttgctgaacaggaagcctcggctcccccttcccaggaggacttggagcccaatgccactcctgccactcctgaggcatagatgaggacctcaccctaggatggggttataagcctctcatgaagttcataatttacacgttttaaatactagacgctagatttttttttctaagggtgaatactagtagtccaggcttgatttggagggtgaatgacg

SEQ ID NO: 28913 - DNA, 2588 bp, Homo sapiens
  source 1..2588: mol_type = unassigned DNA
acctggaggcagcgcgcgcgtcgaagaggcagcggctgtggagcgcggcggggcggctccgcccagggcagcccgggctgggccaaggagcgagctctcccttctcctgctctcagcctcagtgatcaaggcttcagtgaactgcactggagctcccagcgggggatcttgtcccctgtcccgacttttgtgctgcacattggatctggtgacactcaggaaatgcttgtctccggctgttaaggaataatttcagagtactatggatcatgctgaagaaaatgaaatccttgcagcaacccagaggtactatgtggaaaggcctatctttagtcatccggtcctccaggaaagactacacacaaaggacaaggttcctgattccattgcggataagctgaaacaggcattcacatgtactcctaaaaaaataagaaatatcatttatatgttcctacccataactaaatggctgccagcatacaaattcaaggaatatgtgttgggtgacttggtctcaggcataagcacaggggtgcttcagcttcctcaaggcttagcctttgcaatgctggcagctgtgcctccaatatttggcctgtactcttcattttaccctgttatcatgtattgttttcttggaacctccagacacatatccataggtccttttgctgttattagcctgatgattggtggtgtagctgttcgattagtaccagatgatatagtcattccaggaggagtaaatgcaaccaatggcacagaggccagagatgccttgagagtgaaagtcgccatgtctgtgaccttactttcaggaatcattcagttttgcctaggtgtctgtaggtttggatttgtggccatatatctcacagagcctctggtccgtgggtttaccaccgcagcagctgtgcatgtcttcacctccatgttaaaatatctgtttggagttaaaacaaagcggtacagtggaatcttttccgtggtgtatagtacagttgctgtgttgcagaatgttaaaaacctcaacgtgtgttccctaggcgtcgggctgatggtttttggtttgctgttgggtggcaaggagtttaatgagagatttaaagagaaattgccggcgcctattcctttagagttctttgcggtcgtaatgggaactggcatttcagctgggtttaacttgaaagaatcatacaatgtggatgtcgttggaacacttcctctagggctgctacctccagccaatccggacaccagcctcttccaccttgtgtacgtagatgccattgccatagccatcgttggattttcagtgaccatctccatggccaagaccttagcaaataaacatggctaccaggttgacggcaatcaggagctcattgccctgggactgtgcaattccattggctcactcttccagaccttttcaatttcatgctccttgtctcgaagccttgttcaggagggaaccggtgggaagacacagcttgcaggttgtttggcctcattaatgattctgctggtcatattagcaactggattcctctttgaatcattgccccagaccatctggcttaccacttttgtgtcctccttgttcctgggattggactatggtttgatcactgctgtgatcattgctctgctgactgtgatttacagaacacagagtccaagctacaaagtccttggaaagcttcctgaaactgatgtgtatattgatatagacgcatatgaggaggtgaaagaaattcctggaataaaaatatttcaaataaatgcaccaatttactatgcaaatagcgacttgtatagcaatgcattaaaacgaaagactggagtgaacccagcagtcatcatgggagcaaggagaaaggccatgcggaagtacgctaaggaagtcggaaatgcaaatatggccaacgcaactgttgtcaaagcagatgcagaagtagatggagaggatgctaccaagcctgaagaagaggatggtgaagtaaaatatcccccaatagtgatcaaaagcacatttcctgaggaaatgcaaagatttatgcccccaggggataacgtccacactgtcattttggatttcactcaagtcaattttattgattctgttggagtgaaaactctggcagggattgtaaaagaatatggagacgtcggtatatatgtatacttagcaggatgcagtgcacaagttgtgaatgacctcactcggaatagattttttgaaaatcctgccctatgggagctgctgttccacagcattcatgatgcagttttaggcagccaacttagagaggcacttgctgaacaggaagcctcggctcccccttcccaggaggacttggagcccaatgccactcctgccactcctgaggcatagatgaggacctcaccctaggatggggttataagcctctcatgaagttcataatttacacgttttaaatactagacgctagatttttttttctaagggtgaatactagtagtccaggcttgatttggagggtgaatgacgcctagcaagatgtattgtacttgtgtttttttaattgaatacttcaaag

SEQ ID NO: 28914 - DNA, 2242 bp, Homo sapiens
  source 1..2242: mol_type = unassigned DNA
tctcccttctcctgctctcagcctcagtgatcaaggcttcagtgaactgcactggagctcccagcgggggatcttgtcccctgtcccgacttttgtgctgcacattggatctggtgacactcaggaaatgcttgtctccggctgttaaggaataatttcagagtactatggatcatgctgaagaaaatgaaatccttgcagcaacccagaggtactatgtggaaaggcctatctttagtcatccggtcctccaggaaagactacacacaaaggacaaggttcctgattccattgcggataagctgaaacaggcattcacatgtactcctaaaaaaataagaaatatcatttatatgttcctacccataactaaatggctgccagcatacaaattcaaggaatatgtgttgggtgacttggtctcaggcataagcacaggggtgcttcagcttcctcaaggcttagcctttgcaatgctggcagctgtgcctccaatatttggcctgtactcttcattttaccctgttatcatgtattgttttcttggaacctccagacacatatccataggtccttttgctgttattagcctgatgattggtggtgtagctgttcgattagtaccagatgatatagtcattccaggaggagtaaatgcaaccaatggcacagaggccagagatgccttgagagtgaaagtcgccatgtctgtgaccttactttcaggaatcattcagttttgcctaggtgtctgtaggtttggatttgtggccatatatctcacagagcctctggtccgtgggtttaccaccgcagcagctgtgcatgtcttcacctccatgttaaaatatctgtttggagttaaaacaaagcggtacagtggaatcttttccgtggtgtatagtacagttgctgtgttgcagaatgttaaaaacctcaacgtgtgttccctaggcgtcgggctgatggtttttggtttgctgttgggtggcaaggagtttaatgagagatttaaagagaaattgccggcgcctattcctttagagttctttgcggtcgtaatgggaactggcatttcagctgggtttaacttgaaagaatcatacaatgtggatgtcgttggaacacttcctctagggctgctacctccagccaatccggacaccagcctcttccaccttgtgtacgtagatgccattgccatagccatcgttggattttcagtgaccatctccatggccaagaccttagcaaataaacatggctaccaggttgacggcaatcaggagctcattgccctgggactgtgcaattccattggctcactcttccagaccttttcaatttcatgctccttgtctcgaagccttgttcaggagggaaccggtgggaagacacagaccatctggcttaccacttttgtgtcctccttgttcctgggattggactatggtttgatcactgctgtgatcattgctctgctgactgtgatttacagaacacagaggtgaaagaaattcctggaataaaaatatttcaaataaatgcaccaatttactatgcaaatagcgacttgtatagcaatgcattaaaacgaaaggatgcagaagtagatggagaggatgctaccaagcctgaagaagaggatggtgaagtaaaatatcccccaatagtgatcaaaagcacatttcctgaggaaatgcaaagatttatgcccccaggggataacgtccacactgtcattttggatttcactcaagtcaattttattgattctgttggagtgaaaactctggcagggattgtaaaagaatatggagacgtcggtatatatgtatacttagcaggatgcagtgcacaagttgtgaatgacctcactcggaatagattttttgaaaatcctgccctatgggagctgctgttccacagcattcatgatgcagttttaggcagccaacttagagaggcacttgctgaacaggaagcctcggctcccccttcccaggaggacttggagcccaatgccactcctgccactcctgaggcatagatgaggacctcaccctaggatggggttataagcctctcatgaagttcataatttacacgttttaaatactagacgctagatttttttttctaagggtgaatactagtagtccaggcttgatttggagggtgaatgacgcctagcaagatgtattgtacttgtgtttttttaattgaatacttcaaagataaa

SEQ ID NO: 28915 - DNA, 2317 bp, Homo sapiens
  source 1..2317: mol_type = unassigned DNA
gagcgcagctggcctcacccggtcccggcgccgccttccggagcgtagcggcctctagctcgagcagcaggagcagcccgcaccggacaacttgcgagccatggggctggcggatgcgtcgggaccgagggacacacaggcactgctgtctgcaacacaagcaatggacctgcggaggcgagactaccacatggaacggccgctgctgaaccaggagcatttggaggagctggggcgctggggctcagcacctaggacccaccagtggcggacctggttgcagtgctcccgtgctcgggcctatgcccttctgctccaacacctcccggttttggtctggttaccccggtatcctgtgcgtgactggctcctgggtgacctgttatccggcctgagtgtggccatcatgcagcttccgcagggcttggcctacgccctcctggctggattgccccccgtgtttggcctctatagctccttctaccctgtcttcatctacttcctgtttggcacttcccggcacatctccgtggtgctggaggtctgctggaagctgccccagagcaaggttggcaccgtggtcactgcagctgtggctggggtggtgctcgtggtggtgaagctgttgaatgacaagctgcagcagcagctgcccatgccgatacccggggagctgctcacgctcatcggggccacaggcatctcctatggcatgggtctaaagcacagatttgaggtagatgtcgtgggcaacatccctgcagggctggtgcccccagtggcccccaacacccagctgttctcaaagctcgtgggcagcgccttcaccatcgctgtggttgggtttgccattgccatctcactggggaagatcttcgccctgaggcacggctaccgggtggacagcaaccaggagctggtggccctgggcctcagtaaccttatcggaggcatcttccagtgcttccccgtgagttgctctatgtctcggagcctggtacaggagagcaccgggggcaactcgcaggttgctggagccatctcttcccttttcatcctcctcatcattgtcaaacttggggaactcttccatgacctgcccaaggcggtcctggcagccatcatcattgtgaacctgaagggcatgctgaggcagctcagcgacatgcgctccctctggaaggccaatcgggcggatctgcttatctggctggtgaccttcacggccaccatcttgctgaacctggaccttggcttggtggttgcggtcatcttctccctgctgctcgtggtggtccggacacagatgccccactactctgtcctggggcaggtgccagacacggatatttacagagatgtggcagagtactcagaggccaaggaagtccggggggtgaaggtcttccgctcctcggccaccgtgtactttgccaatgctgagttctacagtgatgcgctgaagcagaggtgtggtgtggatgtcgacttcctcatctcccagaagaagaaactgctcaagaagcaggagcagctgaagctgaagcaactgcagaaagaggagaagcttcggaaacaggctgcctcccccaagggcgcctcagtttccattaatgtcaacaccagccttgaagacatgaggagcaacaacgttgaggactgcaagatgatggtgagctcaggagataagatggaagatgcaacagccaatggtcaagaagactccaaggccccagatgggtccacactgaaggccctgggcctgcctcagccagacttccacagcctcatcctggacctgggtgccctctcctttgtggacactgtgtgcctcaagagcctgaagaatattttccatgacttccgggagattgaggtggaggtgtacatggcggcctgccacagccctgtggtcagccagcttgaggctgggcacttcttcgatgcatccatcaccaagaagcatctctttgcctctgtccatgatgctgtcacctttgccctccaacacccgaggcctgtccccgacagccctgtttcggtcaccagactctgaacatgctacatcctgcccaagactgcacctctggaggtgcagggcacccttgagaagcccctcacccctaggccgcctccaggtgctacccaggagtcccctccatgtacacacacacaactcagggaaggaggtcctgggactccaagttcagcgctccaggtctgggacagggcctgcatgcagtcaggctggcagtggcgcggtacagggagggaactggtgcatattttagcctcaggaataaagatttgtctgctc

SEQ ID NO: 28916 - DNA, 2729 bp, Homo sapiens
  source 1..2729: mol_type = unassigned DNA
aaagaggctttctcaccagccaaagttcaggtactgcccctgtctgagtttggacatgtggcccacagatgccagctgggggctggaatactgtaccttgatcttagggcctggaaaaatcaggtaggtaactctctggtcctaggtggaggtgtaggggaggttgggccagggatgccttcactgtgtctctctggtcttgccaccccagaccgagggacacacaggcactgctgtctgcaacacaagcaatggacctgcggaggcgagactaccacatggaacggccgctgctgaaccaggagcatttggaggagctggggcgctggggctcagcacctaggacccaccagtggcggacctggttgcagtgctcccgtgctcgggcctatgcccttctgctccaacacctcccggttttggtctggttaccccggtatcctgtgcgtgactggctcctgggtgacctgttatccggcctgagtgtggccatcatgcagcttccgcagggcttggcctacgccctcctggctggattgccccccgtgtttggcctctatagctccttctaccctgtcttcatctacttcctgtttggcacttcccggcacatctccgtggggacctttgctgtcatgtctgtgatggtgggcagtgtgacagaatccctggccccgcaggccttgaacgactccatgatcaatgagacagccagagatgctgcccgggtacaggtggcctccacactcagtgtcctggttggcctcttccaggtggggctgggcctgatccacttcggcttcgtggtcacctacctgtcagaacctcttgtccgaggctataccacagctgcagctgtgcaggtcttcgtctcacagctcaagtatgtgtttggcctccatctgagcagccactctgggccactgtccctcatctatacagtgctggaggtctgctggaagctgccccagagcaaggttggcaccgtggtcactgcagctgtggctggggtggtgctcgtggtggtgaagctgttgaatgacaagctgcagcagcagctgcccatgccgatacccggggagctgctcacgctcatcggggccacaggcatctcctatggcatgggtctaaagcacagatttgaggtagatgtcgtgggcaacatccctgcagggctggtgcccccagtggcccccaacacccagctgttctcaaagctcgtgggcagcgccttcaccatcgctgtggttgggtttgccattgccatctcactggggaagatcttcgccctgaggcacggctaccgggtggacagcaaccaggagctggtggccctgggcctcagtaaccttatcggaggcatcttccagtgcttccccgtgagttgctctatgtctcggagcctggtacaggagagcaccgggggcaactcgcaggttgctggagccatctcttcccttttcatcctcctcatcattgtcaaacttggggaactcttccatgacctgcccaaggcggtcctggcagccatcatcattgtgaacctgaagggcatgctgaggcagctcagcgacatgcgctccctctggaaggccaatcgggcggatctgcttatctggctggtgaccttcacggccaccatcttgctgaacctggaccttggcttggtggttgcggtcatcttctccctgctgctcgtggtggtccggacacagatgccccactactctgtcctggggcaggtgccagacacggatatttacagagatgtggcagagtactcagaggccaaggaagtccggggggtgaaggtcttccgctcctcggccaccgtgtactttgccaatgctgagttctacagtgatgcgctgaagcagaggtgtggtgtggatgtcgacttcctcatctcccagaagaagaaactgctcaagaagcaggagcagctgaagctgaagcaactgcagaaagaggagaagcttcggaaacaggctgcctcccccaagggcgcctcagtttccattaatgtcaacaccagccttgaagacatgaggagcaacaacgttgaggactgcaagatgatgcaggtgagctcaggagataagatggaagatgcaacagccaatggtcaagaagactccaaggccccagatgggtccacactgaaggccctgggcctgcctcagccagacttccacagcctcatcctggacctgggtgccctctcctttgtggacactgtgtgcctcaagagcctgaagaatattttccatgacttccgggagattgaggtggaggtgtacatggcggcctgccacagccctgtggtcagccagcttgaggctgggcacttcttcgatgcatccatcaccaagaagcatctctttgcctctgtccatgatgctgtcacctttgccctccaacacccgaggcctgtccccgacagccctgtttcggtcaccagactctgaacatgctacatcctgcccaagactgcacctctggaggtgcagggcacccttgagaagcccctcacccctaggccgcctccaggtgctacccaggagtcccctccatgtacacacacacaactcagggaaggaggtcctgggactccaagttcagcgctccaggtctgggacagggcctgcatgcagtcaggctggcagtggcgcggtacagggagggaactggtgcatattttagcctcaggaataaagatttgtctgctc

SEQ ID NO: 28917 - DNA, 2545 bp, Homo sapiens
  source 1..2545: mol_type = unassigned DNA
ggagcgtagcggcctctagctcgagcagcaggagcagcccgcaccggacaacttgcgagccatggggctggcggatgcgtcgggaccgagggacacacaggcactgctgtctgcaacacaagcaatggacctgcggaggcgagactaccacatggaacggccgctgctgaaccaggagcatttggaggagctggggcgctggggctcagcacctaggacccaccagtggcggacctggttgcagtgctcccgtgctcgggcctatgcccttctgctccaacacctcccggttttggtctggttaccccggtatcctgtgcgtgactggctcctgggtgacctgttatccggcctgagtgtggccatcatgcagcttccgcagggcttggcctacgccctcctggctggattgccccccgtgtttggcctctatagctccttctaccctgtcttcatctacttcctgtttggcacttcccggcacatctccgtggggacctttgctgtcatgtctgtgatggtgggcagtgtgacagaatccctggccccgcaggccttgaacgactccatgatcaatgagacagccagagatgctgcccgggtacaggtggcctccacactcagtgtcctggttggcctcttccaggtggggctgggcctgatccacttcggcttcgtggtcacctacctgtcagaacctcttgtccgaggctataccacagctgcagctgtgcaggtcttcgtctcacagctcaagtatgtgtttggcctccatctgagcagccactctgggccactgtccctcatctatacagtgctggaggtctgctggaagctgccccagagcaaggttggcaccgtggtcactgcagctgtggctggggtggtgctcgtggtggtgaagctgttgaatgacaagctgcagcagcagctgcccatgccgatacccggggagctgctcacgctcatcggggccacaggcatctcctatggcatgggtctaaagcacagatttgaggtagatgtcgtgggcaacatccctgcagggctggtgcccccagtggcccccaacacccagctgttctcaaagctcgtgggcagcgccttcaccatcgctgtggttgggtttgccattgccatctcactggggaagatcttcgccctgaggcacggctaccgggtggacagcaaccaggagctggtggccctgggcctcagtaaccttatcggaggcatcttccagtgcttccccgtgagttgctctatgtctcggagcctggtacaggagagcaccgggggcaactcgcaggttgctggagccatctcttcccttttcatcctcctcatcattgtcaaacttggggaactcttccatgacctgcccaaggcggtcctggcagccatcatcattgtgaacctgaagggcatgctgaggcagctcagcgacatgcgctccctctggaaggccaatcgggcggatctgcttatctggctggtgaccttcacggccaccatcttgctgaacctggaccttggcttggtggttgcggtcatcttctccctgctgctcgtggtggtccggacacagatgccccactactctgtcctggggcaggtgccagacacggatatttacagagatgtggcagagtactcagaggccaaggaagtccggggggtgaaggtcttccgctcctcggccaccgtgtactttgccaatgctgagttctacagtgatgcgctgaagcagaggtgtggtgtggatgtcgacttcctcatctcccagaagaagaaactgctcaagaagcaggagcagctgaagctgaagcaactgcagaaagaggagaagcttcggaaacaggcagggccccttttgtctgcatgtctggctccccagcaggtgagctcaggagataagatggaagatgcaacagccaatggtcaagaagactccaaggccccagatgggtccacactgaaggccctgggcctgcctcagccagacttccacagcctcatcctggacctgggtgccctctcctttgtggacactgtgtgcctcaagagcctgaagaatattttccatgacttccgggagattgaggtggaggtgtacatggcggcctgccacagccctgtggtcagccagcttgaggctgggcacttcttcgatgcatccatcaccaagaagcatctctttgcctctgtccatgatgctgtcacctttgccctccaacacccgaggcctgtccccgacagccctgtttcggtcaccagactctgaacatgctacatcctgcccaagactgcacctctggaggtgcagggcacccttgagaagcccctcacccctaggccgcctccaggtgctacccaggagtcccctccatgtacacacacacaactcagggaaggaggtcctgggactccaagttcagcgctccaggtctgggacagggcctgcatgcagtcaggctggcagtggcgcggtacagggagggaactggtgcatattttagcctcaggaataaagatttgtctgctc

SEQ ID NO: 28918 - DNA, 2589 bp, Homo sapiens
  source 1..2589: mol_type = unassigned DNA
ctctagctcgagcagcaggagcagcccgcaccggacaacttgcgagccatggggctggcggatgcgtcgggaccgagggacacacaggcactgctgtctgcaacacaagcaatggacctgcggaggcgagactaccacatggaacggccgctgctgaaccaggagcatttggaggagctggggcgctggggctcagcacctaggacccaccagtggcggacctggttgcagtgctcccgtgctcgggcctatgcccttctgctccaacacctcccggttttggtctggttaccccggtatcctgtgcgtgactggctcctgggtgacctgttatccggcctgagtgtggccatcatgcagcttccgcagggcttggcctacgccctcctggctggattgccccccgtgtttggcctctatagctccttctaccctgtcttcatctacttcctgtttggcacttcccggcacatctccgtggggacctttgctgtcatgtctgtgatggtgggcagtgtgacagaatccctggccccgcaggccttgaacgactccatgatcaatgagacagccagagatgctgcccgggtacaggtggcctccacactcagtgtcctggttggcctcttccaggtggggctgggcctgatccacttcggcttcgtggtcacctacctgtcagaacctcttgtccgaggctataccacagctgcagctgtgcaggtcttcgtctcacagctcaagtatgtgtttggcctccatctgagcagccactctgggccactgtccctcatctatacagtgctggaggtctgctggaagctgccccagagcaaggttggcaccgtggtcactgcagctgtggctggggtggtgctcgtggtggtgaagctgttgaatgacaagctgcagcagcagctgcccatgccgatacccggggagctgctcacgctcatcggggccacaggcatctcctatggcatgggtctaaagcacagatttgaggtagatgtcgtgggcaacatccctgcagggctggtgcccccagtggcccccaacacccagctgttctcaaagctcgtgggcagcgccttcaccatcgctgtggttgggtttgccattgccatctcactggggaagatcttcgccctgaggcacggctaccgggtggacagcaaccaggagctggtggccctgggcctcagtaaccttatcggaggcatcttccagtgcttccccgtgagttgctctatgtctcggagcctggtacaggagagcaccgggggcaactcgcaggttgctggagccatctcttcccttttcatcctcctcatcattgtcaaacttggggaactcttccatgacctgcccaaggcggtcctggcagccatcatcattgtgaacctgaagggcatgctgaggcagctcagcgacatgcgctccctctggaaggccaatcgggcggatctgcttatctggctggtgaccttcacggccaccatcttgctgaacctggaccttggcttggtggttgcggtcatcttctccctgctgctcgtggtggtccggacacagatgccccactactctgtcctggggcaggtgccagacacggatatttacagagatgtggcagagtactcagaggccaaggaagtccggggggtgaaggtcttccgctcctcggccaccgtgtactttgccaatgctgagttctacagtgatgcgctgaagcagaggtgtggtgtggatgtcgacttcctcatctcccagaagaagaaactgctcaagaagcaggagcagctgaagctgaagcaactgcagaaagaggagaagcttcggaaacaggctgcctcccccaagggcgcctcagtttccattaatgtcaacaccagccttgaagacatgaggagcaacaacgttgaggactgcaagatgatgcaggtgagctcaggagataagatggaagatgcaacagccaatggtcaagaagactccaaggccccagatgggtccacactgaaggccctgggcctgcctcagccagacttccacagcctcatcctggacctgggtgccctctcctttgtggacactgtgtgcctcaagagcctgaagaatattttccatgacttccgggagattgaggtggaggtgtacatggcggcctgccacagccctgtggtcagccagcttgaggctgggcacttcttcgatgcatccatcaccaagaagcatctctttgcctctgtccatgatgctgtcacctttgccctccaacacccgaggcctgtccccgacagccctgtttcggtcaccagactctgaacatgctacatcctgcccaagactgcacctctggaggtgcagggcacccttgagaagcccctcacccctaggccgcctccaggtgctacccaggagtcccctccatgtacacacacacaactcagggaaggaggtcctgggactccaagttcagcgctccaggtctgggacagggcctgcatgcagtcaggctggcagtggcgcggtacagggagggaactggtgcatattttagcctcaggaataaagatttgtctgctc

SEQ ID NO: 28919 - DNA, 2630 bp, Homo sapiens
  source 1..2630: mol_type = unassigned DNA
ggcctcacccggtcccggcgccgccttccggagcgtagcggcctctagctcgagcagcaggagcagcccgcaccggacaacttgcgagccatggggctggcggatgcgtcgggaccgagggacacacaggcactgctgtctgcaacacaagcaatggacctgcggaggcgagactaccacatggaacggccgctgctgaaccaggagcatttggaggagctggggcgctggggctcagcacctaggacccaccagtggcggacctggttgcagtgctcccgtgctcgggcctatgcccttctgctccaacacctcccggttttggtctggttaccccggtatcctgtgcgtgactggctcctgggtgacctgttatccggcctgagtgtggccatcatgcagcttccgcagggcttggcctacgccctcctggctggattgccccccgtgtttggcctctatagctccttctaccctgtcttcatctacttcctgtttggcacttcccggcacatctccgtggggacctttgctgtcatgtctgtgatggtgggcagtgtgacagaatccctggccccgcaggccttgaacgactccatgatcaatgagacagccagagatgctgcccgggtacaggtggcctccacactcagtgtcctggttggcctcttccaggtggggctgggcctgatccacttcggcttcgtggtcacctacctgtcagaacctcttgtccgaggctataccacagctgcagctgtgcaggtcttcgtctcacagctcaagtatgtgtttggcctccatctgagcagccactctgggccactgtccctcatctatacagtgctggaggtctgctggaagctgccccagagcaaggttggcaccgtggtcactgcagctgtggctggggtggtgctcgtggtggtgaagctgttgaatgacaagctgcagcagcagctgcccatgccgatacccggggagctgctcacgctcatcggggccacaggcatctcctatggcatgggtctaaagcacagatttgaggtagatgtcgtgggcaacatccctgcagggctggtgcccccagtggcccccaacacccagctgttctcaaagctcgtgggcagcgccttcaccatcgctgtggttgggtttgccattgccatctcactggggaagatcttcgccctgaggcacggctaccgggtggacagcaaccaggagctggtggccctgggcctcagtaaccttatcggaggcatcttccagtgcttccccgtgagttgctctatgtctcggagcctggtacaggagagcaccgggggcaactcgcaggttgctggagccatctcttcccttttcatcctcctcatcattgtcaaacttggggaactcttccatgacctgcccaaggcggtcctggcagccatcatcattgtgaacctgaagggcatgctgaggcagctcagcgacatgcgctccctctggaaggccaatcgggcggatctgcttatctggctggtgaccttcacggccaccatcttgctgaacctggaccttggcttggtggttgcggtcatcttctccctgctgctcgtggtggtccggacacagatgccccactactctgtcctggggcaggtgccagacacggatatttacagagatgtggcagagtactcagaggccaaggaagtccggggggtgaaggtcttccgctcctcggccaccgtgtactttgccaatgctgagttctacagtgatgcgctgaagcagaggtgtggtgtggatgtcgacttcctcatctcccagaagaagaaactgctcaagaagcaggagcagctgaagctgaagcaactgcagaaagaggagaagcttcggaaacaggctgcctcccccaagggcgcctcagtttccattaatgtcaacaccagccttgaagacatgaggagcaacaacgttgaggactgcaagatgatggtgagctcaggagataagatggaagatgcaacagccaatggtcaagaagactccaaggccccagatgggtccacactgaaggccctgggcctgcctcagccagacttccacagcctcatcctggacctgggtgccctctcctttgtggacactgtgtgcctcaagagcctgaagaatattttccatgacttccgggagattgaggtggaggtgtacatggcggcctgccacagccctgtggtcagccagcttgaggctgggcacttcttcgatgcatccatcaccaagaagcatctctttgcctctgtccatgatgctgtcacctttgccctccaacacccgaggcctgtccccgacagccctgtttcggtcaccagactctgaacatgctacatcctgcccaagactgcacctctggaggtgcagggcacccttgagaagcccctcacccctaggccgcctccaggtgctacccaggagtcccctccatgtacacacacacaactcagggaaggaggtcctgggactccaagttcagcgctccaggtctgggacagggcctgcatgcagtcaggctggcagtggcgcggtacagggagggaactggtgcatattttagcctcaggaataaagatttgtctgctcaa

SEQ ID NO: 28920 - DNA, 2584 bp, Homo sapiens
  source 1..2584: mol_type = unassigned DNA
ggagcgtagcggcctctagctcgagcagcaggagcagcccgcaccggacaacttgcgagccatggggctggcggatgcgtcgggaccgagggacacacaggcactgctgtctgcaacacaagcaatggacctgcggaggcgagactaccacatggaacggccgctgctgaaccaggagcatttggaggagctggggcgctggggctcagcacctaggacccaccagtggcggacctggttgcagtgctcccgtgctcgggcctatgcccttctgctccaacacctcccggttttggtctggttaccccggtatcctgtgcgtgactggctcctgggtgacctgttatccggcctgagtgtggccatcatgcagcttccgcaggatctgctctccaggctgcactgctaccattctaccctaggcttggcctacgccctcctggctggattgccccccgtgtttggcctctatagctccttctaccctgtcttcatctacttcctgtttggcacttcccggcacatctccgtggggacctttgctgtcatgtctgtgatggtgggcagtgtgacagaatccctggccccgcaggccttgaacgactccatgatcaatgagacagccagagatgctgcccgggtacaggtggcctccacactcagtgtcctggttggcctcttccaggtggggctgggcctgatccacttcggcttcgtggtcacctacctgtcagaacctcttgtccgaggctataccacagctgcagctgtgcaggtcttcgtctcacagctcaagtatgtgtttggcctccatctgagcagccactctgggccactgtccctcatctatacagtgctggaggtctgctggaagctgccccagagcaaggttggcaccgtggtcactgcagctgtggctggggtggtgctcgtggtggtgaagctgttgaatgacaagctgcagcagcagctgcccatgccgatacccggggagctgctcacgctcatcggggccacaggcatctcctatggcatgggtctaaagcacagatttgaggtagatgtcgtgggcaacatccctgcagggctggtgcccccagtggcccccaacacccagctgttctcaaagctcgtgggcagcgccttcaccatcgctgtggttgggtttgccattgccatctcactggggaagatcttcgccctgaggcacggctaccgggtggacagcaaccaggagctggtggccctgggcctcagtaaccttatcggaggcatcttccagtgcttccccgtgagttgctctatgtctcggagcctggtacaggagagcaccgggggcaactcgcaggttgctggagccatctcttcccttttcatcctcctcatcattgtcaaacttggggaactcttccatgacctgcccaaggcggtcctggcagccatcatcattgtgaacctgaagggcatgctgaggcagctcagcgacatgcgctccctctggaaggccaatcgggcggatctgcttatctggctggtgaccttcacggccaccatcttgctgaacctggaccttggcttggtggttgcggtcatcttctccctgctgctcgtggtggtccggacacagatgccccactactctgtcctggggcaggtgccagacacggatatttacagagatgtggcagagtactcagaggccaaggaagtccggggggtgaaggtcttccgctcctcggccaccgtgtactttgccaatgctgagttctacagtgatgcgctgaagcagaggtgtggtgtggatgtcgacttcctcatctcccagaagaagaaactgctcaagaagcaggagcagctgaagctgaagcaactgcagaaagaggagaagcttcggaaacaggcagggccccttttgtctgcatgtctggctccccagcaggtgagctcaggagataagatggaagatgcaacagccaatggtcaagaagactccaaggccccagatgggtccacactgaaggccctgggcctgcctcagccagacttccacagcctcatcctggacctgggtgccctctcctttgtggacactgtgtgcctcaagagcctgaagaatattttccatgacttccgggagattgaggtggaggtgtacatggcggcctgccacagccctgtggtcagccagcttgaggctgggcacttcttcgatgcatccatcaccaagaagcatctctttgcctctgtccatgatgctgtcacctttgccctccaacacccgaggcctgtccccgacagccctgtttcggtcaccagactctgaacatgctacatcctgcccaagactgcacctctggaggtgcagggcacccttgagaagcccctcacccctaggccgcctccaggtgctacccaggagtcccctccatgtacacacacacaactcagggaaggaggtcctgggactccaagttcagcgctccaggtctgggacagggcctgcatgcagtcaggctggcagtggcgcggtacagggagggaactggtgcatattttagcctcaggaataaagatttgtctgctc

SEQ ID NO: 28921 - DNA, 2460 bp, Homo sapiens
  source 1..2460: mol_type = unassigned DNA
ctctagctcgagcagcaggagcagcccgcaccggacaacttgcgagccatggggctggcggatgcgtcgggaccgagggacacacaggcactgctgtctgcaacacaagcaatggacctgcggaggcgagactaccacatggaacggccgctgctgaaccaggagcatttggaggagctggggcgctggggctcagcacctaggacccaccagtggcggacctggttgcagtgctcccgtgctcgggcctatgcccttctgctccaacacctcccggttttggtctggttaccccggtatcctgtgcgtgactggctcctgggtgacctgttatccggcctgagtgtggccatcatgcagcttccgcagggcttggcctacgccctcctggctggattgccccccgtgtttggcctctatagctccttctaccctgtcttcatctacttcctgtttggcacttcccggcacatctccgtggcaaccccaggacccctgcctctcctgactgcccctggccgccccacaggtggggctgggcctgatccacttcggcttcgtggtcacctacctgtcagaacctcttgtccgaggctataccacagctgcagctgtgcaggtcttcgtctcacagctcaagtatgtgtttggcctccatctgagcagccactctgggccactgtccctcatctattgctggaggtctgctggaagctgccccagagcaaggttggcaccgtggtcactgcagctgtggctggggtggtgctcgtggtggtgaagctgttgaatgacaagctgcagcagcagctgcccatgccgatacccggggagctgctcacgctcatcggggccacaggcatctcctatggcatgggtctaaagcacagatttgaggtagatgtcgtgggcaacatccctgcagggctggtgcccccagtggcccccaacacccagctgttctcaaagctcgtgggcagcgccttcaccatcgctgtggttgggtttgccattgccatctcactggggaagatcttcgccctgaggcacggctaccgggtggacagcaaccaggagctggtggccctgggcctcagtaaccttatcggaggcatcttccagtgcttccccgtgagttgctctatgtctcggagcctggtacaggagagcaccgggggcaactcgcaggttgctggagccatctcttcccttttcatcctcctcatcattgtcaaacttggggaactcttccatgacctgcccaaggcggtcctggcagccatcatcattgtgaacctgaagggcatgctgaggcagctcagcgacatgcgctccctctggaaggccaatcgggcggatctgcttatctggctggtgaccttcacggccaccatcttgctgaacctggaccttggcttggtggttgcggtcatcttctccctgctgctcgtggtggtccggacacagatgccccactactctgtcctggggcaggtgccagacacggatatttacagagatgtggcagagtactcagaggccaaggaagtccggggggtgaaggtcttccgctcctcggccaccgtgtactttgccaatgctgagttctacagtgatgcgctgaagcagaggtgtggtgtggatgtcgacttcctcatctcccagaagaagaaactgctcaagaagcaggagcagctgaagctgaagcaactgcagaaagaggagaagcttcggaaacaggctgcctcccccaagggcgcctcagtttccattaatgtcaacaccagccttgaagacatgaggagcaacaacgttgaggactgcaagatgatgcaggtgagctcaggagataagatggaagatgcaacagccaatggtcaagaagactccaaggccccagatgggtccacactgaaggccctgggcctgcctcagccagacttccacagcctcatcctggacctgggtgccctctcctttgtggacactgtgtgcctcaagagcctgaagaatattttccatgacttccgggagattgaggtggaggtgtacatggcggcctgccacagccctgtggtcagccagcttgaggctgggcacttcttcgatgcatccatcaccaagaagcatctctttgcctctgtccatgatgctgtcacctttgccctccaacacccgaggcctgtccccgacagccctgtttcggtcaccagactctgaacatgctacatcctgcccaagactgcacctctggaggtgcagggcacccttgagaagcccctcacccctaggccgcctccaggtgctacccaggagtcccctccatgtacacacacacaactcagggaaggaggtcctgggactccaagttcagcgctccaggtctgggacagggcctgcatgcagtcaggctggcagtggcgcggtacagggagggaactggtgcatattttagcctca

SEQ ID NO: 28922 - DNA, 3547 bp, Homo sapiens
  source 1..3547: mol_type = unassigned DNA
ggggcggggctggagcggcccgcggcctcagctctctctgcttccccaggatgcgggctccgggtgcgggcgcggcctcggtggtctcgctggcgctgttgtggctgctggggctgccgtggacctggagcgcggcagcggcgctcggcgtgtacgtgggcagcggcggctggcgcttcctgcgcatcgtctgcaagaccgcgaggcgagacctcttcggtctctctgtgctgatccgcgtgcgcctggagctgcggcggcaccagcgtgccggccacaccatcccgcgcatctttcaggcggtagtgcagcgacagcccgagcgcctggcgctggtggatgccgggaccggcgagtgctggacctttgcgcagctggacgcctactccaatgcggtagccaacctcttccgccagctgggcttcgcgccgggcgacgtggtggccatcttcctggagggccggccggagttcgtggggctgtggctgggcctggccaaggcgggcatggaggccgcgctgctcaacgtgaacctgcggcgcgagcccctggccttctgcctgggcacctcgggcgctaaggccctgatctttggaggagaaatggtggcggcggtggccgaagtgagcgggcatctggggaaaagtttgatcaagttctgctctggagacttggggcccgagggcatcttgccggacacccacctcctggacccgctgctgaaggaggcctctactgcccccttggcacagatccccagcaagggcatggacgatcgtcttttctacatctacacgtcggggaccaccgggctgcccaaggctgccattgtcgtgcacagcaggtactaccgcatggcagccttcggccaccacgcctaccgcatgcaggcggctgacgtgctctatgactgcctgcccctgtaccactcggcaggaaacatcatcggcgtggggcagtgtctcatctatgggctgacagtcgtcctccgcaagaaattctcggccagccgcttctgggacgactgcatcaagtacaactgcacggtggttcagtacatcggggagatctgccgctacctgctgaagcagccggtgcgcgaggcggagaggcgacaccgcgtgcgcctggcggtggggaacgggctgcgtcctgccatctgggaggagttcacggagcgcttcggcgtacgccaaatcggggagttctacggcgccaccgagtgcaactgcagcattgccaacatggacggcaaggtcggctcctgtggtttcaacagccgcatcctgccccacgtgtaccccatccggctggtgaaggtcaatgaggacacaatggagctgctgcgggatgcccagggcctctgcatcccctgccaggccggggagcctggcctccttgtgggtcagatcaaccaacaggacccgctgcgccgcttcgatggctatgtcagcgagagcgccaccagcaagaagatcgcccacagcgtcttcagcaagggcgacagcgcctacctctcaggtgacgtgctagtgatggatgagctgggctacatgtacttccgggaccgtagcggggacaccttccgctggcgaggggagaacgtctccaccaccgaggtggagggcgtgctgagccgcctgctgggccagacagacgtggccgtctatggggtggctgttccaggagtggagggtaaggcagggatggcggccgtcgcagacccccacagcctgctggaccccaacgcgatataccaggagctgcagaaggtgctggcaccctatgcccggcccatcttcctgcgcctcctgccccaggtggacaccacaggcaccttcaagatccagaagacgaggctgcagcgagagggctttgacccacgccagacctcagaccggctcttcttcctggacctgaagcagggccactacctgcccttaaatgaggcagtctacactcgcatctgctcgggcgccttcgccctctgaagctgttcctctactggccacaaactctgggcctggtgggagaggccagcttgagccagacagcgctgcccaggggtggccgcctagtacacacccacctggccgagctgtacctggcacggcccatcctggactgagaaactggaacctcagaggaacccgtgcctctctgctgccttggtgcccctgtgtctgcctcctctccctgcttttcagcctctgtctccttccatccctgtccctgtctggccttaactcttccctctttttcttttctttctttctttcttttttttttaagatagagtctcactctgctgcccgggctagagtgcagtggtgggatctcggctcactgcaacctctgcctcctggggttcaagtgatcctcccacctcagcctcctgagtagctgggattacaggcacccgccaccacgtccagctaatttttatatttttagtagagacggggtttcaccatgttggtcaggttggtcttgaactcctgacctcaggtgatccgctggcctcggcctcccagagtgctgggattataggcgtgagcctctggcccggcctttcctttttcctctcctctcctgccgagagtggaacacgcgtgtcctgggagctgcatcttgtgtagggtccagctgcttttggggactgcaggaatcatctcccctgggccctggactcggactggggcctccccacctccctctcggctgtgccttacggagccccgatccaggcctcctgtggctgttgggttccagatgctgcagctccatgtgacttccaagcaggccctccgccctccctgctgaatggaggagccgggggtcccccaggccaactggaaaatctcccaggctaggccaattgccttttgcacttccccgttcctgtcacatttccccagccccaccttcccctcctgatgccctgaaagcttccggaattgactgtgaccacttggatgtcaccactgtcagcccctgccttgatgtccccatttagccatctccatggagctcctgctggagggccctgaaccctgcactgcgtggctgcccagccagctgcctcctgtcctgggaggaggcctcctgggtgtcctcatctggtgtgtctactggagggtcccacaggagaggcagcagaggggtcaggggaggtctcctgccgggggttggcctctcaagcctcaggggttctagcctgttgaatataccccacctggtggtggcccctccgatgtccccactgatggctctgacaccgtgttggtggcgatgtcccagacaatcccaccaggacggcccagacatccctactggcttcgctggtggctcatctcgaacatccacgccagcctttctggggccggccacccaggccgcctgtccgtctgtcctccctccagcagcaccccctggcccctggagtggtggggccatggcaagagacaccgtggcgtctcatgtgaactttcctgggcactgtggttttatttcctaattgatttaagaaataaacctgaagaccgtc

SEQ ID NO: 28923 - DNA, 723 bp, Homo sapiens
  source 1..723: mol_type = unassigned DNA
ccggagttcgtggggctgtggctgggcctggccaaggcgggcatggaggccgcgctgctcaacgtgaacctgcggcgcgagcccctggccttctgcctgggcacctcgggcgctaaggccctgatctttggaggagaaatggtggcggcggtggccgaagtgagcgggcatctggggaaaagtttgatcaagttctgctctggagacttggggcccgagggcatcttgccggacacccacctcctggacccgctgctgaaggaggcctctactgcccccttggcacagatccccagcaagggcatggacgatcgtcttttctacatctacacgtcggggaccaccgggctgcccaaggctgccattgtcgtgcacagcaggtactaccgcatggcagccttcggccaccacgcctaccgcatgcaggcggctgacgtgctctatgactgcctgcccctgtaccactcggcaggaaacatcatcggcgtggggcagtgtctcatctatgggctgacagtcgtcctccgcaagaaattctcggccagccgcttctgggacgactgcatcaagtacaactgcacgtggcacggcccatcctggactgagaaactggaacctcagaggaacccgtgcctctctgctgccttggtgcccctgtgtctgcctcctctccctgcttttcagcctctgtctccttccatccctgtccctgtctggccttaa

SEQ ID NO: 28924 - DNA, 2184 bp, Homo sapiens
  source 1..2184: mol_type = unassigned DNA
aacgctggaaaggtcggccaaggagagcagaaaacaagcagtggtggagtcggcagtggggcagaggagggggagctggaagggaaggaccccaaagcagaagcccgcacagtaggcacagcgcacccaagaagggtccaggagtctgcagaaacagaaaggtccccggcctcagcctcctagtccctgcctgcctcctgcctgagcttctgggagactgaaggcacggcttgcagcttcaggatgcgggctccgggtgcgggcgcggcctcggtggtctcgctggcgctgttgtggctgctggggctgccgtggacctggagcgcggcagcggcgctcggcgtgtacgtgggcagcggcggctggcgcttcctgcgcatcgtctgcaagaccgcgaggcgagacctcttcggtctctctgtgctgatccgcgtgcgcctggagctgcggcggcaccagcgtgccggccacaccatcccgcgcatctttcaggcggtagtgcagcgacagcccgagcgcctggcgctggtggatgccgggaccggcgagtgctggacctttgcgcagctggacgcctactccaatgcggtagccaacctcttccgccagctgggcttcgcgccgggcgacgtggtggccatcttcctggagggccggccggagttcgtggggctgtggctgggcctggccaaggcgggcatggaggccgcgctgctcaacgtgaacctgcggcgcgagcccctggccttctgcctgggcacctcgggcgctaaggccctgatctttggaggagaaatggtggcggcggtggccgaagtgagcgggcatctggggaaaagtttgatcaagttctgctctggagacttggggcccgagggcatcttgccggacacccacctcctggacccgctgctgaaggaggcctctactgcccccttggcacagatccccagcaagggcatggacgatcgtcttttctacatctacacgtcggggaccaccgggctgcccaaggctgccattgtcgtgcacagcaggtactaccgcatggcagccttcggccaccacgcctaccgcatgcaggcggctgacgtgctctatgactgcctgcccctgtaccactcggcaggaaacatcatcggcgtggggcagtgtctcatctatgggctgacagtcgtcctccgcaagaaattctcggccagccgcttctgggacgactgcatcaagtacaactgcacggtggttcagtacatcggggagatctgccgctacctgctgaagcagccggtgcgcgaggcggagaggcgacaccgcgtgcgcctggcggtggggaacgggctgcgtcctgccatctgggaggagttcacggagcgcttcggcgtacgccaaatcggggagttctacggcgccaccgagtgcaactgcagcattgccaacatggacggcaaggtcggctcctgtggtttcaacagccgcatcctgccccacgtgtaccccatccggctggtgaaggtcaatgaggacacaatggagctgctgcgggatgcccagggcctctgcatcccctgccaggccggggagcctggcctccttgtgggtcagatcaaccaacaggacccgctgcgccgcttcgatggctatgtcagcgagagcgccaccagcaagaagatcgcccacagcgtcttcagcaagggcgacagcgcctacctctcaggtgacgtgctagtgatggatgagctgggctacatgtacttccgggaccgtagcggggacaccttccgctggcgaggggagaacgtctccaccaccgaggtggagggcgtgctgagccgcctgctgggccagacagacgtggccgtctatggggtggctgttccaggagtggagggtaaggcagggatggcggccgtcgcagacccccacagcctgctggaccccaacgcgatataccaggagctgcagaaggtgctggcaccctatgcccggcccatcttcctgcgcctcctgccccaggtggacaccacaggcaccttcaagatccagaagacgaggctgcagcgagagggctttgacccacgccagacctcagaccggctcttcttcctggacctgaagcagggccactacctgcccttaaatgaggcagtctacactcgcatctgctcgggcgccttcgccctctga

SEQ ID NO: 28925 - DNA, 2394 bp, Homo sapiens
  source 1..2394: mol_type = unassigned DNA
agtcctgcccggaacccccggcaacgcgcatacgactacacctgctccggagcccgcggcggtacctgcagcggaggagctctgtcttccccttcatctcacgcgagcccggcgtcccgccgcgtgcgccccggcgcagcccgccagtccgcccggagcccgcccagtcgccgcgctgcacgcccggggtgaaccctctgccctcgctgggacagagggccccgcagccgtcatgctttccgccatctacacagtcctggcgggactgctgttcctgccgctcctggtgaacctctgctgcccatacttcttccaggacataggctacttcttgaaggtggccgccgtgggccggagggtgcgcagctacgggaagcggcggccggcgcgcaccatcctgcgggcgttcctggagaaagcgcgccagacgccacacaagccttttctgctcttccgcgacgagactctcacctacgcgcaggtggaccggcgcagcaatcaagtggcccgggcgctgcacgaccacctcggcctgcgccagggagactgcgtggcgctccttatgggtaacgagccggcctacgtgtggctgtggctggggctggtgaagctgggctgtgccatggcgtgcctcaattacaacatccgcgcgaagtccctgctgcactgcttccagtgctgcggggcgaaggtgctgctggtgtcgccagaactacaagcagctgtcgaagagatactgccaagccttaaaaaagatgatgtgtccatctattatgtgagcagaacttctaacacagatgggattgactctttcctggacaaagtggatgaagtatcaactgaacctatcccagagtcatggaggtctgaagtcactttttccactcctgccttatacatttatacttctggaaccacaggtcttccaaaagcagccatgatcactcatcagcgcatatggtatggaactggcctcacttttgtaagcggattgaaggcagatgatgtcatctatatcactctgcccttttaccacagtgctgcactactgattggcattcacggatgtattgtggctggtgctactcttgccttgcggactaaattttcagccagccagttttgggatgactgcagaaaatacaacgtcactgtcattcagtatatcggtgaactgcttcggtatttatgcaactcaccacagaaaccaaatgaccgtgatcataaagtgagactggcactgggaaatggcttacgaggagatgtgtggagacaatttgtcaagagatttggggacatatgcatctatgagttctatgctgccactgaaggcaatattggatttatgaattatgcgagaaaagttggtgctgttggaagagtaaactacctacagaaaaaaatcataacttatgacctgattaaatatgatgtggagaaagatgaacctgtccgtgatgaaaatggatattgcgtcagagttcccaaaggtgaagttggacttctggtttgcaaaatcacacaacttacaccatttaatggctatgctggagcaaaggctcagacagagaagaaaaaactgagagatgtctttaagaaaggagacctctatttcaacagtggagatctcttaatggttgaccatgaaaatttcatctatttccacgacagagttggagatacattccggtggaaaggggaaaatgtggccaccactgaagttgctgatacagttggactggttgattttgtccaagaagtaaatgtttatggagtgcatgtgccagatcatgagggtcgcattggcatggcctccatcaaaatgaaagaaaaccatgaatttgatggaaagaaactctttcagcacattgctgattacctacctagttatgcaaggccccggtttctaagaatacaggacaccattgagatcactggaacttttaaacaccgcaaaatgaccctggtggaggagggctttaaccctgctgtcatcaaagatgccttgtatttcttggatgacacagcaaaaatgtatgtgcctatgactgaggacatctataatgccataagtgctaaaaccctgaaactctgaatattcccaggaggataactcaacatttccagaaagaaactgaatggacagccacttgatataatccaactttaatttgattgaagattgtgaggaaattttgtaggaaatttgcatacccgtaaagggagacttttttaaataacagttgagtctttgcaagtaaaaagatttagagattattatttttcagtgtgcacctactgtttgtatttgcaaactgagcttgttggagggaaggcattattttttaaaatacttagtaaattaaatgaacaccaacatgtgagatggcactg

SEQ ID NO: 28926 - DNA, 2181 bp, Homo sapiens
  source 1..2181: mol_type = unassigned DNA
acacctgctccggagcccgcggcggtacctgcagcggaggagctctgtcttccccttcatctcacgcgagcccggcgtcccgccgcgtgcgccccggcgcagcccgccagtccgcccggagcccgcccagtcgccgcgctgcacgcccggggtgaaccctctgccctcgctgggacagagggccccgcagccgtcatgctttccgccatctacacagtcctggcgggactgctgttcctgccgctcctggtgaacctctgctgcccatacttcttccaggacataggctacttcttgaaggtggccgccgtgggccggagggtgcgcagctacgggaagcggcggccggcgcgcaccatcctgcgggcgttcctggagaaagcgcgccagacgccacacaagccttttctgctcttccgcgacgagactctcacctacgcgcaggtggaccggcgcagcaatcaagtggcccgggcgctgcacgaccacctcggcctgcgccagggagactgcgtggcgctccttatgggtaacgagccggcctacgtgtggctgtggctggggctggtgaagctgggctgtgccatggcgtgcctcaattacaacatccgcgcgaagtccctgctgcactgcttccagtgctgcggggcgaaggtgctgctggtgtcgccagaactacaagcagctgtcgaagagatactgccaagccttaaaaaagatgatgtgtccatctattatgtgagcagaacttctaacacagatgggattgactctttcctggacaaagtggatgaagtatcaactgaacctatcccagagtcatggaggtctgaagtcactttttccactcctgccttatacatttatacttctggaaccacaggtgctactcttgccttgcggactaaattttcagccagccagttttgggatgactgcagaaaatacaacgtcactgtcattcagtatatcggtgaactgcttcggtatttatgcaactcaccacagaaaccaaatgaccgtgatcataaagtgagactggcactgggaaatggcttacgaggagatgtgtggagacaatttgtcaagagatttggggacatatgcatctatgagttctatgctgccactgaaggcaatattggatttatgaattatgcgagaaaagttggtgctgttggaagagtaaactacctacagaaaaaaatcataacttatgacctgattaaatatgatgtggagaaagatgaacctgtccgtgatgaaaatggatattgcgtcagagttcccaaaggtgaagttggacttctggtttgcaaaatcacacaacttacaccatttaatggctatgctggagcaaaggctcagacagagaagaaaaaactgagagatgtctttaagaaaggagacctctatttcaacagtggagatctcttaatggttgaccatgaaaatttcatctatttccacgacagagttggagatacattccggtggaaaggggaaaatgtggccaccactgaagttgctgatacagttggactggttgattttgtccaagaagtaaatgtttatggagtgcatgtgccagatcatgagggtcgcattggcatggcctccatcaaaatgaaagaaaaccatgaatttgatggaaagaaactctttcagcacattgctgattacctacctagttatgcaaggccccggtttctaagaatacaggacaccattgagatcactggaacttttaaacaccgcaaaatgaccctggtggaggagggctttaaccctgctgtcatcaaagatgccttgtatttcttggatgacacagcaaaaatgtatgtgcctatgactgaggacatctataatgccataagtgctaaaaccctgaaactctgaatattcccaggaggataactcaacatttccagaaagaaactgaatggacagccacttgatataatccaactttaatttgattgaagattgtgaggaaattttgtaggaaatttgcatacccgtaaagggagacttttttaaataacagttgagtctttgcaagtaaaaagatttagagattattatttttcagtgtgcacctactgtttgtatttgcaaactgagcttgttggagggaaggcattattttttaaaatacttagtaaattaaatgaacaccaa

SEQ ID NO: 28927 - DNA, 3351 bp, Homo sapiens
  source 1..3351: mol_type = unassigned DNA
aaaaggtctgtcatcctccagttgaagtctgtgtgcctaccaagaatggccggaggactcgctgcttgacgggagggatgctccagcttggtctccagggacaactgtacctggagataaagtctggataccagggagggacagagatgctcttccttccacagtgtggccacttgctgggccatgtgaaccagcagaggagagttccttggctatgctgttgttcccccgctgtccagggagaatggaggtggactgaggagtgaagtttgggcgaactgcacagagctgctcctcttcaccccgaaaatttgtctttttacagaatccaggttctcccctccctcatcactgctgttgcttcctttgaaagtctaaaccactggaggcttctttttccttcctctctccttccccagtttcctctgtcccaattaaaaccaggatggagagcatttgctggctggccccaattattgtacccttgcccaaagggaggggcctctgtcgtgacccctcagaaatctggcagtctgggtttccacctttcccctatttaactctcagcccccacccatcccctggggttgcggctggcaggccgggacttgcagaaccaaatgggccaggggccaagttcattcttttgggagagagcaatggtaccttcccttaacgggaaaacgagaaatattgaggggaagatggactgcgatccaaacgccctggctctcaggcctggactctagggcttagccagatgcctaaaccgcccaagccgagaaacaacttagaagacagacataaccctgggattcagggaaggcgcgagcaccgcccaggacctggtagggtgcgagccgcgagcagtccgggagggagcgcgcctagggcggagcgtaggctgtggggggagggctgggagtccggggccgccccacacccgcactcctcccgggtttctgctctccgcccgtgtggagtggtgggggcctgggtgggaatgggcgtgtgccagcgcacgcgcgctccctggaaggagaagtctcagctagaacgagcggccctaggttttcggaagggaggatcagggatgtttgcgagcggctggaaccagacggtgccgatagaggaagcgggctccatggctgccctcctgctgctgcccctgctgctgttgctaccgctgctgctgctgaagctacacctctggccgcagttgcgctggcttccggcggacttggcctttgcggtgcgagctctgtgctgcaaaagggctcttcgagctcgcgccctggccgcggctgccgccgacccggaaggtcccgaggggggctgcagcctggcctggcgcctcgcggaactggcccagcagcgcgccgcgcacacctttctcattcacggctcgcggcgctttagctactcagaggcggagcgcgagagtaacagggctgcacgcgccttcctacgtgcgctaggctgggactggggacccgacggcggcgacagcggcgaggggagcgctggagaaggcgagcgggcagcgccgggagccggagatgcagcggccggaagcggcgcggagtttgccggaggggacggtgccgccagaggtggaggagccgccgcccctctgtcacctggagcaactgtggcgctgctcctccccgctggcccagagtttctgtggctctggttcgggctggccaaggccggcctgcgcactgcctttgtgcccaccgccctgcgccggggccccctgctgcactgcctccgcagctgcggcgcgcgcgcgctggtgctggcgccagagtttctggagtccctggagccggacctgcccgccctgagagccatggggctccacctgtgggctgcaggcccaggaacccaccctgctggaattagcgatttgctggctgaagtgtccgctgaagtggatgggccagtgccaggatacctctcttccccccagagcataacagacacgtgcctgtacatcttcacctctggcaccacgggcctccccaaggctgctcggatcagtcatctgaagatcctgcaatgccagggcttctatcagctgtgtggtgtccaccaggaagatgtgatctacctcgccctcccactctaccacatgtccggttccctgctgggcatcgtgggctgcatgggcattggggccacagtggtgctgaaatccaagttctcggctggtcagttctgggaagattgccagcagcacagggtgacggtgttccagtacattggggagctgtgccgataccttgtcaaccagcccccgagcaaggcagaacgtggccataaggtccggctggcagtgggcagcgggctgcgcccagatacctgggagcgttttgtgcggcgcttcgggcccctgcaggtgctggagacatatggactgacagagggcaacgtggccaccatcaactacacaggacagcggggcgctgtggggcgtgcttcctggctttacaagcatatcttccccttctccttgattcgctatgatgtcaccacaggagagccaattcgggacccccaggggcactgtatggccacatctccaggtgagccagggctgctggtggccccggtaagccagcagtccccattcctgggctatgctggcgggccagagctggcccaggggaagttgctaaaggatgtcttccggcctggggatgttttcttcaacactggggacctgctggtctgcgatgaccaaggttttctccgcttccatgatcgtactggagacaccttcaggtggaagggggagaatgtggccacaaccgaggtggcagaggtcttcgaggccctagattttcttcaggaggtgaacgtctatggagtcactgtgccagggcatgaaggcagggctggaatggcagccctagttctgcgtcccccccacgctttggaccttatgcagctctacacccacgtgtctgagaacttgccaccttatgcccggccccgattcctcaggctccaggagtctttggccaccacagagaccttcaaacagcagaaagttcggatggcaaatgagggcttcgaccccagcaccctgtctgacccactgtacgttctggaccaggctgtaggtgcctacctgcccctcacaactgcccggtacagcgccctcctggcaggaaaccttcgaatctgagaacttccacacctgaggcacctgagagaggaactctgtggggtgggggccgttgcaggtgtactgggctgtcagggatcttttctataccagaactgcggtcactattttgtaataaatgtggctggagctgatccagctgtctctgacctaca

SEQ ID NO: 28928 - DNA, 2410 bp, Homo sapiens
  source 1..2410: mol_type = unassigned DNA
cacacccgcactcctcccgggtttctgctctccgcccgtgtggagtggtgggggcctgggtgggaatgggcgtgtgccagcgcacgcgcgctccctggaaggagaagtctcagctagaacgagcggccctaggttttcggaagggaggatcagggatgtttgcgagcggctggaaccagacggtgccgatagaggaagcgggctccatggctgccctcctgctgctgcccctgctgctgttgctaccgctgctgctgctgaagctacacctctggccgcagttgcgctggcttccggcggacttggcctttgcggtgcgagctctgtgctgcaaaagggctcttcgagctcgcgccctggccgcggctgccgccgacccggaaggtcccgaggggggctgcagcctggcctggcgcctcgcggaactggcccagcagcgcgccgcgcacacctttctcattcacggctcgcggcgctttagctactcagaggcggagcgcgagagtaacagggctgcacgcgccttcctacgtgcgctaggctgggactggggacccgacggcggcgacagcggcgaggggagcgctggagaaggcgagcgggcagcgccgggagccggagatgcagcggccggaagcggcgcggagtttgccggaggggacggtgccgccagaggtggaggagccgccgcccctctgtcacctggagcaactgtggcgctgctcctccccgctggcccagagtttctgtggctctggttcgggctggccaaggccggcctgcgcactgcctttgtgcccaccgccctgcgccggggccccctgctgcactgcctccgcagctgcggcgcgcgcgcgctggtgctggcgccagagtttctggagtccctggagccggacctgcccgccctgagagccatggggctccacctgtgggctgcaggcccaggaacccaccctgctggaattagcgatttgctggctgaagtgtccgctgaagtggatgggccagtgccaggatacctctcttccccccagagcataacagacacgtgcctgtacatcttcacctctggcaccacgggcctccccaaggctgctcggatcagtcatctgaagatcctgcaatgccagggcttctatcagctgtgtggtgtccaccaggaagatgtgatctacctcgccctcccactctaccacatgtccggttccctgctgggcatcgtgggctgcatgggcattggggccacagtggtgctgaaatccaagttctcggctggtcagttctgggaagattgccagcagcacagggtgacggtgttccagtacattggggagctgtgccgataccttgtcaaccagcccccgagcaaggcagaacgtggccataaggtccggctggcagtgggcagcgggctgcgcccagatacctgggagcgttttgtgcggcgcttcgggcccctgcaggtgctggagacatatggactgacagagggcaacgtggccaccatcaactacacaggacagcggggcgctgtggggcgtgcttcctggctttacaagcatatcttccccttctccttgattcgctatgatgtcaccacaggagagccaattcgggacccccaggggcactgtatggccacatctccaggtgagccagggctgctggtggccccggtaagccagcagtccccattcctgggctatgctggcgggccagagctggcccaggggaagttgctaaaggatgtcttccggcctggggatgttttcttcaacactggggacctgctggtctgcgatgaccaaggttttctccgcttccatgatcgtactggagacaccttcaggtggaagggggagaatgtggccacaaccgaggtggcagaggtcttcgaggccctagattttcttcaggaggtgaacgtctatggagtcactgtgccagggcatgaaggcagggctggaatggcagccctagttctgcgtcccccccacgctttggaccttatgcagctctacacccacgtgtctgagaacttgccaccttatgcccggccccgattcctcaggctccaggagtctttggccaccacagagaccttcaaacagcagaaagttcggatggcaaatgagggcttcgaccccagcaccctgtctgacccactgtacgttctggaccaggctgtaggtgcctacctgcccctcacaactgcccggtacagcgccctcctggcaggaaaccttcgaatctgagaacttccacacctgaggcacctgagagaggaactctgtggggtgggggccgttgcaggtgtactgggctgtcagggatcttttctataccagaactgcggtcactattttgtaataaatgtggctggagctgatccagctgtctctgacct

SEQ ID NO: 28929 - DNA, 2781 bp, Homo sapiens
  source 1..2781: mol_type = unassigned DNA
gctgagacccggctccgtgcgtccaggggcggctaatgcccctcacgctgtctacgctgctgcaaccgggccgcatctggacggggcgccgcgcggcggagccgacgccgggccacaatgctgcttggagcctctctggtgggggtgctgctgttctccaagctggtgctgaaactgccctggacccaggtgggattctccctgttgttcctctacttgggatctggcggctggcgcttcatccgggtcttcatcaagaccatcaggcgcgatatctttggcggcctggtcctcctgaaggtgaaggcaaaggtgcgacagtgcctgcaggagcggcggacagtgcccattttgtttgcctctaccgttcggcgccaccccgacaagacggccctgatcttcgagggcacagatacccactggaccttccgccagctggatgagtactcaagcagtgtagccaacttcctgcaggcccggggcctggcctcgggcgatgtggctgccatcttcatggagaaccgcaatgagttcgtgggcctatggctgggcatggccaagctcggtgtggaggcagccctcatcaacaccaacctgcggcgggatgctctgctccactgcctcaccacctcgcgcgcacgggcccttgtctttggcagcgaaatggcctcagccatctgtgaggtccatgccagcctggacccctcgctcagcctcttctgctctggctcctgggagcccggtgcggtgcctccaagcacagaacacctggaccctctgctgaaagatgctcccaagcaccttcccagttgccctgacaagggcttcacagataaactgttctacatctacacatccggcaccacagggctgcccaaggccgccatcgtggtgcacagcaggtattaccgcatggctgccctggtgtactatggattccgcatgcggcccaacgacatcgtctatgactgcctccccctctaccactcagcaggaaacatcgtgggaatcggccagtgcctgctgcatggcatgacggtggtgattcggaagaagttctcagcctcccggttctgggacgattgtatcaagtacaactgcacgattgtgcagtacattggtgaactgtgccgctacctcctgaaccagccaccgcgggaggcagaaaaccagcaccaggttcgcatggcactaggcaatggcctccggcagtccatctggaccaacttttccagccgcttccacataccccaggtggctgagttctacggggccacagagtgcaactgtagcctgggcaacttcgacagccaggtgggggcctgtggtttcaatagccgcatcctgtccttcgtgtaccccatccggttggtacgtgtcaacgaggacaccatggagctgatccgggggcccgacggcgtctgcattccctgccagccaggtgagccgggccagctggtgggccgcatcatccagaaagaccccctgcgccgcttcgatggctacctcaaccagggcgccaacaacaagaagattgccaaggatgtcttcaagaagggggaccaggcctaccttactggtgatgtgctggtgatggacgagctgggctacctgtacttccgagaccgcactggggacacgttccgctggaaaggtgagaacgtgtccaccaccgaggtggaaggcacactcagccgcctgctggacatggctgacgtggccgtgtatggtgtcgaggtgccaggaaccgagggccgggccggaatggctgctgtggccagccccactggcaactgtgacctggagcgctttgctcaggtcttggagaaggaactgcccctgtatgcgcgccccatcttcctgcgcctcctgcctgagctgcacaaaacaggaacctacaagttccagaagacagagctacggaaggagggctttgacccggctattgtgaaagacccgctgttctatctagatgcccagaagggccgctacgtcccgctggaccaagaggcctacagccgcatccaggcaggcgaggagaagctgtgattccccccatccctctgagggccggcggatgctggatccggagccccaggttccgccccagagcggtcctggacaaggccagaccaaagcaagcagggcctggcacctccatcctgaggtgctgcccctccatccaaaactgccaagtgactcattgccttcccaacccttccagaggctttctgtgaaagtctcatgtccaagttccgtcttctgggctgggcaggccctctggttcccaggctgagactgacgggttttctcaggatgatgtcttgggtgagggtagggagaggacaaggggtcaccgagcccttcccagagagcagggagcttataaatggaaccagagcagaagtccccagactcaggaagtcaacagagtgggcagggacagtggtagcatccatctggtggccaaagagaatcgtagccccagagctgcccaagttcactgggctccacccccacctccaggaggggaggagaggacctgacatctgtaggtggcccctgatgccccatctacagcaggaggtcaggaccacgcccctggcctctccccactcccccatcctcctccctgggtggctgcctgattatccctcaggcagggcctctcagtccttgtgggtctgtgtcacctccatctcagtcttggcctggctatgaggggaggaggaatgggagagggggctcaggggccaataaactctgccttgagtcctccta

SEQ ID NO: 28930 - DNA, 1557 bp, Homo sapiens
  source 1..1557: mol_type = unassigned DNA
ggagcgcggcgggcggggccgggcggcgggcggggctggcggggcggccgggccatgcagggcgcagagccggctaaaccctgctgagacccggctccgtgcgtccaggggcggctaatgcccctcacgctgtctacgctgctgcaaccgggccgcatctggacggggcgccgcgcggcggagccgacgccgggccacaatgctgcttggagcctctctggtgggggtgctgctgttctccaagctggtgctgaaactgccctggacccaggtgggattctccctgttgttcctctacttgggatctggcggctggcgcttcatccgggtcttcatcaagaccatcaggcctaccttactggtgatgtgctggtgatggacgagctgggctacctgtacttccgagaccgcactggggacacgttccgctggaaaggtgagaacgtgtccaccaccgaggtggaaggcacactcagccgcctgctggacatggctgacgtggccgtgtatggtgtcgaggtgccaggaaccgagggccgggccggaatggctgctgtggccagccccactggcaactgtgacctggagcgctttgctcaggtcttggagaaggaactgcccctgtatgcgcgccccatcttcctgcgcctcctgcctgagctgcacaaaacaggaacctacaagttccagaagacagagctacggaaggagggctttgacccggctattgtgaaagacccgctgttctatctagatgcccagaagggccgctacgtcccgctggaccaagaggcctacagccgcatccaggcaggcgaggagaagctgtgattccccccatccctctgagggccggcggatgctggatccggagccccaggttccgccccagagcggtcctggacaaggccagaccaaagcaagcagggcctggcacctccatcctgaggtgctgcccctccatccaaaactgccaagtgactcattgccttcccaacccttccagaggctttctgtgaaagtctcatgtccaagttccgtcttctgggctgggcaggccctctggttcccaggctgagactgacgggttttctcaggatgatgtcttgggtgagggtagggagaggacaaggggtcaccgagcccttcccagagagcagggagcttataaatggaaccagagcagaagtccccagactcaggaagtcaacagagtgggcagggacagtggtagcatccatctggtggccaaagagaatcgtagccccagagctgcccaagttcactgggctccacccccacctccaggaggggaggagaggacctgacatctgtaggtggcccctgatgccccatctacagcaggaggtcaggaccacgcccctggcctctccccactcccccatcctcctccctgggtggctgcctgattatccctcaggcagggcctctcagtccttgtgggtctgtgtcacctccatctcagtcttggcctggctatgaggggaggaggaatgggagagggggctcaggggccaataaactctgccttgagtc

SEQ ID NO: 28931 - DNA, 2361 bp, Homo sapiens
  source 1..2361: mol_type = unassigned DNA
agcagtgccagggccaccacccctggggaggagccattgggctactcttgaggggccagaggtgagcctgaacactccacagctgctgctcctagggaggagctggtaccatgggtgtcaggcaacagttggccttgctgctgctgctgctgctcctgctctggggcctggggcagccagtgtggccagtcgctgtggccttgaccctgcgctggctcctgggggatcccacatgttgcgtgctacttgggctggccatgttagcacggccctggctcggcccctgggtgccccatgggctgagcctggcagctgcggccctggcactaaccctcctgccagcacggctgcccccaggactacgctggctgccggctgatgtgatcttcttggccaagatcctccacctgggcctgaagatcaggggatgcttgagccggcagccgcctgacacctttgtagatgccttcgagcggcgagcacgagcgcagcctggcagggcactcttggtgtggacggggcctggggccggctcagtcacctttggtgagctggatgcccgggcctgccaggcggcatgggccctgaaggctgagctgggtgaccctgcgagcctgtgtgccggggagcctactgccctccttgtgctggcttcccaggccgttccagccctgtgtatgtggctggggctggccaagctgggctgcccaacagcctggatcaacccgcatggccgggggatgcccctggcgcactctgtgctgagctctggggcccgggtgctggtggtggacccagacctccgggagagcctggaggagatccttcccaagctgcaggctgagaacatccgctgcttctacctcagccatacctcccctacaccaggggtgggggctctgggggctgccctggatgcagcgccctcccacccagtgcctgctgacctgcgtgctgggatcacatggagaagccctgccctcttcatctatacctcggggaccactggcctcccgaagccagccatcctcacgcatgagcgggtactgcagatgagcaagatgctgtccttatctggggccacagctgatgatgtggtttacacggtcctgcctctgtaccacgtgatgggacttgtcgttgggatcctcggctgcttagatctcggagccacctgtgttctggcccccaagttctctacttcctgcttctgggatgactgtcggcagcatggcgtgacagtgatcctgtatgtgggcgagctcctgcggtacttgtgtaacattccccagcaaccagaggaccggacacatacagtccgcctggcaatgggcaatggactacgggctgatgtgtgggagaccttccagcagcgcttcggtcctattcggatctgggaagtctacggctccacagaaggcaacatgggcttagtcaactatgtggggcgctgcggggccctgggcaagatgagctgcctcctccgaatgctgtccccctttgagctggtgcagttcgacatggaggcggcggagcctgtgagggacaatcagggcttctgcatccctgtagggctaggggagccggggctgctgctgaccaaggtggtaagccagcaacccttcgtgggctaccgcggcccccgagagctgtcggaacggaagctggtgcgcaacgtgcggcaatcgggcgacgtttactacaacaccggggacgtactggccatggaccgcgaaggcttcctctacttccgcgaccgcctcggggacaccttccgatggaagggcgagaacgtgtccacgcacgaggtggagggcgtgttgtcgcaggtggacttcttgcaacaggttaacgtgtatggcgtgtgcgtgccaggttgtgagggtaaggtgggcatggctgctgtgcagctagcccccggccagactttcgacggggagaagttgtaccagcacgttcgcgcttggctccctgcctacgctaccccccatttcatccgcatccaggacgccatggaggtcaccagcacgttcaaactgatgaagacccggttggtgcgtgagggcttcaatgtggggatcgtggttgaccctctgtttgtactggacaaccgggcccagtccttccggcccctgacggcagaaatgtaccaggctgtgtgtgagggaacctggaggctctgatcacctggccaacccactggggtagggatcaaagccagccacccccaccccaacacactcggtgtccctttcatcctgggcctgtgtgaatcccagcctggccataccctcaacctcagtgggctggaaatgacagtgggccctgtagcagtggcagaataaactcagatgtgttcac

SEQ ID NO: 28932 - DNA, 2636 bp, Homo sapiens
  source 1..2636: mol_type = unassigned DNA
ataagctgcactgcatggttgctgctggatgtgttgtgttcctggcttccctctggatgctgacagaaacaaggctggaaggtctgggacatggagaacgacccctcgagacgaagagagtccatctctctcacacctgtggccaagggtctggagaacatgggggctgatttcttggaaagcctggaggaaggccagctccctaggagtgacttgagccccgcagagatcaggagcagctggagcgaggcggcgccgaagcccttctccagatggaggaacctgcagccagccctgagagccagaagcttctgcagggagcacatgcagctgtttcgatggatcggcacaggcctgctctgcactgggctctctgccttcctgctggtggcctgcctcctggatttccagagggccctggctctgtttgtcctcacctgtgtggtcctcaccttcctgggccaccgcctgctgaaacggcttctggggccaaagctgaggaggtttctcaagcctcagggccatccccgcctgctgctctggtttaagaggggtctagctcttgctgctttcctgggcctggtcctgtggctgtctctggacacctcccagcggcctgagcaactggtgtccttcgcaggaatctgcgtgttcgtcgctctcctctttgcctgctcaaagcatcattgcgcagtgtcctggagggccgtgtcttggggacttggactgcagtttgtacttggactcctcgtcatcagaacagaaccaggattcattgcgttcgagtggctgggcgagcagatccggatcttcctgagctacacgaaggctggctccagcttcgtgtttggggaggcgctggtcaaggatgtctttgcctttcaggttctgcccatcattgtctttttcagctgtgtcatatccgttctctaccacgtgggcctcatgcagtgggtgatcctgaagattgcctggctgatgcaagtcaccatgggcaccacagccactgagaccctgagtgtggctggaaacatctttgtgagccagaccgaggctccattactgatccggccctacttggcagacatgacactctctgaagtccacgttgtcatgaccggaggttacgccaccattgctggcagcctgctgggtgcctacatctcctttgggatcgatgccacctcgttgattgcagcctctgtgatggctgccccttgtgccttggccctctccaagctggtctacccggaggtggaggagtccaagtttaggagggaggaaggagtgaaactgacctatggagatgctcagaacctcatagaagcagccagcactggggccgccatctccgtgaaggtggtcgccaacatcgctgccaacctgattgcgttcctggctgtgctggactttatcaatgctgccctctcctggctgggagacatggtggacatccaagggctcagcttccagctcatctgctcctacatcctgcggcctgtagccttcttgatgggtgtggcgtgggaggactgcccagtggtagctgagctgctggggatcaagctgtttctgaacgagtttgtggcctatcaagacctctccaagtacaagcaacgccgcctggcaggggccgaggagtgggtcggcgacaggaagcagtggatctccgtcagagctgaagtcctcacgacgtttgccctctgtggatttgccaatttcagctccattgggatcatgctgggaggcttgacctccatggtcccccaacggaagagcgacttctcccagatagtgctccgggcgctcttcacgggagcctgtgtgtccctggtgaacgcctgtatggcagggatcctctacatgcccaggggggctgaagttgactgcatgtccctcttgaacacgaccctcagcagcagtagctttgagatttaccagtgctgccgtgaggccttccagagcgtcaatccagagttcagcccagaggccctggacaactgctgtcggttttacaaccacacgatctgtgcacagtgaggacagaacatgcttgtgcttctgcgcttctgagggctgttctcccccgggaaccatctgtccccaccttccctttcccagagccctcttcagggaagccacaggacttagacccagctcaatcccacaattgggaagggttcatggagtgagtgtgcagagagtgagtgaggacataaggaaggacatgtcccactccatcccccttcctgctcccccatttcctaactcccccagtgtgaattctcagggtcacttctgcctcctcccgtttcccctccacatccaaacagcaccctggtcctctctatcccccctctcctggggtccctcacatgccccttcccttctgttgtgggctgcacaccaaagcctcctcccctccccacttcctaggcactaggatctctctgtggcttcccctgctgggtggtgtcacctctttctctgctttcagagaaacccttcccgcctttcctcagagtgcttcccaaactgaggtcccatggcacactgtcctgggaggcgttcagagggttccatgatggactaggtttggaaccactgggttaaataaacttagagagggctgttta

SEQ ID NO: 28933 - DNA, 1360 bp, Homo sapiens
  source 1..1360: mol_type = unassigned DNA
agggcccacaacgatgtgaaggttataagctgcactgcatggttgctgctggatgtgttgtgttcctggcttccctctggatgctgacagaaacaagggaatttctgctgaagtgacaaggcaagccagagccaaagcaggttggacccagcttgtccccacagagacgtgtgcttccctctctctctgagagcgacctgttaaccgcaaatacctggaaggtctgggacatggagaacgacccctcgagacgaagagagtccatctctctcacacctgtggccaagggtctggagaacatgggggctgatttcttggaaagcctggaggaaggccagctccctaggagtgacttgagccccgcagagatcaggagcagctggagcgaggcggcgccgaagcccttctccagatggaggaacctgcagccagccctgagagccagaagcttctgcagggagcacatgcagctgtttcgatggatcggcacaggcctgctctgcactgggctctctgccttcctgctggtggcctgcctcctggatttccagagggccctggctctgtttgtcctcacctgtgtggtcctcaccttcctgggccaccgcctgctgaaacggcttctggggccaaagctgaggaggtttctcaagcctcagggccatccccgcctgctgctctggtttaagagggatcccaggccatggagcaaggagggcccgaatcagtacctccctcagatcacctggacagtgtgagacaaaaagccgcagggaccatccctggagggggattcagcaggctcgatcggggtccaggtgctggtatttttcattagcctccaggggattctgatgtagccagcagcgtccttggacaacagtttgagatctgctgcttttcaaactggattccttggagcgctggaaatctcagcgatgtcacagggcaggagagggaggttgtggagggaaaattcagacttcccgcccagcccaccatttcaccaggcagctctaaatttatgtgttttataagccaaggttcacacaaaaaagaaaattcgctgggggaaaaaaacagtttctatggcttaaaaaaaagtctgaagaccaccagtctatttcaatactctattttgttgatgaagaagctggtgaccaaagatacccaaagactaagtcagggggatgcaggggtacaggggtgcctctcactttcccaaagtgagatccacataccacagcaaaatgatttgagccagcctgtggatgaacacatttaaaattttatttataaatacatttactgttacatttgacttctctttattaaatacatttgtgatttatttttgcaa

SEQ ID NO: 28934 - DNA, 2750 bp, Homo sapiens
  source 1..2750: mol_type = unassigned DNA
gctgcactgcatggttgctgctggatgtgttgtgttcctggcttccctctggatgctgacagaaacaagggaatttctgctgaagtgacaaggcaagccagagccaaagcaggttggacccagcttgtccccacagagacgtgtgcttccctctctctctgagagcgacctgttaaccgcaaatacctggaaggtctgggacatggagaacgacccctcgagacgaagagagtccatctctctcacacctgtggccaagggtctggagaacatgggggctgatttcttggaaagcctggaggaaggccagctccctaggagtgacttgagccccgcagagatcaggagcagctggagcgaggcggcgccgaagcccttctccagatggaggaacctgcagccagccctgagagccagaagcttctgcagggagcacatgcagctgtttcgatggatcggcacaggcctgctctgcactgggctctctgccttcctgctggtggcctgcctcctggatttccagagggccctggctctgtttgtcctcacctgtgtggtcctcaccttcctgggccaccgcctgctgaaacggcttctggggccaaagctgaggaggtttctcaagcctcagggccatccccgcctgctgctctggtttaagaggggtctagctcttgctgctttcctgggcctggtcctgtggctgtctctggacacctcccagcggcctgagcaactggtgtccttcgcaggaatctgcgtgttcgtcgctctcctctttgcctgctcaaagcatcattgcgcagtgtcctggagggccgtgtcttggggacttggactgcagtttgtacttggactcctcgtcatcagaacagaaccaggattcattgcgttcgagtggctgggcgagcagatccggatcttcctgagctacacgaaggctggctccagcttcgtgtttggggaggcgctggtcaaggatgtctttgcctttcaggttctgcccatcattgtctttttcagctgtgtcatatccgttctctaccacgtgggcctcatgcagtgggtgatcctgaagattgcctggctgatgcaagtcaccatgggcaccacagccactgagaccctgagtgtggctggaaacatctttgtgagccagaccgaggctccattactgatccggccctacttggcagacatgacactctctgaagtccacgttgtcatgaccggaggttacgccaccattgctggcagcctgctgggtgcctacatctcctttgggatcgatgccacctcgttgattgcagcctctgtgatggctgccccttgtgccttggccctctccaagctggtctacccggaggtggaggagtccaagtttaggagggaggaaggagtgaaactgacctatggagatgctcagaacctcatagaagcagccagcactggggccgccatctccgtgaaggtggtcgccaacatcgctgccaacctgattgcgttcctggctgtgctggactttatcaatgctgccctctcctggctgggagacatggtggacatccaagggctcagcttccagctcatctgctcctacatcctgcggcctgtagccttcttgatgggtgtggcgtgggaggactgcccagtggtagctgagctgctggggatcaagctgtttctgaacgagtttgtggcctatcaagacctctccaagtacaagcaacgccgcctggcaggggccgaggagtgggtcggcgacaggaagcagtggatctccgtcagagctgaagtcctcacgacgtttgccctctgtggatttgccaatttcagctccattgggatcatgctgggaggcttgacctccatggtcccccaacggaagagcgacttctcccagatagtgctccgggcgctcttcacgggagcctgtgtgtccctggtgaacgcctgtatggcagggatcctctacatgcccaggggggctgaagttgactgcatgtccctcttgaacacgaccctcagcagcagtagctttgagatttaccagtgctgccgtgaggccttccagagcgtcaatccagagttcagcccagaggccctggacaactgctgtcggttttacaaccacacgatctgtgcacagtgaggacagaacatgcttgtgcttctgcgcttctgagggctgttctcccccgggaaccatctgtccccaccttccctttcccagagccctcttcagggaagccacaggacttagacccagctcaatcccacaattgggaagggttcatggagtgagtgtgcagagagtgagtgaggacataaggaaggacatgtcccactccatcccccttcctgctcccccatttcctaactcccccagtgtgaattctcagggtcacttctgcctcctcccgtttcccctccacatccaaacagcaccctggtcctctctatcccccctctcctggggtccctcacatgccccttcccttctgttgtgggctgcacaccaaagcctcctcccctccccacttcctaggcactaggatctctctgtggcttcccctgctgggtggtgtcacctctttctctgctttcagagaaacccttcccgcctttcctcagagtgcttcccaaactgaggtcccatggcacactgtcctgggaggcgttcagagggttccatgatggactaggtttggaaccactgggttaaataaacttagagagggctgtttaga

SEQ ID NO: 28935 - DNA, 1934 bp, Homo sapiens
  source 1..1934: mol_type = unassigned DNA
acaacgatgtgaaggttataagctgcactgcatggttgctgctggatgtgttgtgttcctggcttccctctggatgctgacagaaacaagggaatttctgctgaagtgacaaggcaagccagagccaaagcaggttggacccagcttgtccccacagagacgtgtgcttccctctctctctgagagcgacctgttaaccgcaaatacctggaaggtctgggacatggagaacgacccctcgagacgaagagagtccatctctctcacacctgtggccaagggtctggagaacatgggggctgatttcttggaaagcctggaggaaggccagctccctaggagtgacttgagccccgcagagatcaggagcagctggagcgaggcggcgccgaagcccttctccagatggaggaacctgcagccagccctgagagccagaagcttctgcagggagcacatgcagctgtttcgatggatcggcacaggcctgctctgcactgggctctctgccttcctgctggtggcctgcctcctggatttccagagggccctggctctgtttgtcctcacctgtgtggtcctcaccttcctgggccaccgcctgctgaaacggcttctggggccaaagctgaggaggtttctcaagcctcagggccatccccgcctgctgctctggtttaagaggggtctagctcttgctgctttcctgggcctggtcctgtggctgtctctggacacctcccagcggcctgagcaactggtgtccttcgcaggaatctgcgtgttcgtcgctctcctctttgcctgctcaaagcatcattgcgcagtgtcctggagggccgtgtcttggggacttggactgcagtttgtacttggactcctcgtcatcagaacagaaccaggattcattgcgttcgagtggctgggcgagcagatccggatcttcctgagctacacgaaggctggctccagcttcgtgtttggggaggcgctggtcaaggatgtctttgcctttcaggttctgcccatcattgtctttttcagctgtgtcatatccgttctctaccacgtgggcctcatgcagtgggtgatcctgaagattgcctggctgatgcaagtcaccatgggcaccacagccactgagaccctgagtgtggctggaaacatctttgtgagccagaccgaggctccattactgatccggccctacttggcagacatgacactctctgaagtccacgttgtcatgaccggaggttacgccaccattgctggcagcctgctgggtgcctacatctcctttgggatcgatgccacctcgttgattgcagcctctgtgatggctgccccttgtgccttggccctctccaagctggtctacccggaggtggaggagtccaagtttaggagggaggaaggagtgaaactgacctatggagatgctcagaacctcatagaagcagccagcactggggccgccatctccgtgaaggtggtcgccaacatcgctgccaacctgattgcgttcctggctgtgctggactttatcaatgctgccctctcctggctgggagacatggtggacatccaagggctcagcttccagctcatctgctcctacatcctgcggcctgtagccttcttgatgggtgtggcgtgggaggactgcccagtggtagctgagctgctggggatcaagctgtttctgaacgagtttgtggcctatcaagacctctccaagtacaagcaacgccgcctggcaggggccgaggagtgggtcggcgacaggaagcagtggatctccagacgaggtcttgctatgttgaccaggctggtcttgaactcctggccttaaatgatcctactgccttggcttcccaaagtgctgggattacaggatattcaaaagtacacctgccgagtcccagccctga

SEQ ID NO: 28936 - DNA, 2237 bp, Homo sapiens
  source 1..2237: mol_type = unassigned DNA
caacgatgtgaaggttataagctgcactgcatggttgctgctggatgtgttgtgttcctggcttccctctggatgctgacagaaacaagggaatttctgctgaagtgacaaggcaagccagagccaaagcaggttggacccagcttgtccccacagagacgtgtgcttccctctctctctgagagcgacctgttaaccgcaaatacctggaaggtctgggacatggagaacgacccctcgagacgaagagagtccatctctctcacacctgtggccaagggtctggagaacatgggggctgatttcttggaaagcctggaggaaggccagctccctaggagtgacttgagccccgcagagatcaggagcagctggagcgaggcggcgccgaagcccttctccagatggaggaacctgcagccagccctgagagccagaagcttctgcagggagcacatgcagctgtttcgatggatcggcacaggcctgctctgcactgggctctctgccttcctgctggtggcctgcctcctggatttccagagggccctggctctgtttgtcctcacctgtgtggtcctcaccttcctgggccaccgcctgctgaaacggcttctggggccaaagctgaggaggtttctcaagcctcagggccatccccgcctgctgctctggtttaagaggggtctagctcttgctgctttcctgggcctggtcctgtggctgtctctggacacctcccagcggcctgagcaactggtgtccttcgcaggaatctgcgtgttcgtcgctctcctctttgcctgctcaaagcatcattgcgcagtgtcctggagggccgtgtcttggggacttggactgcagtttgtacttggactcctcgtcatcagaacagaaccaggattcattgcgttcgagtggctgggcgagcagatccggatcttcctgagctacacgaaggctggctccagcttcgtgtttggggaggcgctggtcaaggatgtctttgcctttcaggttctgcccatcattgtctttttcagctgtgtcatatccgttctctaccacgtgggcctcatgcagtgggtgatcctgaagattgcctggctgatgcaagtcaccatgggcaccacagccactgagaccctgagtgtggctggaaacatctttgtgagccagaccgaggctccattactgatccggccctacttggcagacatgacactctctgaagtccacgttgtcatgaccggaggttacgccaccattgctggcagcctgctgggtgcctacatctcctttgggatcgatgccacctcgttgattgcagcctctgtgatggctgccccttgtgccttggccctctccaagctggtctacccggaggtggaggagtccaagtttaggagggaggaaggagtgaaactgacctatggagatgctcagaacctcatagaagcagccagcactggggccgccatctccgtgaaggtggtcgccaacatcgctgccaacctgattgcgttcctggctgtgctggactttatcaatgctgccctctcctggctgggagacatggtggacatccaagggctcagcttccagctcatctgctcctacatcctgcggcctgtagccttcttgatgggtgtggcgtgggaggactgcccagtggtagctgagctgctggggatcaagctgtttctgaacgagtttgtggcctatcaagacctctccaagtacaagcaacgccgcctggcaggggccgaggagtgggtcggcgacaggaagcagtggatctccgtcagagctgaagtcctcacgacgtttgccctctgtggatttgccaatttcagctccattgggatcatgctgggaggcttgacctccatggtcccccaacggaagagcgacttctcccagatagtgctccgggcgctcttcacgggagcctgtgtgtccctggtgaacgcctgtatggcagggatcctctacatgcccaggggggctgaagttgactgcatgtccctcttgaacacgaccctcagcagcagtagctttgagatttaccagtgctgccgtgaggccttccagaggatattcaaaagtacacctgccgagtcccagccctgaggagtgttttcgtgcttcattgttaagtatcttggaggctctcagctggaaataaatgctcttcatttattaaagaagcatccttatatttttaagagtctttg

SEQ ID NO: 28937 - DNA, 1300 bp, Homo sapiens
  source 1..1300: mol_type = unassigned DNA
gctgcactgcatggttgctgctggatgtgttgtgttcctggcttccctctggatgctgacagaaacaagggaatttctgctgaagtgacaaggcaagccagagccaaagcaggttggacccagcttgtccccacagagacgtgtgcttccctctctctctgagagcgacctgttaaccgcaaatacctggaaggtctgggacatggagaacgacccctcgagacgaagagagtccatctctctcacacctgtggccaagggtctggagaacatgggggctgatttcttggaaagcctggaggaaggccagctccctaggagtgacttgagccccgcagagatcaggagcagctggagcgaggcggcgccgaagcccttctccagatggaggaacctgcagccagccctgagagccagaagcttctgcagggagcacatgcagctgtttcgatggatcggcacaggcctgctctgcactgggctctctgccttcctgctggtggcctgcctcctggatttccagagggccctggctctgtttgtcctcacctgtgtggtcctcaccttcctgggccaccgcctgctgaaacggcttctggggccaaagctgaggaggtttctcaagcctcagggccatccccgcctgctgctctggtttaagaggggtctagctcttgctgctttcctgggcctggtcctgtggctgtctctggacacctcccagcggcctgagcaactggtgtccttcgcaggaatctgcgtgttcgtcgctctcctctttgcctgctcaaagcatcattgcgcagtgtcctggagggccgtgtcttggggacttggactgcagtttgtacttggactcctcgtcatcagaacagaaccaggattcattgcgttcgagtggctgggcgagcagatccggatcttcctgagctacacgaaggctggctccagcttcgtgtttggggaggcgctggtcaaggatgtctttgcctttcaggttctgcccatcattgtctttttcagctgtgtcatatccgttctctaccacgtgggcctcatgcagtgggtgatcctgaagattgcctggctgatgcaagtcaccatgggcaccacagccactgagaccctgagtgtggctggaaacatctttgtgagccagaccgaggctccattactgatccggccctacttggcagacatgacactctctgaagtccacgttgtcatgaccggaggttacgccaccattgctggcagcctgctgggtgcctacatctcctttgggctagaaaaattgtga

SEQ ID NO: 28938 - DNA, 1590 bp, Homo sapiens
  source 1..1590: mol_type = unassigned DNA
acaacgatgtgaaggttataagctgcactgcatggttgctgctggatgtgttgtgttcctggcttccctctggatgctgacagaaacaaggctggaaggtctgggacatggagaacgacccctcgagacgaagagagtccatctctctcacacctgtggccaagggtctggagaacatgggggctgatttcttggaaagcctggaggaaggccagctccctaggagtgacttgagccccgcagagatcaggagcagctggagcgaggcggcgccgaagcccttctccagatggaggaacctgcagccagccctgagagccagaagcttctgcagggagcacatgcagctgtttcgatggatcggcacaggcctgctctgcactgggctctctgccttcctgctggtggcctgcctcctggatttccagagggccctggctctgtttgtcctcacctgtgtggtcctcaccttcctgggccaccgcctgctgaaacggcttctggggccaaagctgaggaggtttctcaagcctcagggccatccccgcctgctgctctggtttaagaggggtctagctcttgctgctttcctgggcctggtcctgtggctgtctctggacacctcccagcggcctgagcaactggtgtccttcgcaggaatctgcgtgttcgtcgctctcctctttgcctgctcaaagcatcattgcgcagtgtcctggagggccgtgtcttggggacttggactgcagtttgtacttggactcctcgtcatcagaacagaaccaggattcattgcgttcgagtggctgggcgagcagatccggatcttcctgagctacacgaaggctggctccagcttcgtgtttggggaggcgctggtcaaggatgtctttgcctttcaggttctgcccatcattgtctttttcagctgtgtcatatccgttctctaccacgtgggcctcatgcagtgggtgatcctgaagattgcctggctgatgcaagtcaccatgggcaccacagccactgagaccctgagtgtggctggaaacatctttgtgagccagaccgaggctccattactgatccggccctacttggcagacatgacactctctgaagtccacgttgtcatgaccggaggttacgccaccattgctggcagcctgctgggtgcctacatctcctttggggtcagagctgaagtcctcacgacgtttgccctctgtggatttgccaatttcagctccattgggatcatgctgggaggcttgacctccatggtcccccaacggaagagcgacttctcccagatagtgctccgggcgctcttcacgggagcctgtgtgtccctggtgaacgcctgtatggcagggatcctctacatgcccaggggggctgaagttgactgcatgtccctcttgaacacgaccctcagcagcagtagctttgagatttaccagtgctgccgtgaggccttccagagcgtcaatccagagttcagcccagaggccctggacaactgctgtcggttttacaaccacacgatctgtgcacagtgaggacagaacatgcttgtgcttctgcgcttct

SEQ ID NO: 28939 - DNA, 2464 bp, Homo sapiens
  source 1..2464: mol_type = unassigned DNA
tttcagtccttcactgaggagccagagggaatcaattccacaagctgggttgaggagaacaggagatggagaaagcaagtggaagacagtccattgctctgtccacagtggagactggcacagtgaacccggggctggagctcatggaaaaagaagtagagcctgagggaagcaagaggactgacgcacaaggacacagcctgggggatggactgggcccttccacttaccagaggaggagtcggtggcctttcagcaaagcaagaagtttctgcaaaacacacgccagcttgttcaagaagatcctgttgggcctgttgtgtttggcctatgctgcctatctcctggcagcttgcatcttgaatttccagagggcactggccttgtttgtcatcacctgcttggtgatctttgtcctggttcactcgtttttgaaaaagctcctgggcaaaaaattaacaagatgtctgaagccctttgaaaactcccgcctgaggctttggacgaaatgggtgtttgcaggagtctccttggttggccttatactgtggttggctttagacacagcccaaaggccagagcagctgatcccctttgcaggaatctgcatgttcatccttatcctctttgcctgctccaaacaccacagcgcagtgtcctggaggacagtgttttcgggcctaggtcttcaatttgtctttgggatcttggtcatcagaactgatcttggatatactgtatttcagtggctgggagagcaggtccagattttcctgaactacactgtggccggctccagttttgtctttggggatacactggtcaaggatgtctttgcttttcaggccttaccaatcatcattttctttggatgtgtggtgtccattctctactacctgggccttgtgcaatgggtagttcagaaggtcgcctggtttttacaaatcactatgggcaccactgctacagagaccctggctgtggcaggaaacatctttgtgggtatgacagaggcacctctgctcatccgtccctaccttggggacatgacactctctgaaatccatgcggtgatgactggagggtttgccaccatttctggcactgtgctgggagccttcatagcctttggggttgatgcatcatccctgatttctgcctctgtgatggccgccccttgtgctctcgcctcatcaaagctagcgtatccggaagtggaggagtccaagttcaagagtgaggagggggtaaagctgccccgtgggaaggagaggaatgtcctggaagctgccagcaacggagccgtagatgccataggccttgctactaatgtagcagccaacctgattgcctttttggctgtgttggccttcatcaatgctgccctctcctggctgggggaattggtggacatacaggggctcactttccaggtcatctgctcctatctcctaaggcccatggttttcatgatgggtgtagagtggacagactgtccaatggtggctgagatggtgggaatcaagttcttcataaatgagtttgtggcttatcagcaactgtctcaatacaagaacaaacgtctctctggaatggaggagtggattgagggagagaaacagtggatttctgtgagagctgaaatcattacaacattttcactctgtggatttgccaatcttagttccataggaatcacacttggaggcttgacatcaatagtacctcaccggaagagtgacttgtccaaggttgtggtcagggccctcttcacaggggcctgtgtatcccttatcagtgcctgtatggcaggaatcctctatgtccccaggggagctgaagctgactgtgtctccttcccaaacacaagtttcaccaatagaacctatgagacctacatgtgctgcagagggctctttcagagtacttctctgaatggcaccaaccctccttctttttctggtccctgggaagataaggagttcagtgctatggcccttactaactgctgtggattctacaacaataccgtctgtgcctaaggctgcttgatctatttctataacagttttgatcttaaaagctttgtgattgcaaaggtgtttatgtactcagggtgcccacaactcactcaccaagatgtttaacagtaagtaacagtaaatgtaaaagattcattttgggccgggctcagtggctcatgcctgtaatcccagcactttgggaggccgaggcgggcggatcacaaggtcaggagatcgagaccatcctggctaacacagtgaaaccccgtctctactaaaaatacaaaaaattagccgggagtggtgtcgggcgactgtagtcccagctactcgcgaggctgaggcaggagaatggcgtgaatccgggaggcggagcttgcagcgagccaagatcgcgccactgcactccagcctgggtgacagagcgagactctgtctca

SEQ ID NO: 28940 - DNA, 4887 bp, Homo sapiens
  source 1..4887: mol_type = unassigned DNA
cccaggtacaaaggacctccagaccagagccagccagcagcaaaaagagcatggagctgaggagtacagcagcccccagagctgagggctacagcaacgtgggcttccagaatgaagaaaactttcttgagaacgagaacacatcaggaaacaactcaataagaagcagagctgtgcaaagcagggagcacacaaacaccaaacaggatgaagaacaggtcacagttgagcaggattctccaagaaacagagaacacatggaggatgatgatgaggagatgcaacaaaaagggtgtttggaaaggaggtatgacacagtatgtggtttctgtaggaaacacaaaacaactcttcggcacatcatctggggcattttattagcaggttatctggttatggtgatttcggcctgtgtgctgaactttcacagagcccttcctctttttgtgatcaccgtggctgccatcttctttgttgtctgggatcacctgatggccaaatacgaacatcgaattgatgagatgctgtctcctggcagaaggcttctaaacagccattggttctggctgaagtgggtgatctggagctccctggtcctagcagttattttctggttggcctttgacactgccaaattgggtcaacagcagctggtgtccttcggtgggctcataatgtacattgtcctgttatttctattttccaagtacccaaccagagtttactggagacctgtcttatggggaatcgggctacagtttcttcttgggctcttgattctaaggactgaccctggatttatagcttttgattggttgggcagacaagttcagacttttctggagtacacagatgctggtgcttcatttgtctttggtgagaaatacaaagaccacttctttgcatttaaggtcctgccgatcgtggttttcttcagcactgtgatgtccatgctgtactacctgggactgatgcagtggattattagaaaggttggatggatcatgctagttactacgggatcatctcctattgaatctgtagttgcttctggcaatatatttgttggacaaacggagtctccactgctggtccgaccatatttaccttacatcaccaagtctgaactccacgccatcatgaccgccgggttctctaccattgctggaagcgtgctaggtgcatacatttcttttggggttccatcctcccacttgttaacagcgtcagttatgtcagcacctgcgtcattggctgctgctaaactcttttggcctgagacagaaaaacctaaaataaccctcaagaatgccatgaaaatggaaagtggtgattcagggaatcttctagaagctgcaacacagggagcatcctcctccatctccctggtggccaacatcgctgtgaatctgattgccttcctggccctgctgtcttttatgaattcagccctgtcctggtttggaaacatgtttgactacccacagctgagttttgagctaatctgctcctacatcttcatgcccttttccttcatgatgggagtggaatggcaggacagctttatggttgccagactcataggttataagaccttcttcaatgaatttgtggcttatgagcacctctcaaaatggatccacttgaggaaagaaggtggacccaaatttgtaaacggtgtgcagcaatatatatcaattcgttctgagataatcgccacttacgctctctgtggttttgccaatatcgggtccctaggaatcgtgatcggcggactcacatccatggctccttccagaaagcgtgatatcgcctcgggggcagtgagagctctgattgcggggaccgtggcctgcttcatgacagcctgcatcgcaggcatactctccagcactcctgtggacatcaactgccatcacgttttagagaatgccttcaactccactttccctggaaacacaaccaaggtgatagcttgttgccaaagtctgttgagcagcactgttgccaagggtcctggtgaagtcatcccaggaggaaaccacagtctgtattctttgaagggctgctgcacattgttgaatccatcgacctttaactgcaatgggatctctaatacattttgaggtcagccacttctccagtggaactctgaagtacagatgctgaattttctgctttggaaagaaaaaaaaaagaagctattgtccacagattgatgcttccataatggaatcagctttaattgcaaggaatgaagaaaaacaagagtggaccttcaaagctacaacattttcctcctcccctccctccccaccagccccttccccaccaagaactgctatgatgtcccaaagtgaggtgttgttgattccagtctcaatgggattttctgactttaatgtttgcaaggcatttcaccagaatacagctataaacggccgctcccaacaactgggctctgactcacccacacccacttagtgtccactaagtagtccagggtgactcagtttaagcacatctcaggtgaggtcactctgcatataccttggcttacctgaaatagcctgaacttgaatctcacataagggaaaactagtcatcaatcaccaactcattgactaccctcaggaagtcctgcagaaatcaagagtccttgaggagaacacgtggatcataccaaaaccagggtttaaatccattctgcttaagagttctatcagtcagtttaaccataaattacgctacagaaacaaacaacccaaaaacctcagtggcttacagatttatttttcactcacatgtttgtaatgatccatcttggttgtaatccatattgcttcagcacccagtctaaaggagcagcctctaaggggggcatgttggtcttaagagggaaaagaaaggtgggaaccacatgatggctctttcatcttccgctaggaaatgataccctttacttccatgacattccattagccaaaacaagtcctgtgacaggcacgatgtcagtcaccacagttaaattatcctgtcatagggagggatagtgaatattttgcagaagtaatatgatacaccataagggtacataatatccatgtctcccttcaaggagccatcctgttgtaggccataacggtaggcctattcatctgcacatttggtaatgtattcctggtgacaaagcagctactcttcaatcaaaagccgtgtaagaagcagttgaggaaaaaaagtcctggttgagctctgaaaaccttgcgttgataatttcattgaccaggatggcatcagtatcaaacttgaagaatgggtgtcagtgtctaagaaaaagattccagagacaatggtggtgtgctctttaacgaaatgcccatcaccactgctcttaatagcatgaagaccacatgctgtgagaaaacacaaacatcaattaccaagtcaagaaacagacactgaatgtgaaaaaggttttgaaataccttaagtaatttattttgtttctatttttccttctgtttgtgtacaagagtaatttaaaagaaaaagctatgtgaaaatagttggggttttttgtgtgttttgttttttgtggtggtgaaggaggaggcctaatgtccagaggactgtttatccctgaagtatgatatactaaaatatttcttattatttgtatcaattttccttggagctcaatgtgcccttgcagtcttcagactttattttaggaaaatatatttgcatgttttccccccattctcaatgtttggtgtcctggttcatcataccccacagaatgttatgtttatgtatcataccattcctctgtggacatgcatttactttgtttacaggttttggtttgggggttctctttttcctactctggacagtgcatgtacatttactttgcatgctggtgcttttttttctatagcaatagtgtctgatagacatatgcaagtcacatgtaatttaagatctagtagccacgctaaaaaacaagtaaaattaattttaatatatttaactcaatacattggagatattatttcagtaagatatttttcattcttatgaaactaagtctgtctggtttgcatatctcagttgagacactaaagttttactgataatacttaatccatgtttagatttcataaaatctaaatttgcaaagtaaatttacatacccatgttggtctaaatgtgcttaaaagttttccaataactgaaatgagtatcagttttaaatttaaaaatttgttacttggttactccatatttcaggtattagtggctaccatattggtcagagcagattcataggatgatttcccaggtttgaagtgtgtgtatatttctggtattataagatgtcagactggtttttggagaaatatgttgtcttaatttttacctgctttgatatgacctttctgtgtgtacgtgtgacatttctttataaatgcaacatgttcacataggtcctacgttgattccttattaatgctgtgcatccttgaactgagaaagggggtgttattcctgagctatattataagaggatagtaaaggccaaggaccaggaaaatgagctggttaagcctcttgagcttgttacccccagaaacctcaccaataccctgtgaacgtcgtaagtggcccttctcccagtgaaacaacctaatggaggtttttggtgcatggtgatgtttttattcctctttagtagacatagaagctggaggctgcttgtcttccccagtttctccttcacccatgtacatatagtgggcaaagatggcatgcctatgtttttcagctgtttgagcccgctcactgttgacagattgttgctgttggtctgtgctccccaac

SEQ ID NO: 28941 - DNA, 2481 bp, Homo sapiens
  source 1..2481: mol_type = unassigned DNA
aactgaagcaagctgtgcccaggtccctgtaacagcaggtggctttctgacatcagcagagactggtgctttttcccaggtacaaaggacctccagaccagagccagccagcagcaaaaagagcatggagctgaggagtacagcagcccccagagctgagggctacagcaacgtgggcttccagaatgaagaaaactttcttgagaacgagaacacatcaggaaacaactcaataagaagcagagctgtgcaaagcagggagcacacaaacaccaaacagagaatcaaaggccacattggatatgacagaagacaagtgctgagatttgacattatacttcttagagcacactcaaactgctccacctccatctatttcctcccccaccagcttctgtaccattggttacaagagccaggcttattatttgagacattattggagactggagacaggatgaagaacaggtcacagttgagcaggattctccaagaaacagagaacacatggaggatgatgatgaggagatgcaacaaaaagggtgtttggaaaggaggtatgacacagtatgtggtttctgtaggaaacacaaaacaactcttcggcacatcatctggggcattttattagcaggttatctggttatggtgatttcggcctgtgtgctgaactttcacagagcccttcctctttttgtgatcaccgtggctgccatcttctttgttgtctgggatcacctgatggccaaatacgaacatcgaattgatgagatgctgtctcctggcagaaggcttctaaacagccattggttctggctgaagtgggtgatctggagctccctggtcctagcagttattttctggttggcctttgacactgccaaattgggtcaacagcagctggtgtccttcggtgggctcataatgtacattgtcctgttatttctattttccaagtacccaaccagagtttactggagacctgtcttatggggaatcgggctacagtttcttcttgggctcttgattctaaggactgaccctggatttatagcttttgattggttgggcagacaagttcagacttttctggagtacacagatgctggtgcttcatttgtctttggtgagaaatacaaagaccacttctttgcatttaaggtcctgccgatcgtggttttcttcagcactgtgatgtccatgctgtactacctgggactgatgcagtggattattagaaaggttggatggatcatgctagttactacgggatcatctcctattgaatctgtagttgcttctggcaatatatttgttggacaaacggagtctccactgctggtccgaccatatttaccttacatcaccaagtctgaactccacgccatcatgaccgccgggttctctaccattgctggaagcgtgctaggtgcatacatttcttttggggttccatcctcccacttgttaacagcgtcagttatgtcagcacctgcgtcattggctgctgctaaactcttttggcctgagacagaaaaacctaaaataaccctcaagaatgccatgaaaatggaaagtggtgattcagggaatcttctagaagctgcaacacagggagcatcctcctccatctccctggtggccaacatcgctgtgaatctgattgccttcctggccctgctgtcttttatgaattcagccctgtcctggtttggaaacatgtttgactacccacagctgagttttgagctaatctgctcctacatcttcatgcccttttccttcatgatgggagtggaatggcaggacagctttatggttgccagactcataggttataagaccttcttcaatgaatttgtggcttatgagcacctctcaaaatggatccacttgaggaaagaaggtggacccaaatttgtaaacggtgtgcagcaatatatatcaattcgttctgagataatcgccacttacgctctctgtggttttgccaatatcgggtccctaggaatcgtgatcggcggactcacatccatggctccttccagaaagcgtgatatcgcctcgggggcagtgagagctctgattgcggggaccgtggcctgcttcatgacagcctgcatcgcaggcatactctccagcactcctgtggacatcaactgccatcacgttttagagaatgccttcaactccactttccctggaaacacaaccaaggtgatagcttgttgccaaagtctgttgagcagcactgttgccaagggtcctggtgaagtcatcccaggaggaaaccacagtctgtattctttgaagggctgctgcacattgttgaatccatcgacctttaactgcaatgggatctctaatacattttgaggtcagccacttctccagtggaactctgaagtacagatgctgaattttctgctttggaaagaaaaaaaaaagaagctattgtccacagattgatgcttccataat

SEQ ID NO: 28942 - DNA, 2283 bp, Homo sapiens
  source 1..2283: mol_type = unassigned DNA
acaccggtcaggcccggcgcgggctgcgctctccagctgtggctatggccccagccccgagatgaggagggagagaactaggggcccgcaggcctgggaatttccgtcccccaccaagtccggatgctcactccaaagtctcagcagggacctgagggagctcagggagggagagaagccagaagaccaggcagagactgaagagagctggcaaggcctggctagaaaaactccaggcaaggcctgtgcccctgagggagggagctgtcagccagggaaaaccgagaacaccatcaccatgacaaccagtcaccagcctcaggacagatacaaagctgtctggcttatcttcttcatgctgggtctgggaacgctgctcccgtggaattttttcatgacggccactcagtatttcacaaaccgcctggacatgtcccagaatgtgtccttggtcactgctgaactgagcaaggacgcccaggcgtcagccgcccctgcagcacccttgcctgagcggaactctctcagtgccatcttcaacaatgtcatgaccctatgtgccatgctgcccctgctgttattcacctacctcaactccttcctgcatcagaggatcccccagtccgtacggatcctgggcagcctggtggccatcctgctggtgtttctgatcactgccatcctggtgaaggtgcagctggatgctctgcccttctttgtcatcaccatgatcaagatcgtgctcattaattcatttggtgccatcctgcagggcagcctgtttggtctggctggccttctgcctgccagctacacggcccccatcatgagtggccagggcctagcaggcttctttgcctccgtggccatgatctgcgctattgccagtggctcggagctatcagaaagtgccttcggctactttatcacagcctgtgctgttatcattttgaccatcatctgttacctgggcctgccccgcctggaattctaccgctactaccagcagctcaagcttgaaggacccggggagcaggagaccaagttggacctcattagcaaaggagaggagccaagagcaggcaaagaggaatctggagtttcagtctccaactctcagcccaccaatgaaagccactctatcaaagccatcctgaaaaatatctcagtcctggctttctctgtctgcttcatcttcactatcaccattgggatgtttccagccgtgactgttgaggtcaagtccagcatcgcaggcagcagcacctgggaacgttacttcattcctgtgtcctgtttcttgactttcaatatctttgactggttgggccggagcctcacagctgtattcatgtggcctgggaaggacagccgctggctgccaagcctggtgctggcccggctggtgtttgtgccactgctgctgctgtgcaacattaagccccgccgctacctgactgtggtcttcgagcacgatgcctggttcatcttcttcatggctgcctttgccttctccaacggctacctcgccagcctctgcatgtgcttcgggcccaagaaagtgaagccagctgaggcagagaccgcaggagccatcatggccttcttcctgtgtctgggtctggcactgggggctgttttctccttcctgttccgggcaattgtgtgacaaaggatggacagaaggactgcctgcctccctccctgtctgcctcctgccccttccttctgccaggggtgatcctgagtggtctggcggttttttcttctaactgacttctgctttccacggcgtgtgctgggcccggatctccaggccctggggagggagcctctggacggacagtggggacattgtgggtttggggctcagagtcgagggacggggtgtagcctcggcatttgcttgagtttctccactcttggctctgactgatccctgcttgtgcaggccagtggaggctcttgggcttggagaacacgtgtgtctctgtgtatgtgtctgtgtgtctgcgtccgtgtctgtcagactgtctgcctgtcctggggtggctaggagctgggtctgaccgttgtatggtttgacctgatatactccattctcccctgcgcctcctcctctgtgttctctccatgtccccctcccaactccccatgcccagttcttacccatcatgcaccctgtacagttgccacgttactgccttttttaaaaatatatttgacagaaaccaggtgccttcagaggctctctgatttaaataaacctttcttgtttttttc

SEQ ID NO: 28943 - DNA, 2159 bp, Homo sapiens
  source 1..2159: mol_type = unassigned DNA
agggggtcttactggactcctccactggcctgttctgtcagccctgccccctctccccctaagagcctgaggaggcctatggcagggccaagacagggcctcacactgttcctgcccccagcaggcccctgagggagggagctgtcagccagggaaaaccgagaacaccatcaccatgacaaccagtcaccagcctcaggacagatacaaagctgtctggcttatcttcttcatgctgggtctgggaacgctgctcccgtggaattttttcatgacggccactcagtatttcacaaaccgcctggacatgtcccagaatgtgtccttggtcactgctgaactgagcaaggacgcccaggcgtcagccgcccctgcagcacccttgcctgagcggaactctctcagtgccatcttcaacaatgtcatgaccctatgtgccatgctgcccctgctgttattcacctacctcaactccttcctgcatcagaggatcccccagtccgtacggatcctgggcagcctggtggccatcctgctggtgtttctgatcactgccatcctggtgaaggtgcagctggatgctctgcccttctttgtcatcaccatgatcaagatcgtgctcattaattcatttggtgccatcctgcagggcagcctgtttggtctggctggccttctgcctgccagctacacggcccccatcatgagtggccagggcctagcaggcttctttgcctccgtggccatgatctgcgctattgccagtggctcggagctatcagaaagtgccttcggctactttatcacagcctgtgctgttatcattttgaccatcatctgttacctgggcctgccccgcctggaattctaccgctactaccagcagctcaagcttgaaggacccggggagcaggagaccaagttggacctcattagcaaaggagaggagccaagagcaggcaaagaggaatctggagtttcagtctccaactctcagcccaccaatgaaagccactctatcaaagccatcctgaaaaatatctcagtcctggctttctctgtctgcttcatcttcactatcaccattgggatgtttccagccgtgactgttgaggtcaagtccagcatcgcaggcagcagcacctgggaacgttacttcattcctgtgtcctgtttcttgactttcaatatctttgactggttgggccggagcctcacagctgtattcatgtggcctgggaaggacagccgctggctgccaagcctggtgctggcccggctggtgtttgtgccactgctgctgctgtgcaacattaagccccgccgctacctgactgtggtcttcgagcacgatgcctggttcatcttcttcatggctgcctttgccttctccaacggctacctcgccagcctctgcatgtgcttcgggcccaagaaagtgaagccagctgaggcagagaccgcaggagccatcatggccttcttcctgtgtctgggtctggcactgggggctgttttctccttcctgttccgggcaattgtgtgacaaaggatggacagaaggactgcctgcctccctccctgtctgcctcctgccccttccttctgccaggggtgatcctgagtggtctggcggttttttcttctaactgacttctgctttccacggcgtgtgctgggcccggatctccaggccctggggagggagcctctggacggacagtggggacattgtgggtttggggctcagagtcgagggacggggtgtagcctcggcatttgcttgagtttctccactcttggctctgactgatccctgcttgtgcaggccagtggaggctcttgggcttggagaacacgtgtgtctctgtgtatgtgtctgtgtgtctgcgtccgtgtctgtcagactgtctgcctgtcctggggtggctaggagctgggtctgaccgttgtatggtttgacctgatatactccattctcccctgcgcctcctcctctgtgttctctccatgtccccctcccaactccccatgcccagttcttacccatcatgcaccctgtacagttgccacgttactgccttttttaaaaatatatttgacagaaaccaggtgccttcagaggctctctgatttaaataaacctttcttgttttttt

SEQ ID NO: 28944 - DNA, 2168 bp, Homo sapiens
  source 1..2168: mol_type = unassigned DNA
ggagcctgaggaccctgcggggaccgggacccaagctgggcggggcggcctggctcccgggcctaaaacaggctgcggtcacgttgacctccgcaaggggcaggcgagtggacgggtgatccccatcgatctggcccctgagggagggagctgtcagccagggaaaaccgagaacaccatcaccatgacaaccagtcaccagcctcaggacagatacaaagctgtctggcttatcttcttcatgctgggtctgggaacgctgctcccgtggaattttttcatgacggccactcagtatttcacaaaccgcctggacatgtcccagaatgtgtccttggtcactgctgaactgagcaaggacgcccaggcgtcagccgcccctgcagcacccttgcctgagcggaactctctcagtgccatcttcaacaatgtcatgaccctatgtgccatgctgcccctgctgttattcacctacctcaactccttcctgcatcagaggatcccccagtccgtacggatcctgggcagcctggtggccatcctgctggtgtttctgatcactgccatcctggtgaaggtgcagctggatgctctgcccttctttgtcatcaccatgatcaagatcgtgctcattaattcatttggtgccatcctgcagggcagcctgtttggtctggctggccttctgcctgccagctacacggcccccatcatgagtggccagggcctagcaggcttctttgcctccgtggccatgatctgcgctattgccagtggctcggagctatcagaaagtgccttcggctactttatcacagcctgtgctgttatcattttgaccatcatctgttacctgggcctgccccgcctggaattctaccgctactaccagcagctcaagcttgaaggacccggggagcaggagaccaagttggacctcattagcaaaggagaggagccaagagcaggcaaagaggaatctggagtttcagtctccaactctcagcccaccaatgaaagccactctatcaaagccatcctgaaaaatatctcagtcctggctttctctgtctgcttcatcttcactatcaccattgggatgtttccagccgtgactgttgaggtcaagtccagcatcgcaggcagcagcacctgggaacgttacttcattcctgtgtcctgtttcttgactttcaatatctttgactggttgggccggagcctcacagctgtattcatgtggcctgggaaggacagccgctggctgccaagcctggtgctggcccggctggtgtttgtgccactgctgctgctgtgcaacattaagccccgccgctacctgactgtggtcttcgagcacgatgcctggttcatcttcttcatggctgcctttgccttctccaacggctacctcgccagcctctgcatgtgcttcgggcccaagaaagtgaagccagctgaggcagagaccgcaggagccatcatggccttcttcctgtgtctgggtctggcactgggggctgttttctccttcctgttccgggcaattgtgtgacaaaggatggacagaaggactgcctgcctccctccctgtctgcctcctgccccttccttctgccaggggtgatcctgagtggtctggcggttttttcttctaactgacttctgctttccacggcgtgtgctgggcccggatctccaggccctggggagggagcctctggacggacagtggggacattgtgggtttggggctcagagtcgagggacggggtgtagcctcggcatttgcttgagtttctccactcttggctctgactgatccctgcttgtgcaggccagtggaggctcttgggcttggagaacacgtgtgtctctgtgtatgtgtctgtgtgtctgcgtccgtgtctgtcagactgtctgcctgtcctggggtggctaggagctgggtctgaccgttgtatggtttgacctgatatactccattctcccctgcgcctcctcctctgtgttctctccatgtccccctcccaactccccatgcccagttcttacccatcatgcaccctgtacagttgccacgttactgccttttttaaaaatatatttgacagaaaccaggtgccttcagaggctctctgatttaaataaacctttcttgttttttt

SEQ ID NO: 28945 - DNA, 2275 bp, Homo sapiens
  source 1..2275: mol_type = unassigned DNA
ggagcctgaggaccctgcggggaccgggacccaagctgggcggggcggcctggctcccgggcctaaaacaggctgcggtcacgttgacctccgcaaggggcaggcgagtggacgggtgatccccatcgatctggagcccgtggacaaggcccactgcctgagcctgaactaggagcacctcctagggactgcccaggcttgctctgctctgacccttctgctggccagtctgggcacctggcccctgagggagggagctgtcagccagggaaaaccgagaacaccatcaccatgacaaccagtcaccagcctcaggacagatacaaagctgtctggcttatcttcttcatgctgggtctgggaacgctgctcccgtggaattttttcatgacggccactcagtatttcacaaaccgcctggacatgtcccagaatgtgtccttggtcactgctgaactgagcaaggacgcccaggcgtcagccgcccctgcagcacccttgcctgagcggaactctctcagtgccatcttcaacaatgtcatgaccctatgtgccatgctgcccctgctgttattcacctacctcaactccttcctgcatcagaggatcccccagtccgtacggatcctgggcagcctggtggccatcctgctggtgtttctgatcactgccatcctggtgaaggtgcagctggatgctctgcccttctttgtcatcaccatgatcaagatcgtgctcattaattcatttggtgccatcctgcagggcagcctgtttggtctggctggccttctgcctgccagctacacggcccccatcatgagtggccagggcctagcaggcttctttgcctccgtggccatgatctgcgctattgccagtggctcggagctatcagaaagtgccttcggctactttatcacagcctgtgctgttatcattttgaccatcatctgttacctgggcctgccccgcctggaattctaccgctactaccagcagctcaagcttgaaggacccggggagcaggagaccaagttggacctcattagcaaaggagaggagccaagagcaggcaaagaggaatctggagtttcagtctccaactctcagcccaccaatgaaagccactctatcaaagccatcctgaaaaatatctcagtcctggctttctctgtctgcttcatcttcactatcaccattgggatgtttccagccgtgactgttgaggtcaagtccagcatcgcaggcagcagcacctgggaacgttacttcattcctgtgtcctgtttcttgactttcaatatctttgactggttgggccggagcctcacagctgtattcatgtggcctgggaaggacagccgctggctgccaagcctggtgctggcccggctggtgtttgtgccactgctgctgctgtgcaacattaagccccgccgctacctgactgtggtcttcgagcacgatgcctggttcatcttcttcatggctgcctttgccttctccaacggctacctcgccagcctctgcatgtgcttcgggcccaagaaagtgaagccagctgaggcagagaccgcaggagccatcatggccttcttcctgtgtctgggtctggcactgggggctgttttctccttcctgttccgggcaattgtgtgacaaaggatggacagaaggactgcctgcctccctccctgtctgcctcctgccccttccttctgccaggggtgatcctgagtggtctggcggttttttcttctaactgacttctgctttccacggcgtgtgctgggcccggatctccaggccctggggagggagcctctggacggacagtggggacattgtgggtttggggctcagagtcgagggacggggtgtagcctcggcatttgcttgagtttctccactcttggctctgactgatccctgcttgtgcaggccagtggaggctcttgggcttggagaacacgtgtgtctctgtgtatgtgtctgtgtgtctgcgtccgtgtctgtcagactgtctgcctgtcctggggtggctaggagctgggtctgaccgttgtatggtttgacctgatatactccattctcccctgcgcctcctcctctgtgttctctccatgtccccctcccaactccccatgcccagttcttacccatcatgcaccctgtacagttgccacgttactgccttttttaaaaatatatttgacagaaaccaggtgccttcagaggctctctgatttaaataaacctttcttgttttttt

SEQ ID NO: 28946 - DNA, 2258 bp, Homo sapiens
  source 1..2258: mol_type = unassigned DNA
cagcgcgggagcagtgcttctgcggcaggcttctcagaatggggccccatgaagcctgagggactctctcctgataacaccctgtgccacctttttcattctggatccgcacccaggagcccgtggacaaggcccactgcctgagcctgaactaggagcacctcctagggactgcccaggcttgctctgctctgacccttctgctggccagtctgggcacctggcccctgagggagggagctgtcagccagggaaaaccgagaacaccatcaccatgacaaccagtcaccagcctcaggacagatacaaagctgtctggcttatcttcttcatgctgggtctgggaacgctgctcccgtggaattttttcatgacggccactcagtatttcacaaaccgcctggacatgtcccagaatgtgtccttggtcactgctgaactgagcaaggacgcccaggcgtcagccgcccctgcagcacccttgcctgagcggaactctctcagtgccatcttcaacaatgtcatgaccctatgtgccatgctgcccctgctgttattcacctacctcaactccttcctgcatcagaggatcccccagtccgtacggatcctgggcagcctggtggccatcctgctggtgtttctgatcactgccatcctggtgaaggtgcagctggatgctctgcccttctttgtcatcaccatgatcaagatcgtgctcattaattcatttggtgccatcctgcagggcagcctgtttggtctggctggccttctgcctgccagctacacggcccccatcatgagtggccagggcctagcaggcttctttgcctccgtggccatgatctgcgctattgccagtggctcggagctatcagaaagtgccttcggctactttatcacagcctgtgctgttatcattttgaccatcatctgttacctgggcctgccccgcctggaattctaccgctactaccagcagctcaagcttgaaggacccggggagcaggagaccaagttggacctcattagcaaaggagaggagccaagagcaggcaaagaggaatctggagtttcagtctccaactctcagcccaccaatgaaagccactctatcaaagccatcctgaaaaatatctcagtcctggctttctctgtctgcttcatcttcactatcaccattgggatgtttccagccgtgactgttgaggtcaagtccagcatcgcaggcagcagcacctgggaacgttacttcattcctgtgtcctgtttcttgactttcaatatctttgactggttgggccggagcctcacagctgtattcatgtggcctgggaaggacagccgctggctgccaagcctggtgctggcccggctggtgtttgtgccactgctgctgctgtgcaacattaagccccgccgctacctgactgtggtcttcgagcacgatgcctggttcatcttcttcatggctgcctttgccttctccaacggctacctcgccagcctctgcatgtgcttcgggcccaagaaagtgaagccagctgaggcagagaccgcaggagccatcatggccttcttcctgtgtctgggtctggcactgggggctgttttctccttcctgttccgggcaattgtgtgacaaaggatggacagaaggactgcctgcctccctccctgtctgcctcctgccccttccttctgccaggggtgatcctgagtggtctggcggttttttcttctaactgacttctgctttccacggcgtgtgctgggcccggatctccaggccctggggagggagcctctggacggacagtggggacattgtgggtttggggctcagagtcgagggacggggtgtagcctcggcatttgcttgagtttctccactcttggctctgactgatccctgcttgtgcaggccagtggaggctcttgggcttggagaacacgtgtgtctctgtgtatgtgtctgtgtgtctgcgtccgtgtctgtcagactgtctgcctgtcctggggtggctaggagctgggtctgaccgttgtatggtttgacctgatatactccattctcccctgcgcctcctcctctgtgttctctccatgtccccctcccaactccccatgcccagttcttacccatcatgcaccctgtacagttgccacgttactgccttttttaaaaatatatttgacagaaaccaggtgccttcagaggctctctgatttaaataaacctttcttgttttttt

SEQ ID NO: 28947 - DNA, 2219 bp, Homo sapiens
  source 1..2219: mol_type = unassigned DNA
gaatgtgccccggcgggagagggaagctgcagcgagagcgcgcggatctcagcgcgggagcagtgcttctgcggcaggagcccgtggacaaggcccactgcctgagcctgaactaggagcacctcctagggactgcccaggcttgctctgctctgacccttctgctggccagtctgggcacctggcccctgagggagggagctgtcagccagggaaaaccgagaacaccatcaccatgacaaccagtcaccagcctcaggacagatacaaagctgtctggcttatcttcttcatgctgggtctgggaacgctgctcccgtggaattttttcatgacggccactcagtatttcacaaaccgcctggacatgtcccagaatgtgtccttggtcactgctgaactgagcaaggacgcccaggcgtcagccgcccctgcagcacccttgcctgagcggaactctctcagtgccatcttcaacaatgtcatgaccctatgtgccatgctgcccctgctgttattcacctacctcaactccttcctgcatcagaggatcccccagtccgtacggatcctgggcagcctggtggccatcctgctggtgtttctgatcactgccatcctggtgaaggtgcagctggatgctctgcccttctttgtcatcaccatgatcaagatcgtgctcattaattcatttggtgccatcctgcagggcagcctgtttggtctggctggccttctgcctgccagctacacggcccccatcatgagtggccagggcctagcaggcttctttgcctccgtggccatgatctgcgctattgccagtggctcggagctatcagaaagtgccttcggctactttatcacagcctgtgctgttatcattttgaccatcatctgttacctgggcctgccccgcctggaattctaccgctactaccagcagctcaagcttgaaggacccggggagcaggagaccaagttggacctcattagcaaaggagaggagccaagagcaggcaaagaggaatctggagtttcagtctccaactctcagcccaccaatgaaagccactctatcaaagccatcctgaaaaatatctcagtcctggctttctctgtctgcttcatcttcactatcaccattgggatgtttccagccgtgactgttgaggtcaagtccagcatcgcaggcagcagcacctgggaacgttacttcattcctgtgtcctgtttcttgactttcaatatctttgactggttgggccggagcctcacagctgtattcatgtggcctgggaaggacagccgctggctgccaagcctggtgctggcccggctggtgtttgtgccactgctgctgctgtgcaacattaagccccgccgctacctgactgtggtcttcgagcacgatgcctggttcatcttcttcatggctgcctttgccttctccaacggctacctcgccagcctctgcatgtgcttcgggcccaagaaagtgaagccagctgaggcagagaccgcaggagccatcatggccttcttcctgtgtctgggtctggcactgggggctgttttctccttcctgttccgggcaattgtgtgacaaaggatggacagaaggactgcctgcctccctccctgtctgcctcctgccccttccttctgccaggggtgatcctgagtggtctggcggttttttcttctaactgacttctgctttccacggcgtgtgctgggcccggatctccaggccctggggagggagcctctggacggacagtggggacattgtgggtttggggctcagagtcgagggacggggtgtagcctcggcatttgcttgagtttctccactcttggctctgactgatccctgcttgtgcaggccagtggaggctcttgggcttggagaacacgtgtgtctctgtgtatgtgtctgtgtgtctgcgtccgtgtctgtcagactgtctgcctgtcctggggtggctaggagctgggtctgaccgttgtatggtttgacctgatatactccattctcccctgcgcctcctcctctgtgttctctccatgtccccctcccaactccccatgcccagttcttacccatcatgcaccctgtacagttgccacgttactgccttttttaaaaatatatttgacagaaaccaggtgccttcagaggctctctgatttaaataaacctttcttgttttttt

SEQ ID NO: 28948 - DNA, 2112 bp, Homo sapiens
  source 1..2112: mol_type = unassigned DNA
gaatgtgccccggcgggagagggaagctgcagcgagagcgcgcggatctcagcgcgggagcagtgcttctgcggcaggcccctgagggagggagctgtcagccagggaaaaccgagaacaccatcaccatgacaaccagtcaccagcctcaggacagatacaaagctgtctggcttatcttcttcatgctgggtctgggaacgctgctcccgtggaattttttcatgacggccactcagtatttcacaaaccgcctggacatgtcccagaatgtgtccttggtcactgctgaactgagcaaggacgcccaggcgtcagccgcccctgcagcacccttgcctgagcggaactctctcagtgccatcttcaacaatgtcatgaccctatgtgccatgctgcccctgctgttattcacctacctcaactccttcctgcatcagaggatcccccagtccgtacggatcctgggcagcctggtggccatcctgctggtgtttctgatcactgccatcctggtgaaggtgcagctggatgctctgcccttctttgtcatcaccatgatcaagatcgtgctcattaattcatttggtgccatcctgcagggcagcctgtttggtctggctggccttctgcctgccagctacacggcccccatcatgagtggccagggcctagcaggcttctttgcctccgtggccatgatctgcgctattgccagtggctcggagctatcagaaagtgccttcggctactttatcacagcctgtgctgttatcattttgaccatcatctgttacctgggcctgccccgcctggaattctaccgctactaccagcagctcaagcttgaaggacccggggagcaggagaccaagttggacctcattagcaaaggagaggagccaagagcaggcaaagaggaatctggagtttcagtctccaactctcagcccaccaatgaaagccactctatcaaagccatcctgaaaaatatctcagtcctggctttctctgtctgcttcatcttcactatcaccattgggatgtttccagccgtgactgttgaggtcaagtccagcatcgcaggcagcagcacctgggaacgttacttcattcctgtgtcctgtttcttgactttcaatatctttgactggttgggccggagcctcacagctgtattcatgtggcctgggaaggacagccgctggctgccaagcctggtgctggcccggctggtgtttgtgccactgctgctgctgtgcaacattaagccccgccgctacctgactgtggtcttcgagcacgatgcctggttcatcttcttcatggctgcctttgccttctccaacggctacctcgccagcctctgcatgtgcttcgggcccaagaaagtgaagccagctgaggcagagaccgcaggagccatcatggccttcttcctgtgtctgggtctggcactgggggctgttttctccttcctgttccgggcaattgtgtgacaaaggatggacagaaggactgcctgcctccctccctgtctgcctcctgccccttccttctgccaggggtgatcctgagtggtctggcggttttttcttctaactgacttctgctttccacggcgtgtgctgggcccggatctccaggccctggggagggagcctctggacggacagtggggacattgtgggtttggggctcagagtcgagggacggggtgtagcctcggcatttgcttgagtttctccactcttggctctgactgatccctgcttgtgcaggccagtggaggctcttgggcttggagaacacgtgtgtctctgtgtatgtgtctgtgtgtctgcgtccgtgtctgtcagactgtctgcctgtcctggggtggctaggagctgggtctgaccgttgtatggtttgacctgatatactccattctcccctgcgcctcctcctctgtgttctctccatgtccccctcccaactccccatgcccagttcttacccatcatgcaccctgtacagttgccacgttactgccttttttaaaaatatatttgacagaaaccaggtgccttcagaggctctctgatttaaataaacctttcttgttttttt

SEQ ID NO: 28949 - DNA, 2485 bp, Homo sapiens
  source 1..2485: mol_type = unassigned DNA
agtgcttctgcggcaggtgctgcccggggccggggactggggactggggactgccggggcggaagacgccgctgcccgcctgccacggagggcagggagggcgggcctgacggctccgcagcccggagaagggacgccgggtggggccccagtgcggagcgtgcggagccgcgcagcacgtggcgcgcacgggccagggagcctgaggaccctgcggggaccgggacccaagctgggcggggcggcctggctcccgggcctaaaacaggctgcggtcacgttgacctccgcaaggggcaggcgagtggacgggtgatccccatcgatctggagcccgtggacaaggcccactgcctgagcctgaactaggagcacctcctagggactgcccaggcttgctctgctctgacccttctgctggccagtctgggcacctgcaggcccctgagggagggagctgtcagccagggaaaaccgagaacaccatcaccatgacaaccagtcaccagcctcaggacagatacaaagctgtctggcttatcttcttcatgctgggtctgggaacgctgctcccgtggaattttttcatgacggccactcagtatttcacaaaccgcctggacatgtcccagaatgtgtccttggtcactgctgaactgagcaaggacgcccaggcgtcagccgcccctgcagcacccttgcctgagcggaactctctcagtgccatcttcaacaatgtcatgaccctatgtgccatgctgcccctgctgttattcacctacctcaactccttcctgcatcagaggatcccccagtccgtacggatcctgggcagcctggtggccatcctgctggtgtttctgatcactgccatcctggtgaaggtgcagctggatgctctgcccttctttgtcatcaccatgatcaagatcgtgctcattaattcatttggtgccatcctgcagggcagcctgtttggtctggctggccttctgcctgccagctacacggcccccatcatgagtggccagggcctagcaggcttctttgcctccgtggccatgatctgcgctattgccagtggctcggagctatcagaaagtgccttcggctactttatcacagcctgtgctgttatcattttgaccatcatctgttacctgggcctgccccgcctggaattctaccgctactaccagcagctcaagcttgaaggacccggggagcaggagaccaagttggacctcattagcaaaggagaggagccaagagcaggcaaagaggaatctggagtttcagtctccaactctcagcccaccaatgaaagccactctatcaaagccatcctgaaaaatatctcagtcctggctttctctgtctgcttcatcttcactatcaccattgggatgtttccagccgtgactgttgaggtcaagtccagcatcgcaggcagcagcacctgggaacgttacttcattcctgtgtcctgtttcttgactttcaatatctttgactggttgggccggagcctcacagctgtattcatgtggcctgggaaggacagccgctggctgccaagcctggtgctggcccggctggtgtttgtgccactgctgctgctgtgcaacattaagccccgccgctacctgactgtggtcttcgagcacgatgcctggttcatcttcttcatggctgcctttgccttctccaacggctacctcgccagcctctgcatgtgcttcgggcccaagaaagtgaagccagctgaggcagagaccgcaggagccatcatggccttcttcctgtgtctgggtctggcactgggggctgttttctccttcctgttccgggcaattgtgtgacaaaggatggacagaaggactgcctgcctccctccctgtctgcctcctgccccttccttctgccaggggtgatcctgagtggtctggcggttttttcttctaactgacttctgctttccacggcgtgtgctgggcccggatctccaggccctggggagggagcctctggacggacagtggggacattgtgggtttggggctcagagtcgagggacggggtgtagcctcggcatttgcttgagtttctccactcttggctctgactgatccctgcttgtgcaggccagtggaggctcttgggcttggagaacacgtgtgtctctgtgtatgtgtctgtgtgtctgcgtccgtgtctgtcagactgtctgcctgtcctggggtggctaggagctgggtctgaccgttgtatggtttgacctgatatactccattctcccctgcgcctcctcctctgtgttctctccatgtccccctcccaactccccatgcccagttcttacccatcatgcaccctgtacagttgccacgttactgccttttttaaaaatatatttgacagaaaccaggtgccttcagaggctctctgatttaaataaacctttcttgtttttttctccatggct

SEQ ID NO: 28950 - DNA, 2326 bp, Homo sapiens
  source 1..2326: mol_type = unassigned DNA
gaagggcccctcccactgagtcggctctggtctccccgcccctgagccgcgaggactggacgcagctggctgcggagctctgggcgggcgctggggtcgcctgttgcagcctctcttccgcccggcggcccacaccggtcaggcccggcgcgggctgcgctctccagctgtggctatggccccagccccgagatgaggagggagagaactaggggcccgcaggcctgggaatttccgtcccccaccaagtccggatgctcactccaaagtctcagcagcaggcccctgagggagggagctgtcagccagggaaaaccgagaacaccatcaccatgacaaccagtcaccagcctcaggacagatacaaagctgtctggcttatcttcttcatgctgggtctgggaacgctgctcccgtggaattttttcatgacggccactcagtatttcacaaaccgcctggacatgtcccagaatgtgtccttggtcactgctgaactgagcaaggacgcccaggcgtcagccgcccctgcagcacccttgcctgagcggaactctctcagtgccatcttcaacaatgtcatgaccctatgtgccatgctgcccctgctgttattcacctacctcaactccttcctgcatcagaggatcccccagtccgtacggatcctgggcagcctggtggccatcctgctggtgtttctgatcactgccatcctggtgaaggtgcagctggatgctctgcccttctttgtcatcaccatgatcaagatcgtgctcattaattcatttggtgccatcctgcagggcagcctgtttggtctggctggccttctgcctgccagctacacggcccccatcatgagtggccagggcctagcaggcttctttgcctccgtggccatgatctgcgctattgccagtggctcggagctatcagaaagtgccttcggctactttatcacagcctgtgctgttatcattttgaccatcatctgttacctgggcctgccccgcctggaattctaccgctactaccagcagctcaagcttgaaggacccggggagcaggagaccaagttggacctcattagcaaaggagaggagccaagagcaggcaaagaggaatctggagtttcagtctccaactctcagcccaccaatgaaagccactctatcaaagccatcctgaaaaatatctcagtcctggctttctctgtctgcttcatcttcactatcaccattgggatgtttccagccgtgactgttgaggtcaagtccagcatcgcaggcagcagcacctgggaacgttacttcattcctgtgtcctgtttcttgactttcaatatctttgactggttgggccggagcctcacagctgtattcatgtggcctgggaaggacagccgctggctgccaagcctggtgctggcccggctggtgtttgtgccactgctgctgctgtgcaacattaagccccgccgctacctgactgtggtcttcgagcacgatgcctggttcatcttcttcatggctgcctttgccttctccaacggctacctcgccagcctctgcatgtgcttcgggcccaagaaagtgaagccagctgaggcagagaccgcaggagccatcatggccttcttcctgtgtctgggtctggcactgggggctgttttctccttcctgttccgggcaattgtgtgacaaaggatggacagaaggactgcctgcctccctccctgtctgcctcctgccccttccttctgccaggggtgatcctgagtggtctggcggttttttcttctaactgacttctgctttccacggcgtgtgctgggcccggatctccaggccctggggagggagcctctggacggacagtggggacattgtgggtttggggctcagagtcgagggacggggtgtagcctcggcatttgcttgagtttctccactcttggctctgactgatccctgcttgtgcaggccagtggaggctcttgggcttggagaacacgtgtgtctctgtgtatgtgtctgtgtgtctgcgtccgtgtctgtcagactgtctgcctgtcctggggtggctaggagctgggtctgaccgttgtatggtttgacctgatatactccattctcccctgcgcctcctcctctgtgttctctccatgtccccctcccaactccccatgcccagttcttacccatcatgcaccctgtacagttgccacgttactgccttttttaaaaatatatttgacagaaaccaggtgccttcagaggctctctgatttaaataaacctttcttgtttttttctccatggct

SEQ ID NO: 28951 - DNA, 2162 bp, Homo sapiens
  source 1..2162: mol_type = unassigned DNA
gggctgcgctctccagctgtggctatggccccagccccgagatgaggagggagagaactaggggcccgcaggcctgggaatttccgtcccccaccaagtccggatgctcactccaaagtctcagcaggcccctgagggagggagctgtcagccagggaaaaccgagaacaccatcaccatgacaaccagtcaccagcctcaggacagatacaaagctgtctggcttatcttcttcatgctgggtctgggaacgctgctcccgtggaattttttcatgacggccactcagtatttcacaaaccgcctggacatgtcccagaatgtgtccttggtcactgctgaactgagcaaggacgcccaggcgtcagccgcccctgcagcacccttgcctgagcggaactctctcagtgccatcttcaacaatgtcatgaccctatgtgccatgctgcccctgctgttattcacctacctcaactccttcctgcatcagaggatcccccagtccgtacggatcctgggcagcctggtggccatcctgctggtgtttctgatcactgccatcctggtgaaggtgcagctggatgctctgcccttctttgtcatcaccatgatcaagatcgtgctcattaattcatttggtgccatcctgcagggcagcctgtttggtctggctggccttctgcctgccagctacacggcccccatcatgagtggccagggcctagcaggcttctttgcctccgtggccatgatctgcgctattgccagtggctcggagctatcagaaagtgccttcggctactttatcacagcctgtgctgttatcattttgaccatcatctgttacctgggcctgccccgcctggaattctaccgctactaccagcagctcaagcttgaaggacccggggagcaggagaccaagttggacctcattagcaaaggagaggagccaagagcaggcaaagaggaatctggagtttcagtctccaactctcagcccaccaatgaaagccactctatcaaagccatcctgaaaaatatctcagtcctggctttctctgtctgcttcatcttcactatcaccattgggatgtttccagccgtgactgttgaggtcaagtccagcatcgcaggcagcagcacctgggaacgttacttcattcctgtgtcctgtttcttgactttcaatatctttgactggttgggccggagcctcacagctgtattcatgtggcctgggaaggacagccgctggctgccaagcctggtgctggcccggctggtgtttgtgccactgctgctgctgtgcaacattaagccccgccgctacctgactgtggtcttcgagcacgatgcctggttcatcttcttcatggctgcctttgccttctccaacggctacctcgccagcctctgcatgtgcttcgggcccaagaaagtgaagccagctgaggcagagaccgcaggagccatcatggccttcttcctgtgtctgggtctggcactgggggctgttttctccttcctgttccgggcaattgtgtgacaaaggatggacagaaggactgcctgcctccctccctgtctgcctcctgccccttccttctgccaggggtgatcctgagtggtctggcggttttttcttctaactgacttctgctttccacggcgtgtgctgggcccggatctccaggccctggggagggagcctctggacggacagtggggacattgtgggtttggggctcagagtcgagggacggggtgtagcctcggcatttgcttgagtttctccactcttggctctgactgatccctgcttgtgcaggccagtggaggctcttgggcttggagaacacgtgtgtctctgtgtatgtgtctgtgtgtctgcgtccgtgtctgtcagactgtctgcctgtcctggggtggctaggagctgggtctgaccgttgtatggtttgacctgatatactccattctcccctgcgcctcctcctctgtgttctctccatgtccccctcccaactccccatgcccagttcttacccatcatgcaccctgtacagttgccacgttactgccttttttaaaaatatatttgacagaaaccaggtgccttcagaggctctctgatttaaataaacctttcttgttttttt

SEQ ID NO: 28952 - DNA, 846 bp, Homo sapiens
  source 1..846: mol_type = unassigned DNA
gaagggcccctcccactgagtcggctctggtctccccgcccctgagccgcgaggactggacgcagctggctgcggagctctgggcgggcgctggggtcgcctgttgcagcctctcttccgcccggcggcccacaccggtcaggcccggcgcgggctgcgctctccagctgtggctatggccccagccccgagatgaggagggagagaactaggggcccgcaggcctgggaatttccgtcccccaccaagtccggatgctcactccaaagtctcagcagatacaaagctgtctggcttatcttcttcatgctgggtctgggaacgctgctcccgtggaattttttcatgacggccactcagtatttcacaaaccgcctggacatgtcccagaatgtgtccttggtcactgctgaactgagcaaggacgcccaggcgtcagccgcccctgcagcacccttgcctgagcggaactctctcagtgccatcttcaacaatgtcatgaccctatgtgccatgctgcccctgctgttattcacctacctcaactccttcctgcatcagaggatcccccagtccgtacggatcctgggcagcctggtggccatcctgctggtgtttctgatcactgccatcctggtgaaggtgcagctggatgctctgcccttctttgtcatcaccatgatcaagatcgtgctcattaattgtaagctgggccaggagggggcctatgggaggaggcatgcccaactacccccactcttttttgacccagcgttagccagagagaagcccagcctccgcctggagggagtggatgctgtgagcagctgggattcagaggcctga

SEQ ID NO: 28953 - DNA, 2514 bp, Homo sapiens
  source 1..2514: mol_type = unassigned DNA
ggtggcgcgaccctctgtccccgcctcggggcggagcccaggtcccagcctgcggagcgcgagacacgccgaaatccgcccgaggctacctgtgcgactccagccgccctgcaccggaatctggggagacccgccccccgccccaccggtctgcggccctccgccccagcgcaggtgcaggtgcggcttctctgcccctttcaccccaggcgcatccgccgcggcggccatggcgcgaggagacgccccgcgggacagctaccacctggtcgggatcagcttcttcatcctggggctgggcaccctccttccctggaacttcttcatcaccgccatcccgtacttccaggcgcgactggccggggccggcaacagcacagccaggatcctgagcaccaaccacacgggtcccgaggatgccttcaacttcaacaattgggtgacgctgctgtcccagctgcccctgctgctcttcaccctcctcaactccttcctgtaccagtgcgtcccggagacggtgcgcattctgggcagcctgctggccatactgctgctctttgccctgacagcagcgctggtcaaggtggacatgagccccggacccttcttctccatcaccatggcctccgtctgcttcatcaactccttcagtgcagtcctacagggcagcctcttcgggcagctgggcaccatgccctccacctacagcaccctcttcctcagcggccagggcctggctgggatctttgctgcccttgccatgctcctgtccatggccagtggcgtggacgccgagacctctgccctggggtactttatcacgccctgtgtgggcatcctcatgtccatcgtgtgttacctgagcctgcctcacctgaagtttgcccgctactacctggccaataaatcatcccaggcccaagctcaggagctggagaccaaagctgagctcctccagtctgatgagaacgggattcccagtagtccccagaaagtagctctgaccctggatcttgacctggagaaggagccggaatcagagccagatgagccccagaagccaggaaaaccttcagtcttcactgtcttccagaagatctggctgacagcgctgtgccttgtgttggtcttcacagtcaccctgtccgtcttccccgccatcacagccatggtgaccagctccaccagtcctgggaagtggagtcagttcttcaaccccatctgctgcttcctcctcttcaacatcatggactggctgggacggagcctgacctcttacttcctgtggccagacgaggacagccggctgctgcccctgctggtctgcctgcggttcctgttcgtgcccctcttcatgctgtgccacgtgccccagaggtcccggctgcccatcctcttcccacaggatgcctacttcatcaccttcatgctgctctttgccgtttctaatggctacctggtgtccctcaccatgtgcctggcgcccaggcaggtgctgccacacgagagggaggtggccggcgccctcatgaccttcttcctggccctgggactttcctgtggagcctccctctccttcctcttcaaggcgctgctctgaagtggcccctccaggctctttggcagcctcttctcgacgtctccttccggagctgagatccagcccagggcgaatggcgagcttggctcaggcctctgcggggtggaggcccctgggcctgaggctgccagcagcgggcaggagctgctcttcatccacttggagtgctgtggggaagaaatcaccaccggtcattctaaccctcacccaggaatgggggtgactcgcacaagacctcatggaaagggtgatgactagggaaaagagggtgcagggcacggctgctccccaccaccaggtctgcatttgttcatcatcatcaggagcagaggtgaccagagggttcagagtgggaggcggggccagcccaggccaggagcgcctcatcttcccaggcctcagccacccagggtaaaaggtgccagggaagttgtgggcacctgagaggaggaacagatgtggaggacctgagggtgctcaaagggccaggctcagcctcaagcagtgttttcattgccaacacttactgtacccactccgcagagcccagctgggcctgggccccagggccacagctagcctgcatgtgtgtactgcactttacagtttgcaaagctcttccatacccactctctcaccgaagcctaattgaggctcttggaaggagtcaggcaaggattgtgcttcccccattatacaggtgacaaaactgagtcctggggaaagtgactggtccgtggtagagccgggacccaatcccctctctctcctccctgttggtgctgttcttcctgcccaacacctgtttctcttttcctcaaggggtttggggcaggagcctgggcacttactccccgtttttgctgtttctccttctgaccctgctcttgggtctaataaccccatttatttgt

SEQ ID NO: 28954 - DNA, 2505 bp, Homo sapiens
  source 1..2505: mol_type = unassigned DNA
acgctctgggcggggactccgcagcggctccctagttagggggcgccccggtgggttccagctttaggggtcgcaggagcggctctggcatcacctcggagctgacgaagcgggaagagccccgcaccagtgctgcccctacagagctctcggcggggggtggaggtgcaggtgcggcttctctgcccctttcaccccaggcgcatccgccgcggcggccatggcgcgaggagacgccccgcgggacagctaccacctggtcgggatcagcttcttcatcctggggctgggcaccctccttccctggaacttcttcatcaccgccatcccgtacttccaggcgcgactggccggggccggcaacagcacagccaggatcctgagcaccaaccacacgggtcccgaggatgccttcaacttcaacaattgggtgacgctgctgtcccagctgcccctgctgctcttcaccctcctcaactccttcctgtaccagtgcgtcccggagacggtgcgcattctgggcagcctgctggccatactgctgctctttgccctgacagcagcgctggtcaaggtggacatgagccccggacccttcttctccatcaccatggcctccgtctgcttcatcaactccttcagtgcagtcctacagggcagcctcttcgggcagctgggcaccatgccctccacctacagcaccctcttcctcagcggccagggcctggctgggatctttgctgcccttgccatgctcctgtccatggccagtggcgtggacgccgagacctctgccctggggtactttatcacgccctgtgtgggcatcctcatgtccatcgtgtgttacctgagcctgcctcacctgaagtttgcccgctactacctggccaataaatcatcccaggcccaagctcaggagctggagaccaaagctgagctcctccagtctgatgagaacgggattcccagtagtccccagaaagtagctctgaccctggatcttgacctggagaaggagccggaatcagagccagatgagccccagaagccaggaaaaccttcagtcttcactgtcttccagaagatctggctgacagcgctgtgccttgtgttggtcttcacagtcaccctgtccgtcttccccgccatcacagccatggtgaccagctccaccagtcctgggaagtggagtcagttcttcaaccccatctgctgcttcctcctcttcaacatcatggactggctgggacggagcctgacctcttacttcctgtggccagacgaggacagccggctgctgcccctgctggtctgcctgcggttcctgttcgtgcccctcttcatgctgtgccacgtgccccagaggtcccggctgcccatcctcttcccacaggatgcctacttcatcaccttcatgctgctctttgccgtttctaatggctacctggtgtccctcaccatgtgcctggcgcccaggcaggtgctgccacacgagagggaggtggccggcgccctcatgaccttcttcctggccctgggactttcctgtggagcctccctctccttcctcttcaaggcgctgctctgaagtggcccctccaggctctttggcagcctcttctcgacgtctccttccggagctgagatccagcccagggcgaatggcgagcttggctcaggcctctgcggggtggaggcccctgggcctgaggctgccagcagcgggcaggagctgctcttcatccacttggagtgctgtggggaagaaatcaccaccggtcattctaaccctcacccaggaatgggggtgactcgcacaagacctcatggaaagggtgatgactagggaaaagagggtgcagggcacggctgctccccaccaccaggtctgcatttgttcatcatcatcaggagcagaggtgaccagagggttcagagtgggaggcggggccagcccaggccaggagcgcctcatcttcccaggcctcagccacccagggtaaaaggtgccagggaagttgtgggcacctgagaggaggaacagatgtggaggacctgagggtgctcaaagggccaggctcagcctcaagcagtgttttcattgccaacacttactgtacccactccgcagagcccagctgggcctgggccccagggccacagctagcctgcatgtgtgtactgcactttacagtttgcaaagctcttccatacccactctctcaccgaagcctaattgaggctcttggaaggagtcaggcaaggattgtgcttcccccattatacaggtgacaaaactgagtcctggggaaagtgactggtccgtggtagagccgggacccaatcccctctctctcctccctgttggtgctgttcttcctgcccaacacctgtttctcttttcctcaaggggtttggggcaggagcctgggcacttactccccgtttttgctgtttctccttctgaccctgctcttgggtctaataaccccatttatttgt

SEQ ID NO: 28955 - DNA, 2509 bp, Homo sapiens
  source 1..2509: mol_type = unassigned DNA
gtggcagctctggttcccccgcccgggcccggctcgggttacgctctgggcggggactccgcagcggctccctagttagggggcgccccggtgggttccagctttaggggtcgcaggagcggctctggcatcacctcggagctgacgaagcgggaagagccccgcaccagtgctgcccctacagagctctcggcggggggtggaggcgcatccgccgcggcggccatggcgcgaggagacgccccgcgggacagctaccacctggtcgggatcagcttcttcatcctggggctgggcaccctccttccctggaacttcttcatcaccgccatcccgtacttccaggcgcgactggccggggccggcaacagcacagccaggatcctgagcaccaaccacacgggtcccgaggatgccttcaacttcaacaattgggtgacgctgctgtcccagctgcccctgctgctcttcaccctcctcaactccttcctgtaccagtgcgtcccggagacggtgcgcattctgggcagcctgctggccatactgctgctctttgccctgacagcagcgctggtcaaggtggacatgagccccggacccttcttctccatcaccatggcctccgtctgcttcatcaactccttcagtgcagtcctacagggcagcctcttcgggcagctgggcaccatgccctccacctacagcaccctcttcctcagcggccagggcctggctgggatctttgctgcccttgccatgctcctgtccatggccagtggcgtggacgccgagacctctgccctggggtactttatcacgccctgtgtgggcatcctcatgtccatcgtgtgttacctgagcctgcctcacctgaagtttgcccgctactacctggccaataaatcatcccaggcccaagctcaggagctggagaccaaagctgagctcctccagtctgatgagaacgggattcccagtagtccccagaaagtagctctgaccctggatcttgacctggagaaggagccggaatcagagccagatgagccccagaagccaggaaaaccttcagtcttcactgtcttccagaagatctggctgacagcgctgtgccttgtgttggtcttcacagtcaccctgtccgtcttccccgccatcacagccatggtgaccagctccaccagtcctgggaagtggagtcagttcttcaaccccatctgctgcttcctcctcttcaacatcatggactggctgggacggagcctgacctcttacttcctgtggccagacgaggacagccggctgctgcccctgctggtctgcctgcggttcctgttcgtgcccctcttcatgctgtgccacgtgccccagaggtcccggctgcccatcctcttcccacaggatgcctacttcatcaccttcatgctgctctttgccgtttctaatggctacctggtgtccctcaccatgtgcctggcgcccaggcaggtgctgccacacgagagggaggtggccggcgccctcatgaccttcttcctggccctgggactttcctgtggagcctccctctccttcctcttcaaggcgctgctctgaagtggcccctccaggctctttggcagcctcttctcgacgtctccttccggagctgagatccagcccagggcgaatggcgagcttggctcaggcctctgcggggtggaggcccctgggcctgaggctgccagcagcgggcaggagctgctcttcatccacttggagtgctgtggggaagaaatcaccaccggtcattctaaccctcacccaggaatgggggtgactcgcacaagacctcatggaaagggtgatgactagggaaaagagggtgcagggcacggctgctccccaccaccaggtctgcatttgttcatcatcatcaggagcagaggtgaccagagggttcagagtgggaggcggggccagcccaggccaggagcgcctcatcttcccaggcctcagccacccagggtaaaaggtgccagggaagttgtgggcacctgagaggaggaacagatgtggaggacctgagggtgctcaaagggccaggctcagcctcaagcagtgttttcattgccaacacttactgtacccactccgcagagcccagctgggcctgggccccagggccacagctagcctgcatgtgtgtactgcactttacagtttgcaaagctcttccatacccactctctcaccgaagcctaattgaggctcttggaaggagtcaggcaaggattgtgcttcccccattatacaggtgacaaaactgagtcctggggaaagtgactggtccgtggtagagccgggacccaatcccctctctctcctccctgttggtgctgttcttcctgcccaacacctgtttctcttttcctcaaggggtttggggcaggagcctgggcacttactccccgtttttgctgtttctccttctgaccctgctcttgggtctaataaccccatttatttg

SEQ ID NO: 28956 - DNA, 2257 bp, Homo sapiens
  source 1..2257: mol_type = unassigned DNA
cagtggtcctggccgtgcgccggaggcagcggcggcgtggcgcagcggcgacatggccgttgtctcagaggacgactttcagcacagttcaaactccacctacagaaccacaagcagcagtctccgagctgaccaggaggcactgcttgagaagctgctggaccgcccgccccctggcctgcagaggcccgaggaccgcttctgtggcacatacatcatcttcttcagcctgggcattggcagtctactgccatggaacttctttatcactgccaaggagtactggatgttcaaactccgcaactcctccagcccagccaccggggaggaccctgagggctcagacatcctgaactactttgagagctaccttgccgttgcctccaccgtgccctccatgctgtgcctggtggccaacttcctgcttgtcaacagggttgcagtccacatccgtgtcctggcctcactgacggtcatcctggccatcttcatggtgataactgcactggtgaaggtggacacttcctcctggacccgtggcttttttgcggtcaccattgtctgcatggtgatcctcagcggtgcctccactgtcttcagcagcagcatctacggcatgaccggctcctttcctatgaggaactcccaggcactgatatcaggaggagccatgggcgggacggtcagcgccgtggcctcattggtggacttggctgcatccagtgatgtgaggaacagcgccctggccttcttcctgacggccactgtcttcctcgtgctctgcatgggactctacctgctgctgtccaggctggagtatgccaggtactacatgaggcctgttcttgcggcccatgtgttttctggtgaagaggagcttccccaggactccctcagtgccccttcggtggcctccagattcattgattcccacacaccccctctccgccccatcctgaagaagacggccagcctgggcttctgtgtcacctacgtcttcttcatcaccagcctcatctaccccgccatctgcaccaacatcgagtccctcaacaagggttcgggctcactgtggaccaccaagtttttcatccccctcactaccttcctcctgtacaactttgctgacctatgtggccggcagctcaccgcctggatccaggtgccagggcccaatagcaaggcgctcccagggttcgtgctcctccggacctgcctcatccccctcttcgtgctctgtaactaccagccccgcgtccacctgaagactgtggtcttccagtccgatgtgtaccccgcactcctcagctccctgctggggctcagcaacggctacctcagcaccctggccctcctctacgggcctaagattgtgcccagggagctggctgaggccacgggagtggtgatgtccttttatgtgtgcttgggcttaacactgggctcagcctgctctaccctcctggtgcacctcatctagaagggaggacacaaggacattggtgcttcagagcctttgaagatgagaagagagtgcaggagggctgggggccatggaggaaaggcctaaagtttcacttggggacagagagcagagcacactcgggcctcatccctcccaagatgccagtgagccacgtccatgcccattccgtgcaaggcagatattccagtcatattaacagaacactcctgagacagttgaagaagaaatagcacaaatcaggggtactcccttcacagctgatggttaacattccaccttctttctagcccttcaaagatgctgccagtgttcgccctagagttattacaaagccagtgccaaaacccagccatgggctctttgcaacctcccagctgcgctcattccagctgacagcgagatgcaagcaaatgctcagctctccttaccctgaaggggtctccctggaatggaagtcccctggcatggtcagtcctcaggcccaagactcaagtgtgcacagacccctgtgttctgtgggtgaacaactgcccactaaccagactggaaaacccagaaagatgggccttccatgaatgcttcattccagagggaccagagggcctccctgtgcaagggatcaagcatgtctggcctgggttttcaaaaaaagagggatcctcatgacctggtggtctatggcctgggtcaagatgagggtctttcagtgttcctgtttacaacatgtcaaagccattggttcaagggcgtaataaatacttgcgtattcaa

SEQ ID NO: 28957 - DNA, 1904 bp, Homo sapiens
  source 1..1904: mol_type = unassigned DNA
cagaggccgcgcctgctgctgagcagatgcagtagccgaaactgcgcggaggcacagaggccggggagagcgttctgggtccgagggtccaggtaggggttgagccaccatctgaccgcaagctgcgtcgtgtcgccggttctgcaggcaccatgagccaggacaccgaggtggatatgaaggaggtggagctgaatgagttagagcccgagaagcagccgatgaacgcggcgtctggggcggccatgtccctggcgggagccgagaagaatggtctggtgaagatcaaggtggcggaagacgaggcggaggcggcagccgcggctaagttcacgggcctgtccaaggaggagctgctgaaggtggcaggcagccccggctgggtacgcacccgctgggcactgctgctgctcttctggctcggctggctcggcatgcttgctggtgccgtggtcataatcgtgcgagcgccgcgttgtcgcgagctaccggcgcagaagtggtggcacacgggcgccctctaccgcatcggcgaccttcaggccttccagggccacggcgcgggcaacctggcgggtctgaaggggcgtctcgattacctgagctctctgaaggtgaagggccttgtgctgggtccaattcacaagaaccagaaggatgatgtcgctcagactgacttgctgcagatcgaccccaattttggctccaaggaagattttgacagtctcttgcaatcggctaaaaaaaagagcatccgtgtcattctggaccttactcccaactaccggggtgagaactcgtggttctccactcaggttgacactgtggccaccaaggtgaaggatgctctggagttttggctgcaagctggcgtggatgggttccaggttcgggacatagagaatctgaaggatgcatcctcattcttggctgagtggcaaaatatcaccaagggcttcagtgaagacaggctcttgattgcggggactaactcctccgaccttcagcagatcctgagcctactcgaatccaacaaagacttgctgttgactagctcatacctgtctgattctggttctactggggagcatacaaaatccctagtcacacagtatttgaatgccactggcaatcgctggtgcagctggagtttgtctcaggcaaggctcctgacttccttcttgccggctcaacttctccgactctaccagctgatgctcttcaccctgccagggacccctgttttcagctacggggatgagattggcctggatgcagctgcccttcctggacagcctatggaggctccagtcatgctgtgggatgagtccagcttccctgacatcccaggggctgtaagtgccaacatgactgtgaagggccagagtgaagaccctggctccctcctttccttgttccggcggctgagtgaccagcggagtaaggagcgctccctactgcatggggacttccacgcgttctccgctgggcctggactcttctcctatatccgccactgggaccagaatgagcgttttctggtagtgcttaactttggggatgtgggcctctcggctggactgcaggcctccgacctgcctgccagcgccagcctgccagccaaggctgacctcctgctcagcacccagccaggccgtgaggagggctcccctcttgagctggaacgcctgaaactggagcctcacgaagggctgctgctccgcttcccctacgcggcctgacttcagcctgacatggacccactacccttctcctttccttcccaggccctttggcttctgatttttctcttttttaaaaacaaacaaacaaactgttgcagattatgagtgaacccccaaatagggtgttttctgccttcaaataaaagtcacccctgcatg

SEQ ID NO: 28958 - DNA, 1993 bp, Homo sapiens
  source 1..1993: mol_type = unassigned DNA
gcaggagcggtgagatcactgcctcacggcgatcctggactgacggtcacgactgcctaccctctaaccctgttctgagctgccccttgcccacacaccccaaacctgtgtgcaggatccgcctccatggagctacagcctcctgaagcctcgatcgccgtcgtgtcgattccgcgccagttgcctggctcacattcggaggctggtgtccagggtctcagcgcgggggacgactcaggcaccatgagccaggacaccgaggtggatatgaaggaggtggagctgaatgagttagagcccgagaagcagccgatgaacgcggcgtctggggcggccatgtccctggcgggagccgagaagaatggtctggtgaagatcaaggtggcggaagacgaggcggaggcggcagccgcggctaagttcacgggcctgtccaaggaggagctgctgaaggtggcaggcagccccggctgggtacgcacccgctgggcactgctgctgctcttctggctcggctggctcggcatgcttgctggtgccgtggtcataatcgtgcgagcgccgcgttgtcgcgagctaccggcgcagaagtggtggcacacgggcgccctctaccgcatcggcgaccttcaggccttccagggccacggcgcgggcaacctggcgggtctgaaggggcgtctcgattacctgagctctctgaaggtgaagggccttgtgctgggtccaattcacaagaaccagaaggatgatgtcgctcagactgacttgctgcagatcgaccccaattttggctccaaggaagattttgacagtctcttgcaatcggctaaaaaaaagagcatccgtgtcattctggaccttactcccaactaccggggtgagaactcgtggttctccactcaggttgacactgtggccaccaaggtgaaggatgctctggagttttggctgcaagctggcgtggatgggttccaggttcgggacatagagaatctgaaggatgcatcctcattcttggctgagtggcaaaatatcaccaagggcttcagtgaagacaggctcttgattgcggggactaactcctccgaccttcagcagatcctgagcctactcgaatccaacaaagacttgctgttgactagctcatacctgtctgattctggttctactggggagcatacaaaatccctagtcacacagtatttgaatgccactggcaatcgctggtgcagctggagtttgtctcaggcaaggctcctgacttccttcttgccggctcaacttctccgactctaccagctgatgctcttcaccctgccagggacccctgttttcagctacggggatgagattggcctggatgcagctgcccttcctggacagcctatggaggctccagtcatgctgtgggatgagtccagcttccctgacatcccaggggctgtaagtgccaacatgactgtgaagggccagagtgaagaccctggctccctcctttccttgttccggcggctgagtgaccagcggagtaaggagcgctccctactgcatggggacttccacgcgttctccgctgggcctggactcttctcctatatccgccactgggaccagaatgagcgttttctggtagtgcttaactttggggatgtgggcctctcggctggactgcaggcctccgacctgcctgccagcgccagcctgccagccaaggctgacctcctgctcagcacccagccaggccgtgaggagggctcccctcttgagctggaacgcctgaaactggagcctcacgaagggctgctgctccgcttcccctacgcggcctgacttcagcctgacatggacccactacccttctcctttccttcccaggccctttggcttctgatttttctcttttttaaaaacaaacaaacaaactgttgcagattatgagtgaacccccaaatagggtgttttctgccttcaaataaaagtcacccctgca

SEQ ID NO: 28959 - DNA, 2161 bp, Homo sapiens
  source 1..2161: mol_type = unassigned DNA
accgaccgcattgcggcttggttttctcacccagtgcatgtggcaggagcggtgagatcactgcctcacggcgatcctggactgacggtcacgactgcctaccctctaaccctgttctgagctgccccttgcccacacaccccaaacctgtgtgcaggatccgcctccatggagctacagcctcctgaagcctcgatcgccgtcgtgtcgattccgcgccagttgcctggctcacattcggaggctggtgtccagggtctcagcgcgggggacgactcagagttggggtctcactgtgttgcccagactggtctcgaactcttggcctcaggtgatcctcttccctcagcttcccagaatgccgagatgatagagacggggtctgactgtgttacccaggctggtcttcaactcttggcctcaagtgatcctcctgccttagcttccaagaatgctgaggttacaggcaccatgagccaggacaccgaggtggatatgaaggaggtggagctgaatgagttagagcccgagaagcagccgatgaacgcggcgtctggggcggccatgtccctggcgggagccgagaagaatggtctggtgaagatcaaggtggcggaagacgaggcggaggcggcagccgcggctaagttcacgggcctgtccaaggaggagctgctgaaggtggcaggcagccccggctgggtacgcacccgctgggcactgctgctgctcttctggctcggctggctcggcatgcttgctggtgccgtggtcataatcgtgcgagcgccgcgttgtcgcgagctaccggcgcagaagtggtggcacacgggcgccctctaccgcatcggcgaccttcaggccttccagggccacggcgcgggcaacctggcgggtctgaaggggcgtctcgattacctgagctctctgaaggtgaagggccttgtgctgggtccaattcacaagaaccagaaggatgatgtcgctcagactgacttgctgcagatcgaccccaattttggctccaaggaagattttgacagtctcttgcaatcggctaaaaaaaagagcatccgtgtcattctggaccttactcccaactaccggggtgagaactcgtggttctccactcaggttgacactgtggccaccaaggtgaaggatgctctggagttttggctgcaagctggcgtggatgggttccaggttcgggacatagagaatctgaaggatgcatcctcattcttggctgagtggcaaaatatcaccaagggcttcagtgaagacaggctcttgattgcggggactaactcctccgaccttcagcagatcctgagcctactcgaatccaacaaagacttgctgttgactagctcatacctgtctgattctggttctactggggagcatacaaaatccctagtcacacagtatttgaatgccactggcaatcgctggtgcagctggagtttgtctcaggcaaggctcctgacttccttcttgccggctcaacttctccgactctaccagctgatgctcttcaccctgccagggacccctgttttcagctacggggatgagattggcctggatgcagctgcccttcctggacagcctatggaggctccagtcatgctgtgggatgagtccagcttccctgacatcccaggggctgtaagtgccaacatgactgtgaagggccagagtgaagaccctggctccctcctttccttgttccggcggctgagtgaccagcggagtaaggagcgctccctactgcatggggacttccacgcgttctccgctgggcctggactcttctcctatatccgccactgggaccagaatgagcgttttctggtagtgcttaactttggggatgtgggcctctcggctggactgcaggcctccgacctgcctgccagcgccagcctgccagccaaggctgacctcctgctcagcacccagccaggccgtgaggagggctcccctcttgagctggaacgcctgaaactggagcctcacgaagggctgctgctccgcttcccctacgcggcctgacttcagcctgacatggacccactacccttctcctttccttcccaggccctttggcttctgatttttctcttttttaaaaacaaacaaacaaactgttgca

SEQ ID NO: 28960 - DNA, 2222 bp, Homo sapiens
  source 1..2222: mol_type = unassigned DNA
attgcggcttggttttctcacccagtgcatgtggcaggagcggtgagatcactgcctcacggcgatcctggactgacggtcacgactgcctaccctctaaccctgttctgagctgccccttgcccacacaccccaaacctgtgtgcaggatccgcctccatggagctacagcctcctgaagcctcgatcgccgtcgtgtcgattccgcgccagttgcctggctcacattcggaggctggtgtccagggtctcagcgcgggggacgactcagagacggggtctgactgtgttacccaggctggtcttcaactcttggcctcaagtgatcctcctgccttagcttccaagaatgctgaggttacagtagaaacggggtttcaccatgttagccaggctgatattgaattcctgacctcaattgatccgactgcctcggcctccggaagtgctgggattacaggcaccatgagccaggacaccgaggtggatatgaaggaggtggagctgaatgagttagagcccgagaagcagccgatgaacgcggcgtctggggcggccatgtccctggcgggagccgagaagaatggtctggtgaagatcaaggtggcggaagacgaggcggaggcggcagccgcggctaagttcacgggcctgtccaaggaggagctgctgaaggtggcaggcagccccggctgggtacgcacccgctgggcactgctgctgctcttctggctcggctggctcggcatgcttgctggtgccgtggtcataatcgtgcgagcgccgcgttgtcgcgagctaccggcgcagaagtggtggcacacgggcgccctctaccgcatcggcgaccttcaggccttccagggccacggcgcgggcaacctggcgggtctgaaggggcgtctcgattacctgagctctctgaaggtgaagggccttgtgctgggtccaattcacaagaaccagaaggatgatgtcgctcagactgacttgctgcagatcgaccccaattttggctccaaggaagattttgacagtctcttgcaatcggctaaaaaaaagagcatccgtgtcattctggaccttactcccaactaccggggtgagaactcgtggttctccactcaggttgacactgtggccaccaaggtgaaggatgctctggagttttggctgcaagctggcgtggatgggttccaggttcgggacatagagaatctgaaggatgcatcctcattcttggctgagtggcaaaatatcaccaagggcttcagtgaagacaggctcttgattgcggggactaactcctccgaccttcagcagatcctgagcctactcgaatccaacaaagacttgctgttgactagctcatacctgtctgattctggttctactggggagcatacaaaatccctagtcacacagtatttgaatgccactggcaatcgctggtgcagctggagtttgtctcaggcaaggctcctgacttccttcttgccggctcaacttctccgactctaccagctgatgctcttcaccctgccagggacccctgttttcagctacggggatgagattggcctggatgcagctgcccttcctggacagcctatggaggctccagtcatgctgtgggatgagtccagcttccctgacatcccaggggctgtaagtgccaacatgactgtgaagggccagagtgaagaccctggctccctcctttccttgttccggcggctgagtgaccagcggagtaaggagcgctccctactgcatggggacttccacgcgttctccgctgggcctggactcttctcctatatccgccactgggaccagaatgagcgttttctggtagtgcttaactttggggatgtgggcctctcggctggactgcaggcctccgacctgcctgccagcgccagcctgccagccaaggctgacctcctgctcagcacccagccaggccgtgaggagggctcccctcttgagctggaacgcctgaaactggagcctcacgaagggctgctgctccgcttcccctacgcggcctgacttcagcctgacatggacccactacccttctcctttccttcccaggccctttggcttctgatttttctcttttttaaaaacaaacaaacaaactgttgcagattatgagtgaacccccaaatagggtgttttctgccttcaaataaaagtcacccctgcatggtgaa

SEQ ID NO: 28961 - DNA, 2397 bp, Homo sapiens
  source 1..2397: mol_type = unassigned DNA
cctgaacttgcggcgcgaaaaaggcgcgcatgcgtcctacgggagcgtgctggctcaccgaccgcattgcggcttggttttctcacccagtgcatgtggcaggagcggtgagatcactgcctcacggcgatcctggactgacggtcacgactgcctaccctctaaccctgttctgagctgccccttgcccacacaccccaaacctgtgtgcaggatccgcctccatggagctacagcctcctgaagcctcgatcgccgtcgtgtcgattccgcgccagttgcctggctcacattcggaggctggtgtccagggtctcagcgcgggggacgactcagagttggggtctcactgtgttgcccagactggtctcgaactcttggcctcaggtgatcctcttccctcagcttcccagaatgccgagatgatagagacggggtctgactgtgttacccaggctggtcttcaactcttggcctcaagtgatcctcctgccttagcttccaagaatgctgaggttacagaaacggggtttcaccatgttagccaggctgatattgaattcctgacctcaattgatccgactgcctcggcctccggaagtgctgggattacaggcaccatgagccaggacaccgaggtggatatgaaggaggtggagctgaatgagttagagcccgagaagcagccgatgaacgcggcgtctggggcggccatgtccctggcgggagccgagaagaatggtctggtgaagatcaaggtggcggaagacgaggcggaggcggcagccgcggctaagttcacgggcctgtccaaggaggagctgctgaaggtggcaggcagccccggctgggtacgcacccgctgggcactgctgctgctcttctggctcggctggctcggcatgcttgctggtgccgtggtcataatcgtgcgagcgccgcgttgtcgcgagctaccggcgcagaagtggtggcacacgggcgccctctaccgcatcggcgaccttcaggccttccagggccacggcgcgggcaacctggcgggtctgaaggggcgtctcgattacctgagctctctgaaggtgaagggccttgtgctgggtccaattcacaagaaccagaaggatgatgtcgctcagactgacttgctgcagatcgaccccaattttggctccaaggaagattttgacagtctcttgcaatcggctaaaaaaaagagcatccgtgtcattctggaccttactcccaactaccggggtgagaactcgtggttctccactcaggttgacactgtggccaccaaggtgaaggatgctctggagttttggctgcaagctggcgtggatgggttccaggttcgggacatagagaatctgaaggatgcatcctcattcttggctgagtggcaaaatatcaccaagggcttcagtgaagacaggctcttgattgcggggactaactcctccgaccttcagcagatcctgagcctactcgaatccaacaaagacttgctgttgactagctcatacctgtctgattctggttctactggggagcatacaaaatccctagtcacacagtatttgaatgccactggcaatcgctggtgcagctggagtttgtctcaggcaaggctcctgacttccttcttgccggctcaacttctccgactctaccagctgatgctcttcaccctgccagggacccctgttttcagctacggggatgagattggcctggatgcagctgcccttcctggacagcctatggaggctccagtcatgctgtgggatgagtccagcttccctgacatcccaggggctgtaagtgccaacatgactgtgaagggccagagtgaagaccctggctccctcctttccttgttccggcggctgagtgaccagcggagtaaggagcgctccctactgcatggggacttccacgcgttctccgctgggcctggactcttctcctatatccgccactgggaccagaatgagcgttttctggtagtgcttaactttggggatgtgggcctctcggctggactgcaggcctccgacctgcctgccagcgccagcctgccagccaaggctgacctcctgctcagcacccagccaggccgtgaggagggctcccctcttgagctggaacgcctgaaactggagcctcacgaagggctgctgctccgcttcccctacgcggcctgacttcagcctgacatggacccactacccttctcctttccttcccaggccctttggcttctgatttttctcttttttaaaaacaaacaaacaaactgttgcagattatgagtgaacccccaaatagggtgttttctgccttcaaataaaagtcacccctgcatggtgaagtcttccctctgcttctctc

SEQ ID NO: 28962 - DNA, 1736 bp, Homo sapiens
  source 1..1736: mol_type = unassigned DNA
gcagtagccgaaactgcgcggaggcacagaggccggggagagcgttctgggtccgagggtccaggtaggggttgagccaccatctgaccgcaagctgcgtcgtgtcgccggttctgcaggcaccatgagccaggacaccgaggtggatatgaaggaggtggagctgaatgagttagagcccgagaagcagccgatgaacgcggcgtctggggcggccatgtccctggcgggagccgagaagaatggtctggtgaagatcaaggtggcggaagacgaggcggaggcggcagccgcggctaagttcacgggcctgtccaaggaggagctgctcttctggctcggctggctcggcatgcttgctggtgccgtggtcataatcgtgcgagcgccgcgttgtcgcgagctaccggcgcagaagtggtggcacacgggcgccctctaccgcatcggcgaccttcaggccttccagggccacggcgcgggcaacctggcgggtctgaaggggcgtctcgattacctgagctctctgaaggtgaagggccttgtgctgggtccaattcacaagaaccagaaggatgatgtcgctcagactgacttgctgcagatcgaccccaattttggctccaaggaagattttgacagtctcttgcaatcggctaaaaaaaagagcatccgtgtcattctggaccttactcccaactaccggggtgagaactcgtggttctccactcaggttgacactgtggccaccaaggtgaaggatgctctggagttttggctgcaagctggcgtggatgggttccaggttcgggacatagagaatctgaaggatgcatcctcattcttggctgagtggcaaaatatcaccaagggcttcagtgaagacaggctcttgattgcggggactaactcctccgaccttcagcagatcctgagcctactcgaatccaacaaagacttgctgttgactagctcatacctgtctgattctggttctactggggagcatacaaaatccctagtcacacagtatttgaatgccactggcaatcgctggtgcagctggagtttgtctcaggcaaggctcctgacttccttcttgccggctcaacttctccgactctaccagctgatgctcttcaccctgccagggacccctgttttcagctacggggatgagattggcctggatgcagctgcccttcctggacagcctatggaggctccagtcatgctgtgggatgagtccagcttccctgacatcccaggggctgtaagtgccaacatgactgtgaagggccagagtgaagaccctggctccctcctttccttgttccggcggctgagtgaccagcggagtaaggagcgctccctactgcatggggacttccacgcgttctccgctgggcctggactcttctcctatatccgccactgggaccagaatgagcgttttctggtagtgcttaactttggggatgtgggcctctcggctggactgcaggcctccgacctgcctgccagcgccagcctgccagccaaggctgacctcctgctcagcacccagccaggccgtgaggagggctcccctcttgagctggaacgcctgaaactggagcctcacgaagggctgctgctccgcttcccctacgcggcctgacttcagcctgacatggacccactacccttctcctttccttcccaggccctttggcttctgatttttctctttttta

SEQ ID NO: 28963 - DNA, 589 bp, Homo sapiens
  source 1..589: mol_type = unassigned DNA
gcaagccttggtgggggaaaaggcagaagttgtgactggctgcctctgagagtgcaagtagccatgcaaagttgggaaaaccagacggcggccggagccgtgaaccaggggcaaatggaggatggtgttggggtagtcactagcctgccggaatggaagaagaggggcgtttgggggcggcaccatgagccaggacaccgaggtggatatgaaggaggtggagctgaatgagttagagcccgagaagcagccgatgaacgcggcgtctggggcggccatgtccctggcgggagccgagaagaatggtctggtgaagatcaaggtggcggaagacgaggcggaggcggcagccgcggctaagttcacgggcctgtccaaggaggagctgctgaaggtggcaggcagccccggctgggtacgcacccgctgggcactgctgctgctcttctggctcggctggctcggcatgcttgctggtgccgtggtcataatcgtgcgagcgccgcgttgtcgcgagctaccggcgcagaagtggtggcacacgggcgccctctaccgcatcggcgaccttcaggccttccagggccac

SEQ ID NO: 28964 - DNA, 2989 bp, Homo sapiens
  source 1..2989: mol_type = unassigned DNA
gaccaagcattcagcaagccactcttccacctcccttactgcaggaaggcactccgaagacataagtcggtgagacatggctgaagataaaagcaagagagactccatcgagatgagtatgaagggatgccagacaaacaacgggtttgtccataatgaagacattctggagcagaccccggatccaggaagctcaacagacaacctgaagcacagcaccaggggcatccttggctcccaggagcccgacttcaagggcgtccagccctatgcggggatgcccaaggaggtgctgttccagttctctggccaggcccgctaccgcatacctcgggagatcctcttctggctcacagtggcttctgtgctggtgctcatcgcggccaccatagccatcattgccctctctccaaagtgcctagactggtggcaggaggggcccatgtaccagatctacccaaggtctttcaaggacagtaacaaggatgggaacggagatctgaaaggtattcaagataaactggactacatcacagctttaaatataaaaactgtttggattacttcattttataaatcgtcccttaaagatttcagatatggtgttgaagatttccgggaagttgatcccatttttggaacgatggaagattttgagaatctggttgcagccatacatgataaaggtttaaaattaatcatcgatttcataccaaaccacacgagtgataaacatatttggtttcaattgagtcggacacggacaggaaaatatactgattattatatctggcatgactgtacccatgaaaatggcaaaaccattccacccaacaactggttaagtgtgtatggaaactccagttggcactttgacgaagtgcgaaaccaatgttattttcatcagtttatgaaagagcaacctgatttaaatttccgcaatcctgatgttcaagaagaaataaaagaaattttacggttctggctcacaaagggtgttgatggttttagtttggatgctgttaaattcctcctagaagcaaagcacctgagagatgagatccaagtaaataagacccaaatcccggacacggtcacacaatactcggagctgtaccatgacttcaccaccacgcaggtgggaatgcacgacattgtccgcagcttccggcagaccatggaccaatacagcacggagcccggcagatacaggttcatggggactgaagcctatgcagagagtattgacaggaccgtgatgtactatggattgccatttatccaagaagctgattttcccttcaacaattacctcagcatgctagacactgtttctgggaacagcgtgtatgaggttatcacatcctggatggaaaacatgccagaaggaaaatggcctaactggatgattggtggaccagacagttcacggctgacttcgcgtttggggaatcagtatgtcaacgtgatgaacatgcttcttttcacactccctggaactcctataacttactatggagaagaaattggaatgggaaatattgtagccgcaaatctcaatgaaagctatgatattaatacccttcgctcaaagtcaccaatgcagtgggacaatagttcaaatgctggtttttctgaagctagtaacacctggttacctaccaattcagattaccacactgtgaatgttgatgtccaaaagactcagcccagatcggctttgaagttatatcaagatttaagtctacttcatgccaatgagctactcctcaacaggggctggttttgccatttgaggaatgacagccactatgttgtgtacacaagagagctggatggcatcgacagaatctttatcgtggttctgaattttggagaatcaacactgttaaatctacataatatgatttcgggccttcccgctaaaatgagaataaggttaagtaccaattctgccgacaaaggcagtaaagttgatacaagtggcatttttctggacaagggagagggactcatctttgaacacaacacgaagaatctccttcatcgccaaacagctttcagagatagatgctttgtttccaatcgagcatgctattccagtgtactgaacatactgtatacctcgtgttaggcacctttatgaagagatgaagacactggcatttcagtgggattgtaagcatttgtaatagcttcatgtacagcatgctgcttggtgaacaatcattaattcttcgatatttctgtagcttgaatgtaactgctttaagaaaggttctcaaatgttttgaaaaaaataaaatgtttaaaagtaaattatggcttataggagcttataactttattcagatagcatcaatcagggatgaccagaacacattaggaccccagattattcaaaaactttaacgaattttaaggggaagaattttatcttttcccttaaaatgcagtcatagaaattagaggatgactcactgccacagtgtctaaaagcatttgctagcaaagaggcaggacactaatttgtaaactgctcaactgttctgactggaagggaggcctggagctctgctatcaccaatccttcccttccctctactccacatccttctaaggagcatgatttgaaaattactttcctaggttaatgggcatgtgcatcaatggagagaatagtataagcaagtgagatgtagactaagcaaaatttagatggagaagcacattttaaaaaattaataacttaaaagtctcaagttattaattttttttttgctaactcaattggaagtaagactatgaaatatttcagtgtgtttccaattcccagttgaatgcagtgtttcagaatttcaggtatttcttaagatcctcgaaaacactggtgctgtcaagtccaagttcctcgtacaggaatttaatttgggctgtaatctaaaagaaacacattaaaaaaattaaatagaaggcctttgtagtaaaa

SEQ ID NO: 28965 - DNA, 2184 bp, Homo sapiens
  source 1..2184: mol_type = unassigned DNA
cactcttccacctcccttactgcaggaaggcactccgaagacataagtcggtgagacatggctgaagataaaagcaagagagactccatcgagatgagtatgaagggatgccagacaaacaacgggtttgtccataatgaagacattctggagcagaccccggatccagttctctggccaggcccgctaccgcatacctcgggagatcctcttctggctcacagtggcttctgtgctggtgctcatcgcggccaccatagccatcattgccctctctccaaagtgcctagactggtggcaggaggggcccatgtaccagatctacccaaggtctttcaaggacagtaacaaggatgggaacggagatctgaaaggtattcaagataaactggactacatcacagctttaaatataaaaactgtttggattacttcattttataaatcgtcccttaaagatttcagatatggtgttgaagatttccgggaagttgatcccatttttggaacgatggaagattttgagaatctggttgcagccatacatgataaaggtttaaaattaatcatcgatttcataccaaaccacacgagtgataaacatatttggtttcaattgagtcggacacggacaggaaaatatactgattattatatctggcatgactgtacccatgaaaatggcaaaaccattccacccaacaactggttaagtgtgtatggaaactccagttggcactttgacgaagtgcgaaaccaatgttattttcatcagtttatgaaagagcaacctgatttaaatttccgcaatcctgatgttcaagaagaaataaaagaaattttacggttctggctcacaaagggtgttgatggttttagtttggatgctgttaaattcctcctagaagcaaagcacctgagagatgagatccaagtaaataagacccaaatcccggacacggtcacacaatactcggagctgtaccatgacttcaccaccacgcaggtgggaatgcacgacattgtccgcagcttccggcagaccatggaccaatacagcacggagcccggcagatacaggttcatggggactgaagcctatgcagagagtattgacaggaccgtgatgtactatggattgccatttatccaagaagctgattttcccttcaacaattacctcagcatgctagacactgtttctgggaacagcgtgtatgaggttatcacatcctggatggaaaacatgccagaaggaaaatggcctaactggatgattggtggaccagacagttcacggctgacttcgcgtttggggaatcagtatgtcaacgtgatgaacatgcttcttttcacactccctggaactcctataacttactatggagaagaaattggaatgggaaatattgtagccgcaaatctcaatgaaagctatgatattaatacccttcgctcaaagtcaccaatgcagtgggacaatagttcaaatgctggtttttctgaagctagtaacacctggttacctaccaattcagattaccacactgtgaatgttgatgtccaaaagactcagcccagatcggctttgaagttatatcaagatttaagtctacttcatgccaatgagctactcctcaacaggggctggttttgccatttgaggaatgacagccactatgttgtgtacacaagagagctggatggcatcgacagaatctttatcgtggttctgaattttggagaatcaacactgttaaatctacataatatgatttcgggccttcccgctaaaatgagaataaggttaagtaccaattctgccgacaaaggcagtaaagttgatacaagtggcatttttctggacaagggagagggactcatctttgaacacaacacgaagaatctccttcatcgccaaacagctttcagagatagatgctttgtttccaatcgagcatgctattccagtgtactgaacatactgtatacctcgtgttaggcacctttatgaagagatgaagacactggcatttcagtgggattgtaagcatttgtaatagcttcatgtacagcatgctgcttggtgaacaatcattaattcttcgatatttctgtagcttgaatgtaactgctttaagaaaggttctcaaatgttttgaaaaaaataaaatgtttaaaagt

SEQ ID NO: 28966 - DNA, 2240 bp, Homo sapiens
  source 1..2240: mol_type = unassigned DNA
atggctgaagataaaagcaagagagactccatcgagatgagtatgaagggatgccagacaaacaacgggtttgtccataatgaagacattctggagcagaccccggatccaggaagctcaacagacaacctgaagcacagcaccaggggcatccttggctcccaggagcccgacttcaagggcgtccagccctatgcggggatgcccaaggaggtgctgttccagttctctggccaggcccgctaccgcatacctcgggagatcctcttctggctcacagtggcttctgtgctggtgctcatcgcggccaccatagccatcattgccctctctccaaagtgcctagactggtggcaggaggggcccatgtaccagatctacccaaggtctttcaaggacagtaacaaggatgggaacggagatctgaaaggtattcaagataaactggactacatcacagctttaaatataaaaactgtttggattacttcattttataaatcgtcccttaaagatttcagatatggtgttgaagatttccgggaagttgatcccatttttggaacgatggaagattttgagaatctggttgcagccatacatgataaaggtttaaaattaatcatcgatttcataccaaaccacacgagtgataaacatatttggtttcaattgagtcggacacggacaggaaaatatactgattattatatctggcatgactgtacccatgaaaatggcaaaaccattccacccaacaactggttaagtgtgtatggaaactccagttggcactttgacgaagtgcgaaaccaatgttattttcatcagtttatgaaagagcaacctgatttaaatttccgcaatcctgatgttcaagaagaaataaaagaaattttacggttctggctcacaaagggtgttgatggttttagtttggatgctgttaaattcctcctagaagcaaagcacctgagagatgagatccaagtaaataagacccaaatcccggacacggtcacacaatactcggagctgtaccatgacttcaccaccacgcaggtgggaatgcacgacattgtccgcagcttccggcagaccatggaccaatacagcacggagcccggcagatacaggttcatggggactgaagcctatgcagagagtattgacaggaccgtgatgtactatggattgccatttatccaagaagctgattttcccttcaacaattacctcagcatgctagacactgtttctgggaacagcgtgtatgaggttatcacatcctggatggaaaacatgccagaaggaaaatggcctaactggatgattggtggaccagacagttcacggctgacttcgcgtttggggaatcagtatgtcaacgtgatgaacatgcttcttttcacactccctggaactcctataacttactatggagaagaaattggaatgggaaatattgtagccgcaaatctcaatgaaagctatgatattaatacccttcgctcaaagtcaccaatgcagtgggacaatagttcaaatgctggtttttctgaagctagtaacacctggttacctaccaattcagattaccacactgtgaatgttgatgtcttgctccgtcacccatgctcgagtgcagtggcgtgatctcggcacactgcagcctctgcttcctgggttcaagtgattctcctgctgcagcctcccaagtagctgggattacaggtgcacgtcattatgcccgggtaatttctgtattttttagtagagatggtgtttcaccatgttggccaggctggtcttgaactcctgacctctggtgatctgtctgccttgcctcccaaagtgctaggattacgggcctgagccaccttgcctggcctgcaaaatttgtttttaatagaagacacaagaaatgatttaaatattttatcaacagaaaaccagttctatcaactatgggcccagtatgcagcttttaaaaatgacagttctatatacattgatatgagaccatttcaaacaggtattcaataaagtatagaatggtaacatatcaccaactgtgtaaagaaaaatatataaacatatgaaatgatacattctgtgcctatgcaaacatatgatacattaaaaacaaaagaacatatagtgcctgtctctgaggggaactgtgaagctatggaaaggtgttgaagaaaacctttttatagtatgtattcttgtaattg

SEQ ID NO: 28967 - DNA, 5474 bp, Homo sapiens
  source 1..5474: mol_type = unassigned DNA
cctcagcggtttcccgaacggcccgactcgggcgctcctccgtgtcgcggtcgccgaccctccgcgtcccgccaacgccgccgctgcaccagtctccgggccgggctcggcgggccccgcagccgcagccatggggtgttggggtcggaaccggggccggctgctgtgcatgctggcgctgaccttcatgttcatggtgctggaggtggtggtgagccgggtgacctcgtcgctggcgatgctctccgactccttccacatgctgtcggacgtgctggcgctggtggtggcgctggtggccgagcgcttcgcccggcggacccacgccacccagaagaacacgttcggctggatccgagccgaggtaatgggggctctggtgaacgccatcttcctgactggcctctgtttcgccatcctgctggaggccatcgagcgcttcatcgagccgcacgagatgcagcagccgctggtggtccttggggtcggcgtggccgggctgctggtcaacgtgctggggctctgcctcttccaccatcacagcggcttcagccaggactccggccacggccactcgcacgggggtcacggccacggccacggcctccccaaggggcctcgcgttaagagcacccgccccgggagcagcgacatcaacgtggccccgggcgagcagggtcccgaccaggaggagaccaacaccctggtggccaataccagcaactccaacgggctgaaattggaccccgcagacccagaaaaccccagaagtggtgatacagtggaagtacaagtgaatggaaatcttgtcagagaacctgaccatatggaactggaagaagatagggctggacaacttaacatgcgtggagtttttctgcatgtccttggagatgccttgggttcagtgattgtagtagtaaatgccttagtcttttacttttcttggaaaggttgttctgaaggggatttttgtgtgaatccatgtttccctgacccctgcaaagcatttgtagaaataattaatagtactcatgcatcagtttatgaggctggtccttgctgggtgctatatttagatccaactctttgtgttgtaatggtttgtatacttctttacacaacctatccattacttaaggaatctgctcttattcttctacaaactgttcctaaacaaattgatatcagaaatttgataaaagaacttcgaaatgttgaaggagttgaggaagttcatgaattacatgtttggcaacttgctggaagcagaatcattgccactgctcacataaaatgtgaagatccaacatcatacatggaggtggctaaaaccattaaagacgtttttcataatcacggaattcacgctactaccattcagcctgaatttgctagtgtaggctctaaatcaagtgtagttccgtgtgaacttgcctgcagaacccagtgtgctttgaagcaatgttgtgggacactaccacaagccccttctggaaaggatgcagaaaagaccccagcagttagcatttcttgtttagaacttagtaacaatctagagaagaagcccaggaggactaaagctgaaaacatccctgctgttgtgatagagattaaaaacatgccaaacaaacaacctgaatcatctttgtgagtcttgaaaaagatgtgatatttgacttttgctttaaactgcaagaggaaaaagactccactgaaattctaagtttgccaagtagtgtaattgaagtccttgtctggtcacacagtttaattctatttttgtaagaacataatgggactgcataacagagttctatattacaattttgtgattattagtacagagtacagctatgctgtgactgttttggaaagccagttttaacactatgttacatttttgtttaaagtaagttaaaccttatataacataatgacatttgatttctggatttttcccatgataaaaattagggggataaataaaattgttactggaatttctctgcttttcttttcccccagtgttatactttattagaattataattgatagaactttaaaatcatcaacagtttgtttcctttgacattttaggtgatattgccctttgagatcattacatagcataatggcagcatattttaagagtgactcatggctattagtaggaaataagatcagttactatcctgtattctgtattgctggctattaaacagtaagataattaacaaattgaactacagtttacacacaatggggcaaatggggtagtaagagcaaggaagaaagtttaccaaactaaatatttaggttattgtatgataatattgagactacatttctaaattattttgagaatttcaactttttattctaccaaagttaatctgaaacttggacatgttcaccagcattactttctttgaaagattggtataaaaacattgagctgcaagtttatttacaaaatatataagtatttttaaggatgttgacacctaataattacatgctaaacgcaaacgattaatgtaatcttttaaaccgggcgtttgaaaaaaaattttcaaggtcatttcatgataaccaatcatgaatggatttaaatggagctttttgagcacaaccagcaatgtttgtgctttctaagagtcactgacttgagaggaaagaaaaccagaaggttaatgcagtttggatattaaattcttagcaaaattaataattaaagcaaaattaattaagattttgtaagtcatcctgtcttcacatactcagatcttccaatagtggcttattttgcaagatgccacaatatctacacagaaaattgtggctatttcattattgctatagatttcaaatccaacacaaatatttaagggtgtttaagttatatttttcttgatagagggtatgctttgtgacaaaattagatttttgtccttgaaaggattaatattagcatcagttatgtatagctctatttttctagaaacaaggtattctgactacttttatagctgactacttttgggatggctacgttttgggatttaaaatagttcattgtttaatgggttgtaagaggaaaaagtgttaggatttgacagttactttttaaagggatgatcttttgtggtgtgtgtttttcctagtataagcctattgctggcgatgggcctatttaagaacagctgattttttccagtgaaaatatggtaattttaggaacacagtttgtaagttcacatttactataatgggccaaaaccataacctgccagtttgcaatacatcttgatcttttaatattcttatctgatattgtgtaattcaattcctaaactgatagttaccttgaattttgcgaaaaggtttgggtggttttttttaaacatgaaattgagggatctcatctgggcgaacaagaagagaaagctgtgaattgtactgtatcatgtacattcctgatttaatactttacagaacattttattcagatatcaatttgttacataaacatttcagcaatgatacaaagataactgataaaatatattacattcaatgaggttttctttacaaatgctctacttgaggtctgtgtcttaaagatggcatgacacctaagtacaagacatcaactgaatgaggattttaaaaaatggtatataagcataggacaagggctatgtttgtttgtttttcaaaagtgctttgaagataacagcctttaggtttgagttatttcacttttcataatttttaagtagcttatatataatggtggtaccataggattttcttttttcaaatgactgtcggcagaaacagtgggcactgactcaccttttgagttttagcagagaattatttatttctttacaatgcactttctaacccattgtagctatattagcattatcttttaaaaaagacatgcttttgtatttaaatattgtaggatttaagtgtctttctcaaaatagcttattcctttctgaaagaaaatgagggaaatactctgaattattaggagacttaaacccaatatttaaatatgctattttataacactgcatcagttttaggagttgcatctctcctgctggctcttttatatttgagcaagatcagtgtagaatatgtgtttagaaacttgtctgttgtctcagtttagtgaaaaggaggtgctgcatgtgcctgaattaaaaccaagaaatttttccaagccaaatgcagccttagtgatgagagatttaattctccattgtcaccttttagcttttatgattgcttagttttttctgaaggatgtctgcattgtaaaactatggactaaaacctaaaaaacagaatcctcaaaaactttgctgtatgtgttttaacattttagagaacagtatgttgaataactaaggtatgtaacttgaataggaaaaatgtccatcaaatgcaccttggaaaatcacagtaggtagaaggctgtgttaaccgtttgtgtcttattaacatccttaagttaattttgaatttttgacagttttgagggaaaagacctatggaacctaatgtgaagtatttcgtatgttaactggtgttgagttgaagatttttactgtgtataagcagatatcatttgaatgataaaaatgtcattaacctgctgtcttaagatgttcacacaaatatggagagtaattctacaatataaaaatatttattttaatactgagtttcagttaagtcataaacagtgttaaaactcttgggaaggtgtaggggttttttgtttgtcatttttaaaattgaaactgtgtcatacagtgtttcacgtctctgaaattgggattataatagcactattttgatgtagctctaccgatactatgtggtaatgctattttgttttactaacaagctctggaatatttagcagtcattttcactggcacaagagccttttgtatgttattcaatttaaacttttaaaccaaaaattttatggtccagtgtctttggcaaaaagatgctggagggaatgtaacatacaattaatatgtggttatatatatatataaaaagacacaaattgccatgttatggttctgccttgaaacagcacaatgaagtgtatcagtatattctgtgattatgaaacttatatgttgtgttgttttgtgtcttctgttgcctgtcctttgggccagatgtgggccagttaaatgcagttatcatctcattaaatacagatgcagataaaatatctttagtgctgcaacattttacctaactttttgtatgttttcatgactgtgtgttattttccaaagctgttcctacctcaccatgaggctttatggattgttatgtattataaatgttctatatgagacagactactgtgtttcttctcatttattaaaagttaagtagaaaaataaactaattttaatatcta

SEQ ID NO: 28968 - DNA, 2494 bp, Homo sapiens
  source 1..2494: mol_type = unassigned DNA
cggggcgcagcggctgacccgagacacgggagcgcttggcacgcggagccagagccggagctgcagccgcagcgggagccgggggagctcaggggccgcaggagccgggccggagtgagcgcacctcgcggggccctcggggcaggtgggtgagcgccacccggagtcccgcgcgcaactttcagggcgcactcggcggggcggctgcgcggctgccgggactcggcgcgggactgcatggaggccaaggagaagcagcatctgttggacgccaggccggcaatccggtcatacacgggatctctgtggcaggaaggggctggctggattcctctgccccgacctggcctggacttgcaggccattgagctggctgcccagagcaaccatcactgccatgctcagaagggtcctgacagtcactgtgaccccaagaaggggaaggcccagcgccagctgtatgtagcctctgccatctgcctgttgttcatgatcggagaagtcgttggtgggtacctggcacacagcttggctgtcatgactgacgcagcacacctgctcactgactttgccagcatgctcatcagcctcttctccctctggatgtcctcccggccagccaccaagaccatgaactttggctggcagagagctgagatcttgggagccctggtctctgtactgtccatctgggtcgtgacgggggtactggtgtacctggctgtggagcggctgatctctggggactatgaaattgacggggggaccatgctgatcacgtcgggctgcgctgtggctgtgaacatcataatggggttgacccttcaccagtctggccatgggcacagccacggcaccaccaaccagcaggaggagaaccccagcgtccgagctgccttcatccatgtgatcggcgactttatgcagagcatgggtgtcctagtggcagcctatattttatacttcaagccagaatacaagtatgtagaccccatctgcaccttcgtcttctccatcctggtcctggggacaaccttgaccatcctgagagatgtgatcctggtgttgatggaagggacccccaagggcgttgacttcacagctgttcgtgatctgctgctgtcggtggagggggtagaagccctgcacagcctgcatatctgggcactgacggtggcccagcctgttctgtctgtccacatcgccattgctcagaatacagacgcccaggctgtgctgaagacagccagcagccgcctccaagggaagttccacttccacaccgtgaccatccagatcgaggactactcggaggacatgaaggactgtcaggcatgccagggcccctcagactgactgctcagccaggcaccaactggggcatgaacaggacctgcaggtggctggactgagtgtcccccaggcccagccaggactttgcctaccccagctgtgttgtaaaccaggtccccctcctgacctctgccccactccaggaatggagctcttcccagcctcccatctgactacagccagggtggggactcagcgggtataaagctagtgtgaccctgctcttccagctcctgggccagctctggaagggctgtatttgggcctaatcctcagcaaatgttctaccactcgcaggggcaaaggtggtgagccacgggacgtccaaggggaggctggccccagcgcgcccatactgcctgcctcatgccccattctcagcctggctggcctttgcctttatgaatctgagcccctccatctgcctatagcaataggcacgggggtgaggaccctcacactctcatttgagcctccctgaggcagggagccaggaggcacctgaggcctatctgtgccttagtcacttcagctatgagccaaatgttccctttcctggaggggagaggcttcttactaggtaagagacaggtttcctctttccttatttcctcagctgtgccaacacaaaaaacaactttggcacaggtggtgggcagggggtagagagatttcagcttgggttctgcactaacagcctccaagccccctggcacttctgttgccctgagagtgtcccaggggattcagagtctccagaaagatatggctgggccaactctgttgcctacctggcctgacccagtcggagcctgacatggtggagggaaagggagacaagtggggctgcactcggtccagaggccagctaggagggaaaccgcagcttcctggggcttgtgtgtgaagattcctgacttaggggtggcttttgtttacaagatgcaagaggggaaacctgtccccgactcatcgagacaacatgcccagttatcagggagtcctgtgtcacaaggtctgtctctgccattgtaagcaagtgccttgggcgagctggcctctgccccacagtctcatctgtacaccgacagggttgatgcctccctcacagggttgagaacaagagccagttggccaagta

SEQ ID NO: 28969 - DNA, 3097 bp, Homo sapiens
  source 1..3097: mol_type = unassigned DNA
gagacacgggagcgcttggcacgcggagccagagccggagctgcagccgcagcgggagccgggggagctcaggggccgcaggagccgggccggagtgagcgcacctcgcggggccctcggggcaggtgggtgagcgccacccggagtcccgcgcgcaactttcagggcgcactcggcggggcggctgcgcggctgccgggactcggcgcgggactgcatggaggccaaggagaagcagcatctgttggacgccaggccggcaatccggtcatacacgggatctctgtggcaggaaggggctggctggattcctctgccccgacctggcctggacttgcaggccattgagctggctgcccagagcaaccatcactgccatgctcagaagggtcctgacagtcactgtgaccccaagaaggggaaggcccagcgccagctgtatgtagcctctgccatctgcctgttgttcatgatcggagaagtcgttgagatcttgggagccctggtctctgtactgtccatctgggtcgtgacgggggtactggtgtacctggctgtggagcggctgatctctggggactatgaaattgacggggggaccatgctgatcacgtcgggctgcgctgtggctgtgaacatcataatggggttgacccttcaccagtctggccatgggcacagccacggcaccaccaaccagcaggaggagaaccccagcgtccgagctgccttcatccatgtgatcggcgactttatgcagagcatgggtgtcctagtggcagcctatattttatacttcaagccagaatacaagtatgtagaccccatctgcaccttcgtcttctccatcctggtcctggggacaaccttgaccatcctgagagatgtgatcctggtgttgatggaagggacccccaagggcgttgacttcacagctgttcgtgatctgctgctgtcggtggagggggtagaagccctgcacagcctgcatatctgggcactgacggtggcccagcctgttctgtctgtccacatcgccattgctcagaatacagacgcccaggctgtgctgaagacagccagcagccgcctccaagggaagttccacttccacaccgtgaccatccagatcgaggactactcggaggacatgaaggactgtcaggcatgccagggcccctcagactgactgctcagccaggcaccaactggggcatgaacaggacctgcaggtggctggactgagtgtcccccaggcccagccaggactttgcctaccccagctgtgttgtaaaccaggtccccctcctgacctctgccccactccaggaatggagctcttcccagcctcccatctgactacagccagggtggggactcagcgggtataaagctagtgtgaccctgctcttccagctcctgggccagctctggaagggctgtatttgggcctaatcctcagcaaatgttctaccactcgcaggggcaaaggtggtgagccacgggacgtccaaggggaggctggccccagcgcgcccatactgcctgcctcatgccccattctcagcctggctggcctttgcctttatgaatctgagcccctccatctgcctatagcaataggcacgggggtgaggaccctcacactctcatttgagcctccctgaggcagggagccaggaggcacctgaggcctatctgtgccttagtcacttcagctatgagccaaatgttccctttcctggaggggagaggcttcttactaggtaagagacaggtttcctctttccttatttcctcagctgtgccaacacaaaaaacaactttggcacaggtggtgggcagggggtagagagatttcagcttgggttctgcactaacagcctccaagccccctggcacttctgttgccctgagagtgtcccaggggattcagagtctccagaaagatatggctgggccaactctgttgcctacctggcctgacccagtcggagcctgacatggtggagggaaagggagacaagtggggctgcactcggtccagaggccagctaggagggaaaccgcagcttcctggggcttgtgtgtgaagattcctgacttaggggtggcttttgtttacaagatgcaagaggggaaacctgtccccgactcatcgagacaacatgcccagttatcagggagtcctgtgtcacaaggtctgtctctgccattgtaagcaagtgccttgggcgagctggcctctgccccacagtctcatctgtacaccgacagggttgatgcctccctcacagggttgagaacaagagccagttggccaagtacctgtggttgttgaagattggttacttttaccatcctggggacagggaactctgtggcccgaggctgcctcactgaggagtcaggtgggcttcccagcctccccaggggcagtgctgagtttgtcttgactgttctggcccaaggtgggaggaggtgggtttggtcacttgcctcccactttaaatctctgtctttccatctgtgaaatgacctctttgtgccttcccagcactgtcatcctgatcgcctgtgttctaggtaggtgggtccttcagcccctccaggtctgtgaaaagtctgtggaaagcactggcctggagaggggtggggggttgctggtgggtgctccattccaccacaatctcaggggactcaacctcccctacccaactccccacccccacccaagccatggcaggccccaggaacttgatcctgggctttgccgtatgccaagtccttacacccctctcaagagacagtcattggctgggcacggtggctcatgcctgcaatcccagcaccttgggaggctgaggcaggcagatgacttgaggccaggagttcgagaccagcctggccaatatggcgaaacctcatttctactaaaaatacaaaaactagccaggcgtggtggcttgtgcctgtaatcccagctactcgggaggctgaggcaggagaatcgcttgaaccggggaggcagaggttgcagtgagctgagatcacaccactgcactccagcctgggtgacagagcgagactccagctt

SEQ ID NO: 28970 - DNA, 2260 bp, Homo sapiens
  source 1..2260: mol_type = unassigned DNA
gggacggggctgtggagatgaggagttctccagaactcgggtggcggggcgctcccgggctctggcgcggggaaatggggctttggcagtgggggcggggcttaagggtggggagaggccggggagcctggaggcggagcttggggagctcgccccacgcggggcggggctccggcggcagcgggatctgcagttcggactccgcgcgccacagtcgctgcagttcgctccactctggtggccccgccgccctgcggggatcccgggggtcggcgggctgctcggacttggcgcggggccggcccggcctctctcttcctcggtggggcctagacggtcggggcaccgggaacatggagccctctccagccgctgggggcttggagaccactcgcctggtgagcccccgggaccgcggtggcgccggaggcagcctgcgtttgaagagtctcttcacagagccctcagagcccctccctgaggagtccaaacctgtggagatgcccttccaccactgccacagggacccccttccgccgccgggccttacccctgagaggctgcatgcacggaggcagctatatgctgcctgtgccgtttgctttgtcttcatggctggggaggtggtcggcgggtatctggcacacagcctggccatcatgaccgatgcagcccacttgctggcggatgtgggcagcatgatgggcagcctcttctccctctggctctccacccgtccagccacccgcaccatgacctttggctggcaccgttcagagactctgggggctttggcctctgtggtctccctctggatggtcactggcatcctcctgtacctggccttcgtccgcctgctgcacagcgactaccacatcgaggggggtgccatgctgctgaccgccagcatcgcagtctgtgccaacctgttaatggcctttgtgctgcaccaggctgggcccccccacagccacgggtctaggggagcagagtatgcaccgctggaggaggggcctgaagagcccctgcccctggggaacaccagcgtccgggcggcatttgtgcacgtgctgggggacctcctgcagagctttggggtactggctgcctccatcctcatctacttcaagcctcaatacaaggcagccgaccccatcagcaccttcctcttctccatctgtgcccttggatccaccgctcccaccctccgagacgttcttcgaatcctcatggaaggtaccccccgcaatgtggggttcgaacctgtgcgggatacgctgttgtcggtgccaggagtccgggcaacccatgagctgcacctgtgggcccttacgctcacttaccatgttgcctctgcacacctggccatcgactccaccgctgaccctgaagccgtcctggctgaagcctcatcccggctctactcccggtttggattctccagctgcaccctgcaggtcgagcagtatcagccggagatggcccagtgcctgcgctgccaggaacccccccaagcctgagccatggccctgccctcaccccactgccaggccgaggctcagccccagactctcagcatctgctgccctgatcacagagacgggaccgagccaggtccataccccttcctctctccctcctaccacctgccagtttccccagcctcagccccagccccagccccagtgggcaagaccaaagtgtggcggggagtggggtgggagtcaggggaatagatgtgactagttcaggggcggggactcccaggcctcagtgtggcagggtgtgttgaaggcctgtggtgccatctccccatggttcatgtggagccacgaacatcctttccctgcagtccatttgtctgtgtggcaggctggctggctgggggcatctgcctgtctatgtgctgttggtgtgcctatgcctgggggaggtcagtaggggccccctccccacatggccctcgctctgtctatgcaggggccccaaagcccgcactttgtccgtgtgtcttagccctgtggttttgtctgtgtgtgtgtgtgtgtgtgtgtgtgtgtgtgtgtgtgtgttcttggtgctgtggcctgtgtgtctctgtgcctatgtggctgtgctatggtttctatgagtctgctccatccatgtgtctgtttgggggtctatctctccatccctctgttggtgctgtgcccttggctatccctgaaagagggaggactccgctgcagctccaccaataaacttgtgtctcactgca

SEQ ID NO: 28971 - DNA, 590 bp, Homo sapiens
  source 1..590: mol_type = unassigned DNA
gagggcttagcaggcctgcggcccaaggcagcgtaggagcgttgctgccaggccttggggcagggattcccaccgagcccctcttccccagcaggagggcaccacccatcttgatggcccaactcactccaggaaacacaatgggtttgctgaccgtggcggatgagagtggcggcaggtgcgaggggagagaacattgagcatttgaagcttcgacttgaggctcggccaccgactttgcttctcttcacagagccctcagagcccctccctgaggagtccaaacctgtggagatgcccttccaccactgccacagggacccccttccgccgccgggccttacccctgagaggctgcatgcacggaggcagctatatgctgcctgtgccgtttgctttgtcttcatggctggggaggtggtcggcgggtatctggcacacagcctggccatcatgaccgatgcagcccacttgctggcggatgtgggcagcatgatgggcagcctcttctccctctggctctccacccgtccagccacccgcaccatgacctttggctggcaccgttcagagactctgggggctttggc

SEQ ID NO: 28972 - DNA, 899 bp, Homo sapiens
  source 1..899: mol_type = unassigned DNA
gactgtcacagcttcgagtgcacaatcctcttcccaccccctcccattctacagtggcggcaggtgcgaggggagagaacattgagcatttgaagcttcgacttgaggctcggccaccgactttgcttctcttcacagagccctcagagcccctccctgaggagtccaaacctgtggagatgcccttccaccactgccacagggacccccttccgccgccgggccttacccctgagaggctgcatgcacggaggcagctatatgctgcctgtgccgtttgctttgtcttcatggctggggaggtggtcggcgggtatctggcacacagcctggccatcatgaccgatgcagcccacttgctggcggatgtgggcagcatgatgggcagcctcttctccctctggctctccacccgtccagccacccgcaccatgacctttggctggcaccgttcagagactctgggggctttggcctctgtggtctccctctggatggtcactggcatcctcctgtacctggccttcgtccgcctgctgcacagcgactaccacatcgaggggggtgccatgctgctgaccgccagcatcgcagtctgtgccaacctgttaatggcctttgtgctgcaccaggctgggcccccccacagccacgggtctaggggagcagagtatgcaccgctggaggaggggcctgaagagcccctgcccctggggaacaccagcgtccgggcggcatttgtgcacgtgctgggggacctcctgcagagctttggggtactggctgcctccatcctcatctacttcaagcctcaatacaaggcagccgaccccatcagcaccttcctcttctccatctgtgcccttggatccaccgctcccaccctccgagacgttctt

SEQ ID NO: 28973 - DNA, 1504 bp, Homo sapiens
  source 1..1504: mol_type = unassigned DNA
aggcagcgtaggagcgttgctgccaggccttggggcagggattcccaccgagcccctcttccccagcaggagggcaccacccatcttgatggcccaactcactccaggaaacacaatgggtttgctgaccgtggcggatgagagtggcggcaggtgcgaggggagagaacattgagcatttgaagcttcgacttgaggctcggccaccgactttgcttctcttcacagagccctcagagcccctccctgaggagtccaaacctgtggagatgcccttccaccactgccacagggacccccttccgccgccgggccttacccctgagaggctgcatgcacggaggcagctatatgctgcctgtgccgtttgctttgtcttcatggctggggaggtggtcggcgggtatctggcacacagcctggccatcatgaccgatgcagcccacttgctggcggatgtgggcagcatgatgggcagcctcttctccctctggctctccacccgtccagccacccgcaccatgacctttggctggcaccgttcagagactctgggggctttggcctctgtggtctccctctggatggtcactggcatcctcctgtacctggccttcgtccgcctgctgcacagcgactaccacatcgaggggggtgccatgctgctgaccgccagcatcgcagtctgtgccaacctgttaatggcctttgtgctgcaccaggctgggcccccccacagccacgggtctaggggagcagagtatgcaccgctggaggaggggcctgaagagcccctgcccctggggaacaccagcgtccgggcggcatttgtgcacgtgctgggggacctcctgcagagctttggggtactggctgcctccatcctcatctacttcaagcctcaatacaaggcagccgaccccatcagcaccttcctcttctccatctgtgcccttggatccaccgctcccaccctccgagacgttcttcgaatcctcatggaaggtaccccccgcaatgtggggttcgaacctgtgcgggatacgctgttgtcggtgccaggagtccgggcaacccatgagctgcacctgtgggcccttacgctcacttaccatgttgcctctgcacacctggccatcgactccaccgctgaccctgaagccgtcctggctgaagcctcatcccggctctactcccggtttggattctccagctgcaccctgcaggtcgagcagtatcagccggagatggcccagtgcctgcgctgccaggaacccccccaagcctgagccatggccctgccctcaccccactgccaggccgaggctcagccccagactctcagcatctgctgccctgatcacagagacgggaccgagccaggtccataccccttcctctctccctcctaccacctgccagtttccccagcctcagccccagccccagccccagtgggcaagaccaaagtgtggcggggagtggggtgggagtcaggggaata

SEQ ID NO: 28974 - DNA, 540 bp, Homo sapiens
  source 1..540: mol_type = unassigned DNA
acagcgggccgggggtggcaggagaaccgccaacgcgccccgccggcccccgcgcctgccgccaccgtccacctgcccctctgagcggccgtccgacctccctgcccacccccgtgggccatcttgtctgtcggctgaccgtccgtttgtctccggaatttggcaggagccctcagagcccctccctgaggagtccaaacctgtggagatgcccttccaccactgccacagggacccccttccgccgccgggccttacccctgagaggctgcatgcacggaggcagctatatgctgcctgtgccgtttgctttgtcttcatggctggggaggtggtcggcgggtatctggcacacagcctggccatcatgaccgatgcagcccacttgctggcggatgtgggcagcatgatgggcagcctcttctccctctggctctccacccgtccagccacccgcaccatgacctttggctggcaccgttcagagactctgggggctttggcctctgtggtctccctctggatggtcactggcatcct

SEQ ID NO: 28975 - DNA, 7157 bp, Homo sapiens
  source 1..7157: mol_type = unassigned DNA
cgcgcagggcggggagaggcggtggctgtgggcgtccggccccgaacctgtcagacctggggagccggcctccagcagcgggcgcggcgggcgcgagcacgaccccactctcctgcggccgcgggtggagcagcgcgagcccgcctcgctgagccggccgggggcggggagatgagttgcggccccgcggcagcgccccaggatggggagggacgcgcggcactgccctcgagaactggcgctccggtgaagtaggcgccgccggccgtccgcctcccccaagccgttccgcaccgcggccgctcagcctctgccatggccggctctggcgcgtggaagcgcctcaaatctatgctaaggaaggatgatgcgccgctgtttttaaatgacaccagcgcctttgacttctcggatgaggcgggggacgaggggctttctcggttcaacaaacttcgagttgtggtggccgatgacggttccgaagccccggaaaggcctgttaacggggcgcacccgaccctccaggccgacgatgattccttactggaccaagacttacctttgaccaacagtcagctgagtttgaaggtggactcctgtgacaactgcagcaaacagagagagatactgaagcagagaaaggtgaaagccaggttgaccattgctgccgttctgtacttgcttttcatgattggagaacttgtaggtggatacattgcaaatagcctagcaatcatgacagatgcacttcatatgttaactgacctaagcgccatcatactcaccctgcttgctttgtggctatcatcaaaatcaccaaccaaaagattcacctttggatttcatcgcttagaggttttgtcagctatgattagtgtgctgttggtgtatatacttatgggattcctcttatatgaagctgtgcaaagaactatccatatgaactatgaaataaatggagatataatgctcatcaccgcagctgttggagttgcagttaatgtaataatggggtttctgttgaaccagtctggtcaccgtcactcccattcccactccctgccttcaaattcccctaccagaggttctgggtgtgaacgtaaccatgggcaggatagcctggcagtgagagctgcatttgtacatgctttgggagatttggtacagagtgttggtgtgctaatagctgcatacatcatacgattcaagccagaatacaagattgctgaccccatctgtacatacgtattttcattacttgtggcttttacaacatttcgaatcatatgggatacagtagttataatactagaaggtgtgccaagccatttgaatgtagactatatcaaagaagccttgatgaaaatagaagatgtatattcagtcgaagatttaaatatctggtctctcacttcaggaaaatctactgccatagttcacatacagctaattcctggaagttcatctaaatgggaggaagtacagtccaaagcaaaccatttattattgaacacatttggcatgtatagatgtactattcagcttcagagttacaggcaagaagtggacagaacttgtgcaaattgtcagagttctagtccctaattttatgtattttgggaactcctgccttatttatcctgcagtcacagacttgagagcaataaatgcaaacctaaatgagaaaatggaatccctgacagctgtgtccgtatcaagcatcagtctctcaaacagttgccccagcctgacagtgctagtctctgtttaatggtaaaaggagactttgccataattttcagatgaagatgtttcccaaacactgtttacagaatgagatgtgactctacagatacctcatagaagacaatccaagatcatacttcattaacttgacagagtacgtgtcttaaaggaagcatcaagaattcaatatttgcatttaaaaatactttttaaggccattttatattaagccagtgctggaaaactgaattttttttattatgtataataatctcgacacccagcttctggaattgctgctttctttttacagaaattactacccaacagatttcaggaagtactagtagttatcccaaaagtggaataagcatgtattcctaagtgtttcagaaatgttttatttcacacataagtcttaatgttattgttatgattatactttataaacaaccttttccagatgctacagggttttgaatctcaaagttaacatttttcattatttgtaatcttagaaccaaatctttatttattgtggtcactgttattaaatgatttaggaaatactttcaatattattctgaatggctgaagttagtcttaaactcaaattactatatgatgatttaaaacaaaataaaagagcgaggatgggggttggagtttcaggtttatgtcttcccgacatcacttttatcattcatgaaattgtcttaaaaaagcaagagactgcaaaatgtaaacagtaatcttctgtccctttaagaactgccaacaatttgtacaaaaaatgtggtacgttggttcctgcctccactccaggtcatctgtgtgtttagcctttcagggtaaactctagagggttcagtttataattcccacctttcacatatagttcaacaacattaatccagagagaattttatgttttatgatatgggttatgttttattatatattttatgttttatgatatgggttagggattctccatggactccagaaaccctaaaatacaattttgaggttttccaataataccatagcagaaatgtccaaggggttgggggaagatattactttgagaaaacagaaatgtaaaggatttttgaccttatatatgtgtgtggttttgtttttgtttttgttcttgagagagtctcactctgtcacccaggctggagtgcagtggcgtgacctctgctcactgtaacctctgcctcctgggttcaagtgattcttctgcctcagcctcccaactagctgggactacaggtacaccacacccagctcatttttttgtatttttagtagagacagggttttgccacattggcctgtctggtcttgaactcctgacctcaggtgatccgcctgccttggccttccagagtgctgggattacagcatgagccaccatgcctggcctgtatgtgtgtgttttaaagcactagatagggatggacattaaatctgtgttgcagggaaactaaacagaggtttccaaactgaaggcaacctaattgtaaatgcctgtgttaaagaggcagcttgactgttcatgtttcattttgcaaccattggttttgagattatcttttatgcacatttggagtcccttttcaacagtgacagtttcttacacgaagaatggatatggttattgggctcctctaagaatcagagtagggtaacaatgtaccaggcaaattgtaagttgaaattctagataagcatgcagatgacttacaatataaatgaagaataggaaacattttatcttcttaccaagtaccttactataagtaaacctaagataagaaaacccagatttacctataagattgttgggagttaatggtgtcaataaaaggattgatggtccctctaatgaaacccagtagatgtttgttgaattgaactgaaaatttatgtggccagacacagtggctcatgcctgtaatctcagcatttggggaggcaaaggtggaagtatccctcgaggccaagagttcatgaccagcctggtcttttgtagagaccctgtctctacaaaaatataaaaatcagccaggcgtcgtgcacacctgtagtatcagctacttgtaaggctgtggcagaagtgctttagcccaggaggttgaggctgcagtgagccatgtccacaccattgcactgcagcctgagtaacaaaatgagaccctatctcaaaaacaaaaaggaaaagaaaatatacatgatgggattcctattgtgaagtcatttaaaataatgacttgaatttctcagaaatttcaggagcatataaactatttaaatcaaaatattcttacatatagaaaccaagtaagaataaatgagagatatttcagtggacatctggacatatttatggactttgagtatctagcaagtagaaaggaaaaaaatattcatcatactctaatcatttttttatatctattgagcttgtttcttgtaaacttttctttatcttataaaggcatatctcgcttttgtatcgacctgttccttaaaaaatgtatttgataaaacaggctaaaattcatttgagtattgaaaagaattctttttttttttttaagatggtgtctcactgtcacccaggctggagtgcagtggcacagttgggctcactgcagcctctgcctcccaggctcaagtggtcctcccatctcagcctcccaagtagctggtaccacaggcatgcaccaccacacccagctaattttttgtatttttggtagacacagtgtttcaccatgttgcccaggctggtcttgaactcctgagctcaagtgatctgcccacctcggcctcccaaagtgctgggcttatgggcatgaaccactgtgcccagccaaaaagaatccttttgtaaaatacagaaacactgcaaacctttgtaaatcttttttttttttttttttttttttttttaatgagatggggtctccctatgttgcccaggctggtcttgagctcctgggctcaagaaatccttccacctcgggctcccaaagtgctgagattacagggtgtgagctaccgcacccagccatgaaaacttctgtaaatcttaactatcgtgttctgcttaaagtgaggtacacataaagtttcctgtgctttgtttttgtaggaaaaagtacatagtttgtatctttaccttacggagtctatgagatttgagaatttgatttcactttttgtaacttaacccacagaaaaggacattaacttagcagataggaccaaggactgaatgacttctgacaaaaagcgtttggtctatccttcacttgttgagctacaaccatgcattacacttctcagctgagctctcaaagagctctatgccctgtgaaaagcagtggctgagttggatgaacacatagcattattaattttgcactgggaaaacagattatgacaggaccacagaccacaatataaaaacttggcagttctttggtgtgatatattttaattagtatttgcaaataatcagagttacttgtgtacataaacgtgtgtttcacaactatggccagatgcaaccttttggtctgtttcaggaaaagacctattattccactaacaattatgctgccttagaaacataatgggagtgtaattgaagaaagcatgtctcagaaggttttgatatgcagaactggaagctattgtaattcctacatacatttccattagctatgccttatgtaatgtgagtgcagatttttacaacttagagttcccatcagtgtttttttgccacatcaccgggtttcttattttactgttttcttttcaactttgggtgctttatttccattctctaaaactaagtttcttgctcttacgagacttagtgttccttttgaacccaggtgttccacctgacagtgtttgtctttcatagactttccagaatagacatagtcaagatcagacacgtgagcttctctctcattttaatgtgaggaaaatcatctttcagagacaaggcaccgcttagaaatgtatgtccaggtatgaaagaacctttttaaaatggctggttgttccagatccagatttctctgcacactggacttcgtagagtaagtgtggtagacaaagagactacactgcacaaccaccagtgaatatcattgctaagaagactttgggtcgtgtttctcagccactctcacagcttttgtagacttatttgattttgaaacaagcagttagctaaatctattttccttttatgcatatatgttaattggctcaacttaatatggtgttcttacagaatatgagcccatttgaaataaggttttaggcaattttgctgttggctctgatttgtatatagcaaatttaaagttacagagtgtttcctagatagaagattagttcatttggttcattttgtctttgaagcaagccaagctcatgagccagttggttatttgtcataaatgaacacccatcactatatgctatgttgaggggaggcaagtctgatcttcgaataattgataaagtttaatatctttgtagccaaaatacaatttgcaaaccctaactccagatgtgtcgtatgaatcttgacaaccaggtcttgagatttgttttactgattgccaatcaggtatattatttgtgatgttcgtgggagcatgcaaattagaagacagtgttgtgggagttcctcagtattgaattacatgtgtgcactcaggcctgccagtcactgaattctgacttgtaaagggtttaacctgctgttccaatcattgaggaccaatttgctttttgataagattggaaaacatttatggagactttcccagttaaatctatgacagtgtccacttaaatagtgcaatttagtatattctcagataactgcaacacaaaattgaaatgtgccagtatgtcatctttctacctggaagatactgtatatttggaaagtttatgcttctctcaataaatacatgttattaaataagccatatcacagtttaagaaattgtatatactttatcatatgccctttcagaaaccaggtattttgcatatgattgattttagaaagattttgaagctggggtttgtccatgttaattaagatcaaagtatatatatatatatatatatgtgctgtatttgcaactttcacattgtaatttcctatacacttattaaagtattgttttgccatgtggtttattaaataaaaatgtacagtctcttaaatatctgctctttttattaagtaatattagtaggcctaaaaacattgttcttaaaagaaaatcttttataattataatgtcattttataatgccctcttatatgtttaagaaataaaactgaaaaaaatctt

SEQ ID NO: 28976 - DNA, 1317 bp, Homo sapiens
  source 1..1317: mol_type = unassigned DNA
gcctgatgacgtggcttggcaacgtccctaccgccgctgcttcccgggaacctggcgccgccggaactgatcgcggcctagtcccgacgcgtgtgtgctagtgagccggagccggcgacggcggcagtggcggcccggcctgcaggagcccgacggggtctctgccatgggggagtgacgcgcctgcacccgctgttccgcggcagcggcgagacatgaggagaccccgcgacaggggcagcggcggcggctcgtgagccccgggatggaggagaaatacggcggggacgtgctggccggccccggcggcggcggcggccttgggccggtggacgtacccagcgctcgattaacaaaatatattgtgttactatgtttcactaaatttttgaaggctgtgggacttttcgaatcatatgatctcctaaaagctgttcacattgttcagttcatttttatattaaaacttgggactgcattttttatggttttgtttcaaaagccattttcttctgggaaaactattaccaaacaccagataattggatcactaaaaattcctggtagaaaagaatttaaagacaaaaagttaaatgatcctaggaaactagtgggaaactgagaaatcataaaattgtactctgaagaaaaagatttcaaaatctaccagcagacaagaatatagataatggaaaacagaatactgtcctttttttttttctttctttttttgagaaagagtcttgctccatcgcccaggctgcagtgcagtgacacgatcttgtctcactgcaacctctgcctcccgggttcaagcgattctcctgcctcagcctcctgagtagctggaattacaggcacccaccaccacacccagctcatttttgtatttttagtagagacggggcttcattcaccacattggccagcctggtcttgaactcctgacctcaggtgatctgcctgcctcggcctcacaaagtgctaggattacaggcatgagccacagcacccggcccagaataagaatactgtcttggaaatctagacttagtcaagggatcttatgttttctatttacaaaatatgtaatgatttcacctttaaaatatttgttattattatctttctgtattttatttaaaatttggatatatagcaaaatatatgtgactgaaatttttaatttttttgtttccatttatagtggatcaaaatatttaaacatgcagttgctgggtgtattatttcactcttgtggttttttggcctcactctttgtggaccactaaggtaaataaaaatgcatattttgaa

SEQ ID NO: 28977 - DNA, 4360 bp, Homo sapiens
  source 1..4360: mol_type = unassigned DNA
gcactccagcctgggcaacaggagcgaaactccatctcaaaacaaaaaaaaaaagaatccctaacgcagaggaaaagattggtgagctttgtttaatcacacacgctgtacattttccacgccctccccctctgccctacaggaatccgctgtacttctgacggcccataggtggcactgtagggacaggtaagtgcacagggagcgccacccggagaggctgataggaggcggagcttcaatgcgacacaacgtggcgggaggagcctaagggacgaggaaaggcgagtgttctgcttgcgcagacgcaaggctgggcactcccccgggagtgagggttgctgggcctgatgacgtggcttggcaacgtccctaccgccgctgcttcccgggaacctggcgccgccggaactgatcgcggcctagtcccgacgcgtgtgtgctagtgagccggagccggcgacggcggcagtggcggcccggcctgcaggagcccgacggggtctctgccatgggggagtgacgcgcctgcacccgctgttccgcggcagcggcgagacatgaggagaccccgcgacaggggcagcggcggcggctcgtgagccccgggatggaggagaaatacggcggggacgtgctggccggccccggcggcggcggcggccttgggccggtggacgtacccagcgctcgattaacaaaatatattgtgttactatgtttcactaaatttttgaaggctgtgggacttttcgaatcatatgatctcctaaaagctgttcacattgttcagttcatttttatattaaaacttgggactgcattttttatggttttgtttcaaaagccattttcttctgggaaaactattaccaaacaccagtggatcaaaatatttaaacatgcagttgctgggtgtattatttcactcttgtggttttttggcctcactctttgtggaccactaaggactttgctgctatttgagcacagtgatattgttgtcatttcactactcagtgttttgttcaccagttctggaggaggaccagcaaagacaaggggagctgcttttttcattattgctgtgatctgtttattgctttttgacaatgatgatctcatggctaaaatggctgaacaccctgaaggacatcatgacagtgctctaactcatatgctttacacagccattgccttcttaggtgtggcagatcacaagggtggagtattattgctagtactggctttgtgttgtaaagttggttttcatacagcttccagaaagctctctgtcgacgttggtggagctaaacgtcttcaagctttatctcatcttgtttctgtgcttctcttgtgcccatgggtcattgttctttctgtgacaactgagagtaaagtggagtcttggttttctctcattatgccttttgcaacggttatcttttttgtcatgatcctggatttctacgtggattccatttgttcagtcaaaatggaagtttccaaatgtgctcgttatggatcctttcccatttttattagtgctctcctttttggaaatttttggacacatccaataacagaccagcttcgggctatgaacaaagcagcacaccaggagagcactgaacacgtcctgtctggaggagtggtagtgagtgctatattcttcattttgtctgccaatatcttatcatctccctctaagagaggacaaaaaggtacccttattggatattctcctgaaggaacacctctttataacttcatgggtgatgcttttcagcatagctctcaatcgatccctaggtttattaaggaatcactaaaacaaattcttgaggagagtgactctaggcagatcttttacttcttgtgcttgaatctgctttttacctttgtggaattattctatggcgtgctgaccaatagtctgggcctgatctcggatggattccacatgctttttgactgctctgctttagtcatgggactttttgctgccctgatgagtaggtggaaagccactcggattttctcctatgggtacggccgaatagaaattctgtctggatttattaatggactttttctaatagtaatagcgttttttgtgtttatggagtcagtggctagattgattgatcctccagaattagacactcacatgttaacaccagtctcagttggagggctgatagtaaaccttattggtatctgtgcctttagccatgcccatagccatgcccatggagcttctcaaggaagctgtcactcatctgatcacagccattcacaccatatgcatggacacagtgaccatgggcatggtcacagccacggatctgcgggtggaggcatgaatgctaacatgaggggtgtatttctacatgttttggcagatacacttggcagcattggtgtgatcgtatccacagttcttatagagcagtttggatggttcatcgctgacccactctgttctctttttattgctatattaatatttctcagtgttgttccactgattaaagatgcctgccaggttctactcctgagattgccaccagaatatgaaaaagaactacatattgctttagaaaagatacagaaaattgaaggattaatatcataccgagaccctcatttttggcgtcattctgctagtattgtggcaggaacaattcatatacaggtgacatctgatgtgctagaacaaagaatagtacagcaggttacaggaatacttaaagatgctggagtaaacaatttaacaattcaagtggaaaaggaggcatactttcaacatatgtctggcctaagtactggatttcatgatgttctggctatgacaaaacaaatggaatccatgaaatactgcaaagatggtacttacatcatgtgagataactcaagaattacccctggagaataaacaatgaagattaaatgactcagtatttgtaatattgccagaaggataaaaattacacattaactgtacagaaacagagttccctactactggatcaaggaatctttcttgaaggaaatttaaatacagaatgaaacattaatggtaaaagtggagtaattatttaaattatgtgtataaaaggaatcaaattttgagtaaacatgatgtattacatcatcttcaaaaatagatatgatggattctagtgaagaccaaaattacttctgtttactttctatcaggaagcatctccattgtaaatatgtatttacatgtttattacaaagacccaaatgaaaaatttttagtccattttttgcatagcctaaagataaaataggaataaaagttctatatttatggattttctgtatataaaactggtttctaattataacttaagtccattaagtaaaatctgtattgccactttaaatgtaaactaaattatttgggagaaacttcaaccactgatatgagataagcaatgagaatagggaagtgtataacatcacagtttttgatgtattacaaaaatcaaccactctataaaataaattttttttacttttggtaatatttgcaaatgaataattaatttattagggtaaagaacttatactaagttgtgtccatgttattcatttacttaccatgttcctttaaagtagaatatttcctttcttgttatatatttgacattccaagctgcttatcaagctggtatccaagcagtggtaagctttcatcctttcttagctccataacgttgtgaaacagccagttaagagaatcgtaaataattgtcaactcacagttgaattctctgcctatgtaggtaacttttttctaatttctggaacatatagatatataagaaatatcaaagaataggtagttatttcaaagtttaataagtaaaacttgttcataaacatttgagcaccatgaaatcaaaataccctataactactttctatagtcatatctaatttatatttttttcatttccagttgtaactagatatgtagtaaagtctgaaaagactttaccatagacaataacatgcagttttatcagcaccaaagaatgttgtccaaaagaaactttttaatacctgtctttctatttataacatctgaatattttcattcttatattaagaattttgataagtagattgaatttagtatgagtactattttcttatatataccacaatggcaaacatgtattataaatcatatttttgtcttaccaattttaatatatgaggggttttagaaatttgttgtaagttatttttatattccttgtcttttgcatattttttggccaaaatcttcaatacatattaaaatttttgagtggtgggaaaa

SEQ ID NO: 28978 - DNA, 1667 bp, Homo sapiens
  source 1..1667: mol_type = unassigned DNA
cacgtcctgtctggaggagtggtagtgagtgctatattcttcattttgtctgccaatatcttatcatctccctctaagagaggacaaaaaggtacccttattggatattctcctgaaggaacacctctttataacttcatgggtgatgcttttcagcatagctctcaatcgatccctaggtttattaaggaatcactaaaacaaattcttgaggagagtgactctaggcagatcttttacttcttgtgcttgaatctgctttttacctttgtggaattattctatggcgtgctgaccaatagtctgggcctgatctcggatggattccacatgctttttgactgctctgctttagtcatgggactttttgctgccctgatgagtaggtggaaagccactcggattttctcctatgggtacggccgaatagaaattctgtctggatttattaatggactttttctaatagtaatagcgttttttgtgtttatggagtcagtggctagattgattgatcctccagaattagacactcacatgttaacaccatgccatagccatgcccatggagcttctcaaggaagctgtcactcatctgatcacagccattcacaccatatgcatggacacagtgaccatgggcatggtcacagccacggatctgcgggtggaggcatgaatgctaacatgaggggtgtatttctacatgttttggcagatacacttggcagcattggtgtgatcgtatccacagttcttatagagcagtttggatggttcatcgctgacccactctgttctctttttattgctatattaatatttctcagtgttgttccactgattaaagatgcctgccaggttctactcctgagattgccaccagaatatgaaaaagaactacatattgctttagaaaagatacagaaaattgaaggattaatatcataccgagaccctcatttttggcgtcattctgctagtattgtggcaggaacaattcatatacaggtgacatctgatgtgctagaacaaagaatagtacagcaggttacaggaatacttaaagatgctggagtaaacaatttaacaattcaagtggaaaaggaggcatactttcaacatatgtctggcctaagtactggatttcatgatgttctggctatgacaaaacaaatggaatccatgaaatactgcaaagatggtacttacatcatgtgagataactcaagaattacccctggagaataaacaatgaagattaaatgactcagtatttgtaatattgccagaaggataaaaattacacattaactgtacagaaacagagttccctactactggatcaaggaatctttcttgaaggaaatttaaatacagaatgaaacattaatggtaaaagtggagtaattatttaaattatgtgtataaaaggaatcaaattttgagtaaacatgatgtattacatcatcttcaaaaatagatatgatggattctagtgaagaccaaaattacttctgtttactttctatcaggaagcatctccattgtaaatatgtatttacatgtttattacaaagacccaaatgaaaaatttttagtccattttttgcatagcctaaagataaaataggaataaaagttctatatttatggattttctgtat

SEQ ID NO: 28979 - DNA, 5089 bp, Homo sapiens
  source 1..5089: mol_type = unassigned DNA
agaacggcttccggcgggagctgtgcagctccttatcatggggacaattcatctctttcgaaaaccacaaagatccttttttggcaagttgttacgggaatttagacttgtagcagctgaccgaaggtcctggaagatactgctctttggtgtaataaacttgatatgtactggcttcctgcttatgtggtgcagttctactaatagtatagctttaactgcctatacttacctgaccatttttgatctttttagtttaatgacatgtttaataagttactgggtaacattgaggaaacctagccctgtctattcatttgggtttgaaagattagaagtcctggctgtatttgcctccacagtcttggcacagttgggagctctctttatattaaaagaaagtgcagaacgctttttggaacagcccgagatacacacgggaagattattagttggtacttttgtggctctttgtttcaacctgttcacgatgctttctattcggaataaaccttttgcttatgtctcagaagctgctagtacgagctggcttcaagagcatgttgcagatcttagtcgaagcttgtgtggaattattccgggacttagcagtatcttccttccccgaatgaatccatttgttttgattgatcttgctggagcatttgctctttgtattacatatatgctcattgaaattaataattattttgccgtagacactgcctctgctatagctattgccttgatgacatttggcactatgtatcccatgagtgtgtacagtgggaaagtcttactccagacaacaccaccccatgttattggtcagttggacaaactcatcagagaggtatctaccttagatggagttttagaagtccgaaatgaacatttttggaccctaggttttggctcattggctggatcagtgcatgtaagaattcgacgagatgccaatgaacaaatggttcttgctcatgtgaccaacaggctgtacactctagtgtctactctaactgttcaaattttcaaggatgactggattaggcctgccttattgtctgggcctgttgcagccaatgtcctaaacttttcagatcatcacgtaatcccaatgcctcttttaaagggtactgatgatttgaacccagttacatcaactccagctaaacctagtagtccacctccagaattttcatttaacactcctgggaaaaatgtgaacccagttattcttctaaacacacaaacaaggccttatggttttggtctcaatcatggacacacaccttacagcagcatgcttaatcaaggacttggagttccaggaattggagcaactcaaggattgaggactggttttacaaatataccaagtagatatggaactaataatagaattggacaaccaagaccatgatagactctaacttatttttataaggaatattgactccttggcttccaatttatttagtaatccaactttgcattgactgtttaatcatttactctaaatgttagataatagtagtcttgttcacatttcatgaaacctatgaaactatatttttgtaaaatgtatttgtgacagtgaaatcctcgtaaatgttaaaggctttaaataggcttcctttagaaaatgtgtttctttaaatttggattttggtatctttggttttgtagttgactgcagtgtgatgtgaccttacctttataagagccacttgatggagtagatctgtcacattactaagatacgatatttctttttttttccgagacggagtcttgctctgccactgtgcccggccaatacattattattaacttaaggctgtactttattaaggcttccttagtttttgttttgttttgttttttgagatggagtctcactctgtcgcccaggctggaatgcagtggcatgatctcagctcactgcaacctctgcctcctgagttcaaatgattctcctgcctcagcctcccgagtagctgggattacaggcacctgccaccacgcccagctaatttttgtatttttagtaaagacgggggatttcaccatgttggccaggctggtcttgaactcctgacctcatgatccacccaccttagcctcccaaagtgctgggattaggtgtgagccaccgcacctggccgatattttctttaatgaaatttataaatatgcttcttgaataatacacattttgggaaagggaaaaatgtctgttcaaaaagtaaaagtctcttttatagcttttccaaacttaattgctaaatttttctttgaggttctcctgaattatgtcttacaaactaaaagcaaaaatttttagcagaaattttggaatacattctatctagcacaatttgaatttttaattatcaagatttttgttaaagtttctctcctttaaaaattttagtacatttgtaaatagtccatggttctcagtgttttattttgattaagtgactacccaacttttggtgatatgcagtgaaagaatcccaattttctatgttacatttaatcaaatactgacataatgaatttatctttcctgacacattttcattcattggctttttaatttcttattttattaacaaaatatatcagatatattaccaaaacacatggagttccatacataatatggaatttgatgtcttttcaagttgcacaaagaatttgagcatatataattttaccaaagcataatggaccttagattatagaatacagcattgttaggtctgcagtgggcagtttctttttgttttgctttgtcaaaaatgggaaattgttaactgtgatgaaatgtgagaattacatagattatgttattttttagttgttttccaaatgcagagtttaaggactttctaacatggctagtattacttccaaaaagtataacaagcagcagtcacacatgacctaggagggttttttattgttttattttattatgcattccataacagttttaaaatgggattttgagaatggacttaactttcctggaatccaatgctcctggagatttatgactttcccagccatcagccagctatctagagaagatttttgtttttcttttgcaacagtttcttcagtcaactcattcactttcaaataggagcagcactttgaaatcctttttcttcactgtggattaaaaacatccaagaagccatctctgtcaagcagaattgtcatctgtggtaataagtgaccatgtcctaaatacctttttcttagtgaggagttggtcattgtctttggcatctgcaacccctgttcaggcatgtgacctgctaaagaaatacagcctacactaccttgactactggggaaaatgatacttcgtaaaatgtaataaggcaacctgttccttggcctttatcttatgttttccaactattactgtatctgttattggtctactattacaggatgattcttcttcctccattgatctcaactaaatatgaattagggtcatgcatgaaatctgaactgccgtgtcctgagttatggttaagaggtatgtgctgccaccccatgcatgtcttccccatccccataggattttaaagtgttcaggtaccaaacacagttctgtgtgaggttttatgcctacttcctcaacaccaattcagaggcaacacctgtgcatctgtcccaccaaaggtgctttaatacctaccttcactatttgagaaaggacactcacagttgcctgtgggttatgaaagaattggccctacgtcctgcatgtaagatgttacaggggacattgggccaggcattattatatagagaagtcttatttgccaagctctgactaacttctggatatgaaaataaggaacttgcccagcataggcctataggcagcagccttactagtaaatcttgccacagaatcacttgaagctagacagagaaagaagttcaatttaaatatttgtcccattgtttgtgattaggatgtaagctttgtggaatgtaattaaccctgctttacgaagtcaccatattataataggaaaaacactgcctaggaggcaagagatctgaattccagttctgatgctgccactgtgtaaggaagtagttttataacccatgggcaaatcatctgagctttctcatctgtaaagttagggagaggaattaattagttgatctgtaaaataatcagcttcaaaacgttatggctaaatctgtagaatgtatgcccaattgctaaacggatgttgtgcccagaattttatctagtgactacctcaacatacaggccaagcgttacctacaccaacacccaagccattaatttgaggtgccatgagaataggtgaaccacagcctaacaccatttaggtttttgtgtttttttcaggcttgcctctacttaaatatatttagatgagagagttctcttagacttctttctttgtaaggaagggttatttggggaagtgttggaaaaaagattagggcagggtacccttagtttatatagggtacaaaagaatgggaaacatcttccctttcttctttaatctctgaagtcatgtttggaattacatataatgtagcaggtactggagaggacctgaatttcaagcttctgatttagctgtttgtaaacttccaagttttgcttgactaaagaatgctgatcttttttgggagtctgatctccttctaatatcagaaagtgctttttatattccagattgcttgaattaaactgtttggattaaagaacatatatggagtttcctctctggttttaaataatctttctttattcagtagctattaataatttatctcatattcagcgaatatttattgagaatattgttgagaatctcttacatgccaggcactatactaagttaatatgcattcagtataccagttggtgtgacccagaccaaaggtaacacaaagatgaatgagaattccttcaaggcgccgataatcctagtaggagagctaagacacaaaactgttgcatgtttttaatcatcaaattaaacttctttccacgtcctta

SEQ ID NO: 28980 - DNA, 2359 bp, Homo sapiens
  source 1..2359: mol_type = unassigned DNA
agaacggcttccggcgggagctgtgcagctccttatcatggggacaattcatctctttcgaaaaccacaaagatccttttttggcaagttgttacgggaatttagacttgtagcagctgaccgaaggtcctggaagatactgctctttggtgtaataaacttgatatgtactggcttcctgcttatgtggtgcagttctactaatagtatagtttaatgacatgtttaataagttactgggtaacattgaggaaacctagccctgtctattcatttgggtttgaaagattagaagtcctggctgtatttgcctccacagtcttggcacagttgggagctctctttatattaaaagaaagtgcagaacgctttttggaacagcccgagatacacacgggaagattattagttggtacttttgtggctctttgtttcaacctgttcacgatgctttctattcggaataaaccttttgcttatgtctcagaagataatttaagtattttcttcttaaagctgctagtacgagctggcttcaagagcatgttgcagatcttagtcgaagcttgtgtggaattattccgggacttagcagtatcttccttccccgaatgaatccatttgttttgattgatcttgctggagcatttgctctttgtattacatatatgctcattgaaattaataattattttgccgtagacactgcctctgctatagctattgccttgatgacatttggcactatgtatcccatgagtgtgtacagtgggaaagtcttactccagacaacaccaccccatgttattggtcagttggacaaactcatcagagaggtatctaccttagatggagttttagaagtccgaaatgaacatttttggaccctaggttttggctcattggctggatcagtgcatgtaagaattcgacgagatgccaatgaacaaatggttcttgctcatgtgaccaacaggctgtacactctagtgtctactctaactgttcaaattttcaaggatgactggattaggcctgccttattgtctgggcctgttgcagccaatgtcctaaacttttcagatcatcacgtaatcccaatgcctcttttaaagggtactgatgatttgaacccagttacatcaactccagctaaacctagtagtccacctccagaattttcatttaacactcctgggaaaaatgtgaacccagttattcttctaaacacacaaacaaggccttatggttttggtctcaatcatggacacacaccttacagcagcatgcttaatcaaggacttggagttccaggaattggagcaactcaaggattgaggactggttttacaaatataccaagtagatatggaactaataatagaattggacaaccaagaccatgatagactctaacttatttttataaggaatattgactccttggcttccaatttatttagtaatccaactttgcattgactgtttaatcatttactctaaatgttagataatagtagtcttgttcacatttcatgaaacctatgaaactatatttttgtaaaatgtatttgtgacagtgaaatcctcgtaaatgttaaaggctttaaataggcttcctttagaaaatgtgtttctttaaatttggattttggtatctttggttttgtagttgactgcagtgtgatgtgaccttacctttataagagccacttgatggagtagatctgtcacattactaagatacgatatttctttttttttccgagacggagtcttgctctgccactgtgcccggccaatacattattattaacttaaggctgtactttattaaggcttccttagtttttgttttgttttgttttttgagatggagtctcactctgtcgcccaggctggaatgcagtggcatgatctcagctcactgcaacctctgcctcctgagttcaaatgattctcctgcctcagcctcccgagtagctgggattacaggcacctgccaccacgcccagctaatttttgtatttttagtaaagacgggggatttcaccatgttggccaggctggtcttgaactcctgacctcatgatccacccaccttagcctcccaaagtgctgggattaggtgtgagccaccgcacctggccgatattttctttaatgaaatttataaatatgcttcttgaataatacacattttgggaaagggaaaaatgtctgttcaaaaagtaaaagtctcttttatagcttttccaaacttaattgctaaatttttctttgaggttctcctgaattatgtcttacaaactaaaagcaaaaatttttagcagaaattttggaatacattctatctagc

SEQ ID NO: 28981 - DNA, 2354 bp, Homo sapiens
  source 1..2354: mol_type = unassigned DNA
agaacggcttccggcgggagctgtgcagctccttatcatggggacaattcatctctttcgaaaaccacaaagatccttttttggcaagttgttacgggaatttagacttgtagcagctgaccgaaggtcctggaagatactgctctttggtgtaataaacttgatatgtactggcttcctgcttatgtggtgcagttctactaatagtatagctttaactgcctatacttacctgaccatttttgatctttttagagacggggtttcaccattttggctgggctggtctcaaactcctgacctcaagtggtccacccacctcggcctaccaaagtgctgggataacaggcgtgagctaccgtgcctgagcaatagtttaatgacatgtttaataagttactgggtaacattgaggaaacctagccctgtctattcatttgggtttgaaagattagaagtcctggctgtatttgcctccacagtcttggcacagttgggagctctctttatattaaaagaaagtgcagaacgctttttggaacagcccgagatacacacgggaagattattagttggtacttttgtggctctttgtttcaacctgttcacgatgctttctattcggaataaaccttttgcttatgtctcagaagctgctagtacgagctggcttcaagagcatgttgcagatcttagtcgaagcttgtgtggaattattccgggacttagcagtatcttccttccccgaatgaatccatttgttttgattgatcttgctggagcatttgctctttgtattacatatatgctcattgaaattaataattattttgccgtagacactgcctctgctatagctattgccttgatgacatttggcactatgtatcccatgagtgtgtacagtgggaaagtcttactccagacaacaccaccccatgttattggtcagttggacaaactcatcagagaggtatctaccttagatggagttttagaagtccgaaatgaacatttttggaccctaggttttggctcattggctggatcagtgcatgtaagaattcgacgagatgccaatgaacaaatggttcttgctcatgtgaccaacaggctgtacactctagtgtctactctaactgttcaaattttcaaggatgactggattaggcctgccttattgtctgggcctgttgcagccaatgtcctaaacttttcagatcatcacgtaatcccaatgcctcttttaaagggtactgatgatttgaacccagttacatcaactccagctaaacctagtagtccacctccagaattttcatttaacactcctgggaaaaatgtgaacccagttattcttctaaacacacaaacaaggccttatggttttggtctcaatcatggacacacaccttacagcagcatgcttaatcaaggacttggagttccaggaattggagcaactcaaggattgaggactggttttacaaatataccaagtagatatggaactaataatagaattggacaaccaagaccatgatagactctaacttatttttataaggaatattgactccttggcttccaatttatttagtaatccaactttgcattgactgtttaatcatttactctaaatgttagataatagtagtcttgttcacatttcatgaaacctatgaaactatatttttgtaaaatgtatttgtgacagtgaaatcctcgtaaatgttaaaggctttaaataggcttcctttagaaaatgtgtttctttaaatttggattttggtatctttggttttgtagttgactgcagtgtgatgtgaccttacctttataagagccacttgatggagtagatctgtcacattactaagatacgatatttctttttttttccgagacggagtcttgctctgccactgtgcccggccaatacattattattaacttaaggctgtactttattaaggcttccttagtttttgttttgttttgttttttgagatggagtctcactctgtcgcccaggctggaatgcagtggcatgatctcagctcactgcaacctctgcctcctgagttcaaatgattctcctgcctcagcctcccgagtagctgggattacaggcacctgccaccacgcccagctaatttttgtatttttagtaaagacgggggatttcaccatgttggccaggctggtcttgaactcctgacctcatgatccacccaccttagcctcccaaagtgctgggattaggtgtgagccaccgcacctggccgatattttctttaatgaaatttataaatatgcttcttgaataatacacattttgggaaagggaaaaa

SEQ ID NO: 28982 - DNA, 4589 bp, Homo sapiens
  source 1..4589: mol_type = unassigned DNA
ggcttccggcgggagctgtgcagctccttatcatgtttaatgacatgtttaataagttactgggtaacattgaggaaacctagccctgtctattcatttgggtttgaaagattagaagtcctggctgtatttgcctccacagtcttggcacagttgggagctctctttatattaaaagaaagtgcagaacgctttttggaacagcccgagatacacacgggaagattattagttggtacttttgtggctctttgtttcaacctgttcacgatgctttctattcggaataaaccttttgcttatgtctcagaagctgctagtacgagctggcttcaagagcatgttgcagatcttagtcgaagcttgtgtggaattattccgggacttagcagtatcttccttccccgaatgaatccatttgttttgattgatcttgctggagcatttgctctttgtattacatatatgctcattgaaattaataattattttgccgtagacactgcctctgctatagctattgccttgatgacatttggcactatgtatcccatgagtgtgtacagtgggaaagtcttactccagacaacaccaccccatgttattggtcagttggacaaactcatcagagaggtatctaccttagatggagttttagaagtccgaaatgaacatttttggaccctaggttttggctcattggctggatcagtgcatgtaagaattcgacgagatgccaatgaacaaatggttcttgctcatgtgaccaacaggctgtacactctagtgtctactctaactgttcaaattttcaaggatgactggattaggcctgccttattgtctgggcctgttgcagccaatgtcctaaacttttcagatcatcacgtaatcccaatgcctcttttaaagggtactgatgatttgaacccagttacatcaactccagctaaacctagtagtccacctccagaattttcatttaacactcctgggaaaaatgtgaacccagttattcttctaaacacacaaacaaggccttatggttttggtctcaatcatggacacacaccttacagcagcatgcttaatcaaggacttggagttccaggaattggagcaactcaaggattgaggactggttttacaaatataccaagtagatatggaactaataatagaattggacaaccaagaccatgatagactctaacttatttttataaggaatattgactccttggcttccaatttatttagtaatccaactttgcattgactgtttaatcatttactctaaatgttagataatagtagtcttgttcacatttcatgaaacctatgaaactatatttttgtaaaatgtatttgtgacagtgaaatcctcgtaaatgttaaaggctttaaataggcttcctttagaaaatgtgtttctttaaatttggattttggtatctttggttttgtagttgactgcagtgtgatgtgaccttacctttataagagccacttgatggagtagatctgtcacattactaagatacgatatttctttttttttccgagacggagtcttgctctgccactgtgcccggccaatacattattattaacttaaggctgtactttattaaggcttccttagtttttgttttgttttgttttttgagatggagtctcactctgtcgcccaggctggaatgcagtggcatgatctcagctcactgcaacctctgcctcctgagttcaaatgattctcctgcctcagcctcccgagtagctgggattacaggcacctgccaccacgcccagctaatttttgtatttttagtaaagacgggggatttcaccatgttggccaggctggtcttgaactcctgacctcatgatccacccaccttagcctcccaaagtgctgggattaggtgtgagccaccgcacctggccgatattttctttaatgaaatttataaatatgcttcttgaataatacacattttgggaaagggaaaaatgtctgttcaaaaagtaaaagtctcttttatagcttttccaaacttaattgctaaatttttctttgaggttctcctgaattatgtcttacaaactaaaagcaaaaatttttagcagaaattttggaatacattctatctagcacaatttgaatttttaattatcaagatttttgttaaagtttctctcctttaaaaattttagtacatttgtaaatagtccatggttctcagtgttttattttgattaagtgactacccaacttttggtgatatgcagtgaaagaatcccaattttctatgttacatttaatcaaatactgacataatgaatttatctttcctgacacattttcattcattggctttttaatttcttattttattaacaaaatatatcagatatattaccaaaacacatggagttccatacataatatggaatttgatgtcttttcaagttgcacaaagaatttgagcatatataattttaccaaagcataatggaccttagattatagaatacagcattgttaggtctgcagtgggcagtttctttttgttttgctttgtcaaaaatgggaaattgttaactgtgatgaaatgtgagaattacatagattatgttattttttagttgttttccaaatgcagagtttaaggactttctaacatggctagtattacttccaaaaagtataacaagcagcagtcacacatgacctaggagggttttttattgttttattttattatgcattccataacagttttaaaatgggattttgagaatggacttaactttcctggaatccaatgctcctggagatttatgactttcccagccatcagccagctatctagagaagatttttgtttttcttttgcaacagtttcttcagtcaactcattcactttcaaataggagcagcactttgaaatcctttttcttcactgtggattaaaaacatccaagaagccatctctgtcaagcagaattgtcatctgtggtaataagtgaccatgtcctaaatacctttttcttagtgaggagttggtcattgtctttggcatctgcaacccctgttcaggcatgtgacctgctaaagaaatacagcctacactaccttgactactggggaaaatgatacttcgtaaaatgtaataaggcaacctgttccttggcctttatcttatgttttccaactattactgtatctgttattggtctactattacaggatgattcttcttcctccattgatctcaactaaatatgaattagggtcatgcatgaaatctgaactgccgtgtcctgagttatggttaagaggtatgtgctgccaccccatgcatgtcttccccatccccataggattttaaagtgttcaggtaccaaacacagttctgtgtgaggttttatgcctacttcctcaacaccaattcagaggcaacacctgtgcatctgtcccaccaaaggtgctttaatacctaccttcactatttgagaaaggacactcacagttgcctgtgggttatgaaagaattggccctacgtcctgcatgtaagatgttacaggggacattgggccaggcattattatatagagaagtcttatttgccaagctctgactaacttctggatatgaaaataaggaacttgcccagcataggcctataggcagcagccttactagtaaatcttgccacagaatcacttgaagctagacagagaaagaagttcaatttaaatatttgtcccattgtttgtgattaggatgtaagctttgtggaatgtaattaaccctgctttacgaagtcaccatattataataggaaaaacactgcctaggaggcaagagatctgaattccagttctgatgctgccactgtgtaaggaagtagttttataacccatgggcaaatcatctgagctttctcatctgtaaagttagggagaggaattaattagttgatctgtaaaataatcagcttcaaaacgttatggctaaatctgtagaatgtatgcccaattgctaaacggatgttgtgcccagaattttatctagtgactacctcaacatacaggccaagcgttacctacaccaacacccaagccattaatttgaggtgccatgagaataggtgaaccacagcctaacaccatttaggtttttgtgtttttttcaggcttgcctctacttaaatatatttagatgagagagttctcttagacttctttctttgtaaggaagggttatttggggaagtgttggaaaaaagattagggcagggtacccttagtttatatagggtacaaaagaatgggaaacatcttccctttcttctttaatctctgaagtcatgtttggaattacatataatgtagcaggtactggagaggacctgaatttcaagcttctgatttagctgtttgtaaacttccaagttttgcttgactaaagaatgctgatcttttttgggagtctgatctccttctaatatcagaaagtgctttttatattccagattgcttgaattaaactgtttggattaaagaacatatatggagtttc

SEQ ID NO: 28983 - DNA, 2381 bp, Homo sapiens
  source 1..2381: mol_type = unassigned DNA
agaacggcttccggcgggagctgtgcagctccttatcatggggacaattcatctctttcgaaaaccacaaagatccttttttggcaagttgttacgggaatttagacttgtagcagctgaccgaaggtcctggaagatactgctctttggtgtaataaacttgatatgtactggcttcctgcttatgtggtgcagttctactaatagtatagctttaactgcctatacttacctgaccatttttgatctttttagtttaatgacatgtttaataagttactgggtaacattgaggaaacctagccctgtctattcatttgggtttgaaagattagaagtcctggctgtatttgcctccacagtcttggcacagttgggagctctctttatattaaaagaaagtgcagaacgctttttggaacagcccgagatacacacgggaagattattagttggtacttttgtggctctttgtttcaacctgttcacgatgctttctattcggaataaaccttttgcttatgtctcagaagctgctagtacgagctggcttcaagagcatgttgcagatcttagtcgaagcttgtgtggaattattccgggacttagcagtatcttccttccccgaatgaatccatttgttttgattgatcttgctggagcatttgctctttgtattacatatatgctcattgaaattaataattattttgccgtagacactgcctctgctatagctattgccttgatgacatttggcactatgtatcccatgagtgtgtacagtgggaaagtcttactccagacaacaccaccccatgttattggtcagttggacaaactcatcagagaggctggatcagtgcatgtaagaattcgacgagatgccaatgaacaaatggttcttgctcatgtgaccaacaggctgtacactctagtgtctactctaactgttcaaattttcaaggatgactggattaggcctgccttattgtctgggcctgttgcagccaatgtcctaaacttttcagatcatcacgtaatcccaatgcctcttttaaagggtactgatgatttgaacccagttacatcaactccagctaaacctagtagtccacctccagaattttcatttaacactcctgggaaaaatgtgaacccagttattcttctaaacacacaaacaaggccttatggttttggtctcaatcatggacacacaccttacagcagcatgcttaatcaaggacttggagttccaggaattggagcaactcaaggattgaggactggttttacaaatataccaagtagatatggaactaataatagaattggacaaccaagaccatgatagactctaacttatttttataaggaatattgactccttggcttccaatttatttagtaatccaactttgcattgactgtttaatcatttactctaaatgttagataatagtagtcttgttcacatttcatgaaacctatgaaactatatttttgtaaaatgtatttgtgacagtgaaatcctcgtaaatgttaaaggctttaaataggcttcctttagaaaatgtgtttctttaaatttggattttggtatctttggttttgtagttgactgcagtgtgatgtgaccttacctttataagagccacttgatggagtagatctgtcacattactaagatacgatatttctttttttttccgagacggagtcttgctctgccactgtgcccggccaatacattattattaacttaaggctgtactttattaaggcttccttagtttttgttttgttttgttttttgagatggagtctcactctgtcgcccaggctggaatgcagtggcatgatctcagctcactgcaacctctgcctcctgagttcaaatgattctcctgcctcagcctcccgagtagctgggattacaggcacctgccaccacgcccagctaatttttgtatttttagtaaagacgggggatttcaccatgttggccaggctggtcttgaactcctgacctcatgatccacccaccttagcctcccaaagtgctgggattaggtgtgagccaccgcacctggccgatattttctttaatgaaatttataaatatgcttcttgaataatacacattttgggaaagggaaaaatgtctgttcaaaaagtaaaagtctcttttatagcttttccaaacttaattgctaaatttttctttgaggttctcctgaattatgtcttacaaactaaaagcaaaaatttttagcagaaattttggaatacattctatctagcacaatttgaatttttaattatcaagatttttgttaaagtttctctcctttaaaaattttagtacatttgtaaat

SEQ ID NO: 28984 - DNA, 1770 bp, Homo sapiens
  source 1..1770: mol_type = unassigned DNA
agaacggcttccggcgggagctgtgcagctccttatcatgtcctggaagatactgctctttggtgtaataaacttgatatgtactggcttcctgcttatgtggtgcagttctactaatagtatagctttaactgcctatacttacctgaccatttttgatctttttagtttaatgacatgtttaataagttactgggtaacattgaggaaacctagccctgtctattcatttgggtttgaaagattagaagtcctggctgtatttgcctccacagtcttggcacagttgggagctctctttatattaaaagaaagtgcagaacgctttttggaacagcccgagatacacacgggaagattattagttggtacttttgtggctctttgtttcaacctgttcacgatgctttctattcggaataaaccttttgcttatgtctcagaagctgctagtacgagctggcttcaagagcatgttgcagatcttagtcgaagcttgtgtggaattattccgggacttagcagtatcttccttccccgaatgaatccatttgttttgattgatcttgctggagcatttgctctttgtattacatatatgctcattgaaattaataattattttgccgtagacactgcctctgctatagctattgccttgatgacatttggcactatgtatcccatgagtgtgtacagtgggaaagtcttactccagacaacaccaccccatgttattggtcagttggacaaactcatcagagaggtatctaccttagatggagttttagaagtccgaaatgaacatttttggaccctaggttttggctcattggctggatcagtgcatgtaagaattcgacgagatgccaatgaacaaatggttcttgctcatgtgaccaacaggctgtacactctagtgtctactctaactgttcaaattttcaaggatgactggattaggcctgccttattgtctgggcctgttgcagccaatgtcctaaacttttcagatcatcacgtaatcccaatgcctcttttaaagggtactgatgatttgaacccagttacatcaactccagctaaacctagtagtccacctccagaattttcatttaacactcctgggaaaaatgtgaacccagttattcttctaaacacacaaacaaggccttatggttttggtctcaatcatggacacacaccttacagcagcatgcttaatcaaggacttggagttccaggaattggagcaactcaaggattgaggactggttttacaaatataccaagtagatatggaactaataatagaattggacaaccaagaccatgatagactctaacttatttttataaggaatattgactccttggcttccaatttatttagtaatccaactttgcattgactgtttaatcatttactctaaatgttagataatagtagtcttgttcacatttcatgaaacctatgaaactatatttttgtaaaatgtatttgtgacagtgaaatcctcgtaaatgttaaaggctttaaataggcttcctttagaaaatgtgtttctttaaatttggattttggtatctttggttttgtagttgactgcagtgtgatgtgaccttacctttataagagccacttgatggagtagatctgtcacattactaagatacgatatttctttttttttccgagacggagtcttgctctgccactgtgcccggccaatacattattattaacttaaggctgtactttattaaggc

SEQ ID NO: 28985 - DNA, 1281 bp, Homo sapiens
  source 1..1281: mol_type = unassigned DNA
gcagagaagatgttgcccctgtccatcaaagacgatgaatacaaaccacccaagttcaatttgttcggcaagatctcgggctggtttaggtctatactgtccgacaagacttcccggaacctgtttttcttcctgtgcctgaacctctctttcgcttttgtggaactactctacggcatctggagcaactgcttaggcttgatttccgactcttttcacatgtttttcgatagcactgccattttggctggactggcagcttctgttatttcaaaatggagagataatgatgctttctcctatgggtatgttagagcggaagttctggctggctttgtcaatggcctatttttgatcttcactgctttttttattttctcagaaggagttgagagagcattagcccctccagatgtccaccatgagagactgcttcttgtttccattcttgggtttgtggtaaacctaataggaatatttgttttcaaacatggaggtcatggacattctcatggctctggccacggacacagtcattccctctttaatggtgctctagatcaggcacatggccatgtcgatcattgccatagccatgaagtgaaacatggtgctgcacatagccatgatcatgctcatggacatggacactttcattctcatgatggcccgtccttaaaagaaacaacaggacccagcagacagattttacaaggtgtatttttacatatcctagcagatacacttggaagtattggtgtaattgcttctgccatcatgatgcaaaattttggtctgatgatagcagatcctatctgttcaattcttatagccattcttatagttgtaagtgttattcctcttttaagagaatctgttggaatattaatgcagagaactcctcccctattagaaaatagtctgcctcagtgctatcagagggtacagcagttgcaaggagtttacagtttacaggaacagcacttctggactttatgttctgacgtttatgttgggaccttgaaattaatagtagcacctgatgctgatgctaggtggattttaagccaaacacataatatttttactcaggctggagtgagacagctctacgtacagattgactttgcagccatgtagtgaatggaaagaaattatgcaccttttatggaccaaatttttctggtactgtacgatccaaaacattgtacccagctttttaaaagagagaaattatcactacaactcccgagcactaagtagacggggtagagtcagccg

SEQ ID NO: 28986 - DNA, 581 bp, Homo sapiens
  source 1..581: mol_type = unassigned DNA
tgttattcctcttttaagagaatctgttggaatattaatgcagagaactcctcccctattagaaaatagtctgcctcagtgctatcagagggtacagcagttgcaaggagtttacagtttacaggaacagcacttctggactttatgttctgacgtttatgttgggaccttgaaattaatagtagcacctgatgctgatgctaggtggattttaagccaaacacataatatttttactcagaaactggaagaggaaaatgagaatctgtaaaacttgaagctgtcctcatcgggccagatggataaagcaaaatgacttttttttcttttttttttctgttagactgagcttttgtggaaagctgtaagccctcaggggaaggatatcagcttgagtaattaactcatgattatgcaaagaaaatttacctagcctctttgtttttcctttctttgttattgccttgggctacttcattttttattaccatcttctctgtttagggctaggagtaaggaaaatgacagagacaataaaaagagcccaagttttgcccattttgctttcactaacaatgttg

SEQ ID NO: 28987 - DNA, 7898 bp, Homo sapiens
  source 1..7898: mol_type = unassigned DNA
gcgcggcccgggccggaagtaagcgaattcccgggtgtgtgtctgtgtctgtctgtgtctcgcagcggcgcgcggccccggacaagcgctggggattcccgtttgaggcgtcactactgtcactgccatcaccccacggagccacttctagaggggagtagacccggcccttcgccgggcagagaagatgttgcccctgtccatcaaagacgatgaatacaaaccacccaagttcaatttgttcggcaagatctcgggctggtttaggtctatactgtccgacaagacttcccggaacctgtttttcttcctgtgcctgaacctctctttcgcttttgtggaactactctacggcatctggagcaactgcttaggcttgatttccgactcttttcacatgtttttcgatagcactgccattttggctggactggcagcttctgttatttcaaaatggagagataatgatgctttctcctatgggtatgttagagcggaagttctggctggctttgtcaatggcctatttttgatcttcactgctttttttattttctcagaaggagttgagagagcattagcccctccagatgtccaccatgagagactgcttcttgtttccattcttgggtttgtggtaaacctaataggaatatttgttttcaaacatggaggtcatggacattctcatggctctggccacggacacagtcattccctctttaatggtgctctagatcaggcacatggccatgtcgatcattgccatagccatgaagtgaaacatggtgctgcacatagccatgatcatgctcatggacatggacactttcattctcatgatggcccgtccttaaaagaaacaacaggacccagcagacagattttacaaggtgtatttttacatatcctagcagatacacttggaagtattggtgtaattgcttctgccatcatgatgcaaaattttggtctgatgatagcagatcctatctgttcaattcttatagccattcttatagttgtaagtgttattcctcttttaagagaatctgttggaatattaatgcagagaactcctcccctattagaaaatagtctgcctcagtgctatcagagggtacagcagttgcaaggagtttacagtttacaggaacagcacttctggactttatgttctgacgtttatgttgggaccttgaaattaatagtagcacctgatgctgatgctaggtggattttaagccaaacacataatatttttactcaggctggagtgagacagctctacgtacagattgactttgcagccatgtagtgaatggaaagaaattatgcaccttttatggaccaaatttttctgccagtaagaatttcagttgtgggcctccagtcttctggaatgtcttcactgcagctgctggaaatcactgctttcattcccacaaaaccagtattacttttttttaaaaaaagaaagaaattggaaatctgtgctatacgtaatgtcataattgttgacgttcttcagtataatcatgtttgttaaattgtttgtaccttgcaaacttatgaaccaaaccatattgggttttcaaagtgcctttgtatccaaaaatgtatttgccagcatagaaatgtaccatcaagagtcatgtatgttttatttttgtttttattttttattttttgagatggagtctcgctctgtagccaggctggagtgcagtggcataatctcagctcactgcaacctctgcttcccgggttcaagctattctcctgcctcagccttctgagtagctgcgactatgggcgtgtgccaccatgcccagctaatttttgcatttttagtagagatggggtttcaccatgttggccaggatggtcttgatctcttgacctcgtgatccgtccacctcagcctcccaaagtgctgggattacaggtgtgagccaccacgcccggctatgtttttttttttttttttttttttttttaacaatggatattctgtaaaatatcctgtacaaaacaagactattgccagtaatgtatacaaattgtctttttgtgtacttccagcataggtttggatatatgaacatttttcttttattgttttatcttcacagaaaataaaaggtgttaatttgctttttaaaacaaatttaattatcacattttaaattactttgtggactgtgttttcaaaactttgcaaattcatctgttacacagaaaattttgacttaaaacatctgctgaattccaaatttctgtaatagctactgtatctgtgataaactttcctatatctttccttgccatttctatggattttataatgaaagaaaaaggcattggagactgaaggcagaaatggttgtgacagtgctgtttggctttttcattcttcaaatgccaagtcatccactttgttttcctgtttaggctttgcacaaatacaattgctttcaggaatcctaaagcagcattttattgagtttgaattattaaaggtacagaggaaatgtggtgatgtagaacttttcctaacacaggtatctaggaagtaagtgctgagttgattttctaggttcttacgtatttgaaaaataaaattgcaattcgagataagtgcttgagcactctacttaagtattctctgtgttttatgaagagaaaatgatctgattttcccttatacttcattttacaatacatattcccttttaacttaaaaaaattgtaaatgtgggagaaaaaaccctgcaggatggaaacaattattaagaatgtagatcaataagtactttttagtgatgtggcagaaatccctgttgattctaagttttagagtgtcttttcccctatttctgacctacaactataaactactctctattaggagaactagaccactttcttcattcttttctaaactgctgcagattgccgtgaactctatcaatagtctcttttccgcaggcaaagtggcattttctaaacatgtttgcttactgccaggtggtttgaaatctatgatttactgcagtagtatgtgcttaaaacaactgttgaggtcttttaagcaggaaagttcaaaaggaagtgtcctgataatggtactggtttttctacaaatataagtagtcattagaagtttgcaaccaccaccaagtctgagagaactctgggatattctgtgggttttggcatattagatagagaaaatgacagatctagatgaagggagcttttggatgtgtgcctttaaaaactgattatgtataaatactgatatttcacatacggagatatttgaagacccaagtctgcctttcacagagccctccattccaagtttagtttttgtcaaaatatgaatcattttatttgactgtactatcagtacacaaatgcatgagtatgtttatacagtgttagactgatgtgaatttgcatttgttacattacattgccagcgcatatcatttagcaagttggcattaacatttatgctttaattaaatgccagtatacctatgtgtgcagcagtaaaaaattagtgagaaaaagcaactttttgtcactcttaggaaatattttgtcttattagtgttcttggcacatgtatattactaaagtagataattccaatgagaaatactaccagattattgttataaaattaatttacaatgtccctgatattgagctaactcttaaaaaaaccaaacaaaactcgtatctgagtgtaactttgccaatattttaaaagccaaaatattctctggacaacaaatttgtattgctcagggacagtttaccttgcctggtaaaccttcccaaacagaaatatagctatactatctttggttttgtttttttgttttttttgtttgtttgtattagatggaatttcactcttgtcgcccaggctggagtgtagtggcgcagtctcagctcactgcaacctccacctcccgggttcaagtgattctcctgtctcagctccctgagtaactggaattacaggtgcacgccaccacgcccggctaatttttgtgtttttagcagagacagggtttcaccacgttggccagggtggtcttggactcctgacctcaggtcatcctcctgcctcggcctcccaaagtgctgagactacaggtgtgagccaccgtgctcagccactagctttggttttttaaacatagattatattcctcaagatgaagggcttaacatatccacagcttcctcagtttgctaactccccatgcatctttgtgaaggacagtatctagtttatctgtaggtcagtgttccttgtgctgtcatttcccttatatctggaatttgtcagcattcctgaaaacctacacgtgtatatcagtaaccaaaatgctatgccttttttgcacctttgtacagcagccaaatcatgaactcaaaatgtatttgatcacagttctataatgtttttacctacctattatggaataatcagtttttacagagattattaatatggtagaaccctgttatgtaattccaaaacttaagaaccatatttacattgcttaacacagaattttacatctaagcaaggactggctttagaagcagtgtagttctacctctcattttacagatgagaaaaccgaagcccagaaaaactctcatttgctcaaagtcacagagaaaattagtggcaaagccaaaaagattcagatcttctgactcgaagttgagagttctttatactctattatgctgcctctccagtgtaatatttgcctttctgtaaatgggattaaatatgatttgtaaataaaggacatctgacctccttttttggtacattaaggcactttataaatggacttttattgtctcatttttcgtatataattatttccatcatattctttatggaagatgcaattaattttaacttttttactcttataaaaccagttcctgacattttaaaaaacaatatctgtaaaatggatccttttatgagtgaatttttctgctaattgcccaaggctaaatccaatttaaggattgcttagtttctttattttgtttatggtctctgaactggtatttttttataaaccaggctaattcacaggtcataccatttcattcttgtcgtgttggcttccagtcactggaaaagcttttgcattttaaagatttttagagccatgcaaaactgggcattaaatgttgcataaagcaaatcttttaagtaaggtaaaatgttgaagtcttaaccagaattcctacaactaattactaaaactgctatttctaactcttcatgaaagcattacctttggaaagttaaactttttttttcctttcatcaccgtctttgaaacaaattattttccaattcataagaactttggtaaaaaaaaaaataaaaggaaattatatgtttttctttggacattcattggaaggcttgttgaagacatgatcccccagaagccttagtgacccagatctcaaccagagactcaagatagcctcaaatacagtgaaagattatgtatccaaaaaaaaaaaaaaaaaaaaaagaaaaggagcagggaaggacagttctagttaaagccaaatggatgtgagtctgacaagggtgtctttgatttatatttcctaactgcaaattacacagaaagtgagaatggggaataacttttattaagtatttatgtgccaggcggttagtgtggccttcatgttattacatttaatcctcaaatttctacaaaggaataattttgcatgattttatgattgacggagcattttcaaatctcctctaattctcataacatctctgtgaggaaggaatttttatccttattttacagatgaggaagctgtttggagataatttaagtgacttgcctggggaatctagccagtagtagagtactgattaatcaggtgctgacatctgctctgctttgtgtatgtaattcagcagtgcttcaaagatccaagaagctgtagcagatctcaatacactctcctataaaattagtgaataatcaccatgacaaaattggtatggcggaacagtcattatacattatttagactcattccttcttccagtgcccttatgattatttcctacctttaccattgatcttaaactgtgcaggctaaaaagaggaaccagaactcccttaagcacttttaagactatttaaaaaataaagttttgttggcattgaagagtaagctgcttaagggactgaatgaaaagatagtaccctttgtggctgtatgaagagagaaactgaatttctatccaagagaccttaatttagtttattagggaattatcttccccaaaagtacaagtaattttgcactgcaggagaaggataagtagatttgatttacatcacattttatacacacctttcaaaaggaagaaatctgtttcataaatagtagtaatctatgcttaaacttaacatttaatgttgacttcttacaacagccttgaaaattatttgtaattttgatcatgatgttggaaagcttgtaataaagaatatctttctcttctgcatccttttatcctcaaacttagcatggattcacatgctgagtaaatgtttggttaactagtgaacattttagatagttgtgtcaaaaataagggttagggataggtaaaaccagtaatttactgttttttacagaagacatctcagcatttctttggcatttttgcacaaataaatgactatatattcaccttggccatttttttttttaagtagccctatgagctgctcattctttttcatatacagtggaagtatacagatgttatccattttacaaattgttggatcggaatttgacagaattgggactgtggaacctgggtcacttgaattttctatattttgtatggccaaatcaggaaccagacagtctccatagtctcctttgtttttatggaaaattgccatattcacatatttcatttatcctaatgtattgtcatccaaaatgaaagaggtctttcttgaaggtgctttaaagacatcactacatgtattcaattactgatttaaatattcccagaattattttttacctttctctttttcctctcaaacacaaaattttagtagtacctccctctatttcttcactgatttttcatctgttttcattgttatttccactatagaacttctactttatactagcggggaaaatttttttatttagaattttaatatttgaattttgtttatgtatcacatactgtgctacagttagcctcaatgaagattctattttgaactagacatcctgtcaatagtttgtcaagtaacttcattgcttcctttgatagcaattcagtgaaattttttcccaagtgatattttcccccaacttttgtgagtttgataaataggatgagtcttttatattggaaatactgtgaatggaaaattgccaaatcccttcttagtatattttaagcaccctacaacactttacctccctgcctttagtggtatttaaacatatggccaagttagtatttgggtttgattcctttggtgaagattaaggcatcaaaacatttcttaaaatgtttgagtacaaggctaagttataatgtcaactttcaaagactatgttgtgattcggtttgaatatgctgaagtgagcaattatgatttgcccaagtgcaatacaacaaatctataatgtatatttcacattttctacttgaacacattcatgtatatattttgttaaacttcatatgtatttaaaaagaatcatgaactgtatcaaaattctttcaataaaatttctatttaaaaatc

SEQ ID NO: 28988 - DNA, 5430 bp, Homo sapiens
  source 1..5430: mol_type = unassigned DNA
ttttaagaagcatcaagaaagcctgcctgtctaactttggaaatatcaccctcatgctgtcttcccaggatgtctctctccctaagtaagagatgttacttcctggagggaatgcagtgttgggaatctgaagacccagctttgagctgaatttgctttgtgatacctggagagaagacgtgttttcttgacaacagcacagtacctagtgagttcaacaacaacgacaacaacagccgcagctcatcctggccgtcatggagtttcttgaaagaacgtatcttgtgaatgataaagctgccaagatgtatgctttcacactagaaagaaggagctgcaaatgaacacttcatagcaatgtggaactccaacagaaaccggtgaataaagatcagtgtcccagagagagaccagaggagctggagtcaggaggcatgtaccactgccacagtggctccaagcccacagaaaagggggcgaatgagtacgcctatgccaagtggaaactctgttctgcttcagcaatatgcttcattttcatgattgcagaggtcgtgggtgggcacattgctgggagtcttgctgttgtcacagatgctgcccacctcttaattgacctgaccagtttcctgctcagtctcttctccctgtggttgtcatcgaagcctccctctaagcggctgacatttggatggcaccgagcagagatccttggtgccctgctctccatcctgtgcatctgggtggtgactggcgtgctagtgtacctggcatgtgagcgcctgctgtatcctgattaccagatccaggcgactgtgatgatcatcgtttccagctgcgcagtggcggccaacattgtactaactgtggttttgcaccagagatgccttggccacaatcacaaggaagtacaagccaatgccagcgtcagagctgcttttgtgcatgcccttggagatctatttcagagtatcagtgtgctaattagtgcacttattatctactttaagccagagtataaaatagccgacccaatctgcacattcatcttttccatcctggtcttggccagcaccatcactatcttaaaggacttctccatcttactcatggaaggtgtgccaaagagcctgaattacagtggtgtgaaagagcttattttagcagtcgacggggtgctgtctgtgcacagcctgcacatctggtctctaacaatgaatcaagtaattctctcagctcatgttgctacagcagccagccgggacagccaagtggttcggagagaaattgctaaagcccttagcaaaagctttacgatgcactcactcaccattcagatggaatctccagttgaccaggaccccgactgccttttctgtgaagacccctgtgactagctcagtcacaccgtcagtttcccaaatttgacaggccaccttcaaacatgctgctatgcagtttctgcatcatagaaaataaggaaccaaaggaagaaattcatgtcatggtgcaatgcacattttatctatttatttagttccattcaccatgaaggaagaggcactgagatccatcaatcaattggattatatactgatcagtagctgtgttcaattgcaggaatgtgtatatagattattcctgagtggagccgaagtaacagctgtttgtaactatcggcaataccaaattcatctcccttccaataatgcatcttgagaacacataggtaaatttgaactcaggaaagtcttactagaaatcagtggaagggacaaatagtcacaaaattttaccaaaacattagaaacaaaaaataaggagagccaagtcaggaataaaagtgactctgtatgctaacgccacattagaacttggttctctcaccaagctgtaatgtgatttttttttctactctgaattggaaatatgtatgaatatacagagaagtgcttacaactaatttttatttacttgtcacattttggcaataaatccctcttatttctaaattctaacttgtttatttcaaaactttatataatcactgttcaaaaggaaatattttcacctaccagagtgcttaaacactggcaccagccaaagaatgtggttgtagagacccagaagtcttcaagaacagccgacaaaaacattcgagttgaccccaccaagttgttgccacagataatttagatatttacctgcaagaaggaataaagcagatgcaaccaattcattcagtccacgagcatgatgtgagcactgctttgtgctagacattgggcttagcattgaaactataaagaggaatcagacgcagcaagtgcttctgtgttctggtagcaactcaacactatctgtggagagtaaactgaagatgtgcaggccaacattctggaaatcctatgtcaatgggtttggtttggaacctggacttctgcatttttaaaagttacccagagatgcttctaaagatgagccatagtctagaagattgtcaaccacaggagttcattgagtgggacagctagacacatacattggcagctacaatagtatcatgaattgcaatgatgtagtggggtataaaaggaaagcgatggatattgccggatgggcatggccagtgatgtttcacgtcattgaggtgacagctctgctggactttgaattacatatggaggctctccaggaagacgaagaagagaaggacattctaggcaaaaagaagactaggcacaaggcacacttatgtttgtctgttagcttttagttgaaaaagcaaaatacatgatgcaaagaaacctctccacgctgtgatttttaaaactacatactttttgcaactttatggttatgagtattgtagagaacaggagataggtcttagatgatttttatgttgttgtcagactctagcaaggtactagaaacctagcaggcattaataattgttgaggcaatgactctgaggctatatctgggccttgtcattatttatcatttatatttgtatttttttctgaaatttgagggccaagaaaacattgactttgactgaggaggtcacatctgtgccatctctgcaaatcaatcagcaccactgaaataactacttagcattctgctgagctttccctgctcagtagagacaaatatactcatcccccacctcagtgagcttgtttaggcaaccaggattagagctgctcaggttcccaacgtctcctgccacatcgggttctcaaaatggaaagaatggtttatgccaaatcacttttcctgtctgaaggaccactgaatggttttgtttttccatattttgcataggacgccctaaagactaggtgacttggcaaacacacaagtgttagtataattctttgcttctgcttctttttgaaaatcatgtttagatttgattttaagtcagaaattcactgaatgtcaggtaatcattatggagggagatttgtgtgtcaaccaaagtaattgtcccatggccccagggtatttctgttgtttccctgaaattctgcttttttagtcagctagattgaaaactctgaacagtagatgtttatatggcaaaatgcaagacaatctacaagggagattttaaggattttgagatgaaaaaacagatgctactcaggggctttatgaaccatccatcaattctgaagttctgactctcccattaccctttccctggtgtggtcagaactccaggtcactggaagttagtggaatcatgtagttgaattctttacttcaagacattgtattctctccagctatcaaaacattaatgatcttttatgtcttttttttgttattgttatactttaagttctggggtacatgtgcggaacatgtaggtttgttacataggtatacatgtgccatggtggtttgctgcactcatcaacctgtcatctacattcttttatgtctgtctttcaaagcaacactctgttcttctgagtagtgaaatcaggtcaactttaccaccagcctccatttttaatatgcttcaccatcatccagcacctacttaagatttatctagggctctgtggtgatgttaggacccataaaagaaatttatgccttccatatgtttggttacagatgggaaatgggaatgttgaaggacatgaaagaaaggatgtttacacattaagcatcagttctgaagctagattgtctgagtttgaatcttagctcttccctttattagctctgtgacctcgagctagttacttaaatgctctgatcctctatttcctgatcagtgaaacctccctattcaaatgtgtgagagtttaataaattaggacacttaaaaatgttggagcagtgcatagcatgtagtgttcagtacatgttaaatgttgttttttattatgtacaaacatgagtgggcacagaattttaaatcatctcaacttttgagaaattttgagttatcaacaccgttcccacaagacagtggcaaaattattggtgagaattaaacagctgtttctcagaggaagcaatggaggcttgctgggataaaggcatttactgagaggctgttacctagtgagagtgatgaattaattaaaatagtcgaatccctttctgactgtctctgaaagcttccgcttttatctttgaagagcagaattgtcactccaaggacatttattaataaaaagaacaactgtccagtgcaatgaaggcaaagtcataggtctcccaagtcttaccccattcctgtgaaatatcaagttcttggcttttctctgtcatgtagcctcaactttctctgaccgggtgcatttctttctctggtttctaaattgccagtggcaaatttggatcacttacttaatatctgttaaattttgtgacccaacaaagtcttttagcactgtggtgtcaaaaagaaaaacacctcccaggcatatacattttatagattcctggagaatgttgctctccagctccatccccacccaatgaaatatgatccagagagtcttgcaaagagacaagcctcattttccacaattagctctaaagtgcctccaggaaatgattttctcagctcatctctctgtattccctgttttggatcacagggcaatctgtttaaatgactaattacagaaatcattaaaggcaccaagcaaatgtcatctctgaatacacacatcccaagctttacaaatcctgcctggcttgacagtgatgaggccacttaacagtccagcgcaggcggatgttaaaaaaaataaaaaggtgaccatctgcggtttagttttttaactttctgatttcacacttaacgtctgtcattctgttactgggcacctgtttaaattctattttaaaatgttaatgtgtgttgtttaaaataaaatcaagaaagagaga

SEQ ID NO: 28989 - DNA, 2520 bp, Homo sapiens
  source 1..2520: mol_type = unassigned DNA
atggagtttcttgaaagaacgtatcttgtgaatgataaagctgccaagatgtatgctttcacactagaaagtgtggaactccaacagaaaccggtgaataaagatcagtgtcccagagagagaccagaggagctggagtcaggaggcatgtaccactgccacagtggctccaagcccacagaaaagggggcgaatgagtacgcctatgccaagtggaaactctgttctgcttcagcaatatgcttcattttcatgattgcagaggtcgtgggtgggcacattgctgggagtcttgctgttgtcacagatgctgcccacctcttaattgacctgaccagtttcctgctcagtctcttctccctgtggttgtcatcgaagcctccctctaagcggctgacatttggatggcaccgagcagagatccttggtgccctgctctccatcctgtgcatctgggtggtgactggcgtgctagtgtacctggcatgtgagcgcctgctgtatcctgattaccagatccaggcgactgtgatgatcatcgtttccagctgcgcagtggcggccaacattgtactaactgtggttttgcaccagagatgccttggccacaatcacaaggaagtacaagccaatgccagcgtcagagctgcttttgtgcatgcccttggagatctatttcagagtatcagtgtgctaattagtgcacttattatctactttaagccagagtataaaatagccgacccaatctgcacattcatcttttccatcctggtcttggccagcaccatcactatcttaaaggacttctccatcttactcatggaaggtgtgccaaagagcctgaattacagtggtgtgaaagagcttattttagcagtcgacggggtgctgtctgtgcacagcctgcacatctggtctctaacaatgaatcaagtaattctctcagctcatgttgctacagcagccagccgggacagccaagtggttcggagagaaattgctaaagcccttagcaaaagctttacgatgcactcactcaccattcagatggaatctccagttgaccaggaccccgactgccttttctgtgaagacccctgtgactagctcagtcacaccgtcagtttcccaaatttgacaggccaccttcaaacatgctgctatgcagtttctgcatcatagaaaataaggaaccaaaggaagaaattcatgtcatggtgcaatgcacattttatctatttatttagttccattcaccatgaaggaagaggcactgagatccatcaatcaattggattatatactgatcagtagctgtgttcaattgcaggaatgtgtatatagattattcctgagtggagccgaagtaacagctgtttgtaactatcggcaataccaaattcatctcccttccaataatgcatcttgagaacacataggtaaatttgaactcaggaaagtcttactagaaatcagtggaagggacaaatagtcacaaaattttaccaaaacattagaaacaaaaaataaggagagccaagtcaggaataaaagtgactctgtatgctaacgccacattagaacttggttctctcaccaagctgtaatgtgatttttttttctactctgaattggaaatatgtatgaatatacagagaagtgcttacaactaatttttatttacttgtcacattttggcaataaatccctcttatttctaaattctaacttgtttatttcaaaactttatataatcactgttcaaaaggaaatattttcacctaccagagtgcttaaacactggcaccagccaaagaatgtggttgtagagacccagaagtcttcaagaacagccgacaaaaacattcgagttgaccccaccaagttgttgccacagataatttagatatttacctgcaagaaggaataaagcagatgcaaccaattcattcagtccacgagcatgatgtgagcactgctttgtgctagacattgggcttagcattgaaactataaagaggaatcagacgcagcaagtgcttctgtgttctggtagcaactcaacactatctgtggagagtaaactgaagatgtgcaggccaacattctggaaatcctatgtcaatgggtttggtttggaacctggacttctgcatttttaaaagttacccagagatgcttctaaagatgagccatagtctagaagattgtcaaccacaggagttcattgagtgggacagctagacacatacattggcagctacaatagtatcatgaattgcaatgatgtagtggggtataaaaggaaagcgatggatattgccggatgggcatggccagtgatgtttcacgtcattgaggtgacagctctgctggactttgaattacatatggaggctctccaggaagacgaagaagagaaggacattctaggcaaaaagaagactaggcacaaggcacacttatgtttgtctgttagcttttagttgaaaaagcaaaatacatgatgcaaagaaa

SEQ ID NO: 28990 - DNA, 1915 bp, Homo sapiens
  source 1..1915: mol_type = unassigned DNA
ctcggcctcgcgttataaaaagcggtggggcagggccggcgagacaatctgggaggcgggtaccgggcctcacggatccgcgccgcgccccccacctgtggctgcgcgcggggtgggctgcgctcccctgggcggcgccgggcgcccggggctggtggcgagatgggccgctactctggcaagacgtgccggctgctcttcatgctggtgctcaccgtcgccttcttcgtggcggagctggtctccggctacctgggcaactccatcgcgctgctctccgactccttcaacatgctctccgacctgatctcgctgtgcgtgggcctgagcgccggctacatcgcccggcgccccacccggggcttcagcgccacctacggctacgcccgcgccgaggtggtgggcgcgctgagcaacgcggtcttcctcaccgcgctctgcttcaccatcttcgtggaggccgtgctgcgcctggcccggcccgagcgcatcgatgaccccgagctggtgctcatcgtcggcgtcctggggctgttggtcaacgtggtggggctgctcatcttccaggactgcgccgcctggttcgcgtgctgcctccggggacgcagtcgccgcctgcagcagcggcagcagctggcggagggctgtgtccccggcgctttcggggggcctcagggcgcggaggacccgcggcgcgcggcggacccgacagccccaggctcggactcggccgtaaccctccgggggacctcggtggaaaggaagcgggagaagggggcgaccgtgttcgcaaacgtagcaggtgattccttcaacacccagaatgagccagaagacatgatgaaaaaagagaaaaagtctgaagctctgaatatcagaggtgtacttttgcatgtgatgggagatgccctggggtccgtggttgtggtcatcacggccatcatattctatgtgcttcccctgaagagtgaggacccgtgtaactggcagtgttacattgaccccagcctgactgtcctcatggtcatcatcattttgtcatctgccttcccgcttatcaaggagaccgctgccattctgctacagatggtcccaaaaggagtcaacatggaagagctgatgagtaaactctctgctgtgcctggaattagcagtgtacatgaagtgcacatctgggaacttgtaagtggaaagattattgccaccctgcacatcaagtatcctaaggacaggggatatcaagatgccagcacaaaaattcgagaaatcttccaccatgcgggaatccacaatgtgaccatccagtttgaaaatgtggacttgaaggaacccctggagcagaaggacttactgttgctctgcaactcaccctgcatctccaagggctgtgctaagcagctgtgttgtccccccggggcactgcctctggctcacgtcaatggctgtgctgagcacaatggtgggccctctctagacacatacggaagtgatggcctcagtagaagagacgcaagagaagtggctattgaagtgtctttggatagctgtctgagtgaccacggacaaagtcttaacaaaactcaggaggaccaatgttatgtcaacagaacgcatttttaatctggtactcacataatcagaccatatagacgaggcactttggaaccacaagcttggctcacaaaaagagctttctgggttgtaggcccagactagacttgcagcatgcatgctctgtgttcactaggggttggctgtttgggattttagttaaacgtgtctgtgaatttttatgtaactaactcctttccattcccctgggtgtctcatgctgctctttgactgtttcagcttgaacatgcattttctaaagcaaactgcactagtgtatatatcagggacattaaagtctggg

SEQ ID NO: 28991 - DNA, 898 bp, Homo sapiens
  source 1..898: mol_type = unassigned DNA
cttcaatgttcttaactatgtcatcttcttggactgctgttactgcgcagcacccaagccccagggagacatggaagcaggtgattccttcaacacccagaatgagccagaagacatgatgaaaaaagagaaaaagtctgaagctctgaatatcagaggtgtacttttgcatgtgatgggagatgccctggggtccgtggttgtggtcatcacggccatcatattctatgtgcttcccctgaagagtgaggacccgtgtaactggcagtgttacattgaccccagcctgactgtcctcatggtcatcatcattttgtcatctgccttcccgcttatcaaggagaccgctgccattctgctacagatggtcccaaaaggagtcaacatggaagagctgatgagtaaactctctgctgtgcctggaattagcagtgtacatgaagtgcacatctgggaacttgtaagtggaaagattattgccaccctgcacatcaagtatcctaaggacaggggatatcaagatgccagcacaaaaattcgagaaatcttccaccatgcgggaatccacaatgtgaccatccagtttgaaaatgtggacttgaaggaacccctggagcagaaggacttactgttgctctgcaactcaccctgcatctccaagggctgtgctaagcagctgtgttgtccccccggggcactgcctctggctcacgtcaatggctgtgctgagcacaatggtgggccctctctagacacatacggaagtgatggcctcagtagaagagacgcaagagaagtggctattgaagtgtctttggatagctgtctgagtgaccacggacaaagtcttaacaaaactcaggaggaccaatgttatgtcaacagaacgcatttttaa

SEQ ID NO: 28992 - DNA, 883 bp, Homo sapiens
  source 1..883: mol_type = unassigned DNA
actgcccccgccactcctttagactctggacgtgcggggactggtggcgctcggcctcgcgttataaaaagcggtggggcagggccggcgagacaatctgggaggcgggtaccgggcctcacggatccgcgccgcgccccccacctgtggctgcgcgcggggtgggctgcgctcccctgggcggcgccgggcgcccggggctggtggcgagatgggccgctactctggcaagacgtgccggctgctcttcatgctggtgctcaccgtcgccttcttcgtggcggagctggtctccggctacctgggcaactccatcgcgctgctctccgactccttcaacatgctctccgacctgatctcgctgtgcgtgggcctgagcgccggctacatcgcccggcgccccacccggggcttcagcgccacctacggctacgcccgcgccgaggtggtgggcgcgctgagcaacgcggtcttcctcaccgcgctctgcttcaccatcttcgtggaggccgtgctgcgcctggcccggcccgagcgcatcgatgaccccgagctggtgctcatcgtcggcgtcctggggctgttggtcaacgtggtggggctgctcatcttccaggactgcgccgcctggttcgcgtgctgcctccggggacgcagtcgccgcctgcagcagcggcagcagctggcggagggctgtgtccccggcgctttcggggggcctcagggcgcggaggacccgcggcgcgcggcggacccgacagccccaggctcggactcggccgtaaccctccgggggacctcggtggaaaggaagcgggagaagggggcgaccgtgttcgcaaacgtagcagaacttatacacaacacaaggtttcttctttga

SEQ ID NO: 28993 - DNA, 1224 bp, Homo sapiens
  source 1..1224: mol_type = unassigned DNA
gccgttcgaagagtcgtgagggggtgacgggttaagattcggagagagaggtgctagtggctggacttgacctggaaagaatcttctgctgactctcaacttttcctggaaaaaatggatcattcccaccatatggggatgagctatatggactccaacagtaccatgcaaccttctcaccatcacccaaccacttcagcctcacactcccatggtggaggagacagcagcatgatgatgatgcctatgaccttctactttggctttaagaatgtggaactactgttttccggtttggtgatcaatacagctggagaaatggctggagcttttgtggcagtgtttttactagcaatgttctatgaaggactcaagatagcccgagagagcctgctgcgtaagtcacaagtcagcattcgctacaattccatgcctgtcccaggaccaaatggaaccatccttatggagacacacaaaactgttgggcaacagatgctgagctttcctcacctcctgcaaacatgctgggattacaggcatgagccaccacacctgtccctctccccctcgtattactcagacttaaactaccccaaaaaggctaaagtcctgctaagagtctccgtagaactgatgattcaagaggctcttatgatcacagctggtgattccctgtgttgaattagtgaaaacaggccaggcacagtaatcccagcactttgagaggactgcttaatgtcaggagctcaagcccagcttgggcaacacagatgcctgtctctacataaaacaataaaaatttttaaaaaaaatttttttttaatgcccagaacaatagggcatgattcaaaattatcctccgagctgcctctctggttctttctgggaaaaacacttaggcaagttgagaaaggaaggaaagttggaataatggcaaaactgttagaagcattcctctttcctccattgcctgtcctcccaacattatacccaaactagttacaaagccattctgtaaagagatcgggtacctacaatttcttcagatttacacaatatccactagaatttaatttctacaagggcagggatctttgttgagtggcacatggtagacactcaataaatacttattgaatagatgggttaagtgaaagtggcagggatcaactagagtgtcctgtgcttagggtcttttaataaagatggaaagaatgatgttaa

SEQ ID NO: 28994 - DNA, 4744 bp, Homo sapiens
  source 1..4744: mol_type = unassigned DNA
gcggtggtggacacgtcgagccgggtagaagtggaggggccgttcgaagagtcgtgagggggtgacgggttaagattcggagagagaggtgctagtggctggacttgacctggaaagaatcttctgctgactctcaacttttcctggaaaaaatggatcattcccaccatatggggatgagctatatggactccaacagtaccatgcaaccttctcaccatcacccaaccacttcagcctcacactcccatggtggaggagacagcagcatgatgatgatgcctatgaccttctactttggctttaagaatgtggaactactgttttccggtttggtgatcaatacagctggagaaatggctggagcttttgtggcagtgtttttactagcaatgttctatgaaggactcaagatagcccgagagagcctgctgcgtaagtcacaagtcagcattcgctacaattccatgcctgtcccaggaccaaatggaaccatccttatggagacacacaaaactgttgggcaacagatgctgagctttcctcacctcctgcaaacagtgctgcacatcatccaggtggtcataagctacttcctcatgctcatcttcatgacctacaacgggtacctctgcattgcagtagcagcaggggccggtacaggatacttcctcttcagctggaagaaggcagtggtagtggatatcacagagcattgccattgacatcaaactctatggcgtggccttatcgattgcagtgggaagttgttgaagacttgaagacgtgattcctgctccaatcatcccttcttgctcctctttgtgcacgtacacacacacacacacacacacacacacacacccctgctcaacagaggtttagtttacagtctctgaactaaagtagtaacctcccaaattgttttttctaataagctgagattcccatttctcttaaggagaagccacccatgagatgtcttttccttctccatcatcttagagccaagttatatgttcttgtctaatccatgtagctttttgttcaatgacttgatcatctgcttcctttttgaatttttaacagatagtaagtaaatttggtggttttttcccctgggtcagtgatggaaaggggttaacttcagccaggattgatggcagctgagggaaattcttgcccaactaaacccagaactcaaacttaacattagaaaataaggtccagggccggacacagtggcccatgcctgtaatcccagcactttggggggccaaggcaggctggatcacctgaggacaggagttcgagaccagtctggccaacatggggaaaccccgtctctactaaaaatacaaaaattagccgggcatggtggtgggcgcctgtaatcccagctactcagaaggctgaggcaggagaatcacttgaacctaggaggcggaggttgcagtgagccaagatggcgccattgcactccagcctgggtgacaagagtgaaactccatctcaaaaaaaaagaaaagaaggtccagcttttggattcaatgagtgggaaatacattgtgcctttctctagatgtgatacgttataccaaaatctttgtagtgtgcagagcggtggtttgagactaaatacaggcttagaacttgcagagtgtgtattcttggatggctgatgcatcgacttgcattcccacttaacactttgattagcatgaacttgccaatcaaaaaatgacaatcaatttgagaaaatagaaatagatatttttaaataaaaccattcacagtttactttgtcttgataccttggtttgtcccagctgaagtgaagcaagagagtttgaattaatttttccattataatgttttcgcatgtctgcctctaaaactgtgattttcaagctttagcgtgcatcagaatcacctgtagggcttgttaaaacactaattgctgggcctcaacccaaaagcccccaaagtggcacttctgagttcctgctgatgttacaagggaccacacttttgagaatctgtgctttaagctaaggaaatattgcctggtgggttggctgcctggtattgggcatggaaatttgaattgctgattggtagatggtgtgtctggacttaactcacgtagtaaatactgctgatcaatacctaatcattccacatttattgagctccacctgtgtgtatgtgtacccaagcacacatgtgtgaagggctatagccaaagtatttttactagcctgtatgaaatcactagtccttatttttaaaggtctatggtttcttggaagtagtttgattgttgagagagacctttgatctgcagtgtaaatctaccagtcatgggccagaagggcaaaagcccagctttctctttggaaagactcaggctgtggtttgttgatggccaggttttcctcaggctccaacaactgtgcttataccaagcagatcctcatcctccatataatcatctttgttattcgtgggggtttaattacattacaagtggccaaaacccctgttctcagtgaagaaccacattggatttgtattctgttcagttgtagtctacactgcagtcttattcctggttcaaactacctctttaaattgatttgtcttgtgctggtctgttaaatcctgccctccttggtgctagatccagttgtgcctcagggcagaggaaacaaaacacagctatcctgttggcctgtgttgtggttttgaagtttgtactttctctgtgggtgccagttaaatattggagagcaaggaatgtggacttgtatggctttgaaccaagagagggttatgagcctactggattgaggttaaaatccaagaaccaacatttagagctttgtgcttttctctcattccatcactttgtaatgatgatacttaacatgagcagggtgaatgacaggtactgacgaagtccaacacaaaggtataatacagcctgttgtctaaagccaaggagtcataaaaccatgagaaataaataggaatcaatagttagtagtgacattggtgctctctagaaatctcagcatgagctgctatagaataccctcccagcaacaaaacctaatcagtaaggccagctagacccaatggctcatgcctgtaatcccaacactttgggaggccaaggtgggaggatggcttgtgtccagaagttcgagaccagcctggacaacatagtgagatcctatctctataaaaaatcaaaaattagccaggcatggtggtgcatacctatagtcctggctatttgggaggctgaggcaggaggattgctttagccctggaggtcgaggctgcagtaagccatgattgcgccactgcactcagcccgggtgacaaagcaagaccctgtctcagaaaaaaagaaaattcaaggccagttaagacaaaatgctatgactttgaaattcacagaaagaaataacagtttagattaggtcttcaggtattcaggatagagataatctcctgaaaaacctgaatttcagagattcttagactggctgccaaaggatgaagctagtgaaggagaaaaagcttaaattccatcttgagctcttggattgtgataatacaatgatttcattaacttttcatttctgtatacctgttcatttggaatttaatgcttgacttctttgttcattttggatctaaacttctcttttcttccttccccattcacatctattagaagactgcatcaccatttctttggcccccttactctgttgtcctttcccttttctttcagtttttttaatcgcatgtctagtatattaagtctccatagccctcctgatgcagtagacagtgctatgctgtggatataataccaaccagaaattggcatttataaacctgttaagagactttaagcatgcttcaagaggcagttgacccactggaatttctataaggctggtacccttcccagagttacagaatcttaggtgccgtctctagtctgtgagggaggaactcccagcatccccattgcccacaaatggaatcctcactgtatccactaggagattagaaattaaggtttcttcactacttctatggtagggttgtctgaaattccctttcaggctgtgggtactggtcttgggttctagtcataaggggttccttataaggagcaggcggaggggagtacactttcatgtgatttaattttgatcctgccctctccagctgctccttcaaaagatacatcaaaagatagaaactctgggctgggcacagtggctcacacactttgggaggccaagcgggggtgcagatcacctgaggtcaggagtttgagaccagcctggccaatgtggtgaaaccccatctctactaaaaatacaaaaattagctgggcgtggtggtgcatgcctgtaatcccagctactcgggaggctgaggcaggagaatcgcttgaacccaggaggcggaggttgcagtgagccaagatggcgccattgcactccagcctgggcgacaagagcaaaactccgtctcaaaaaaaaaaaaaagatacaaagtctgcatttgatataatgccttaattactgggtctacaattaatgttgactgttttagattgtaagctcctggagagcagtattgctgtagtaggaatgttttaacagtgtcatatgaaaaagaacaaaataaatattttgattttgtgattcta

SEQ ID NO: 28995 - DNA, 1785 bp, Homo sapiens
  source 1..1785: mol_type = unassigned DNA
ctcgcccggaccacgtgatccgtgcggccagggtagctatcgcggcggcggcggcggcggcggttgaactgactcggagcgaggagacccgagcgagcagacgcggccctggcgcccgccctgcgcactcaccatggcgatgcatttcatcttctcagatacagcggtgcttctgtttgatttctggagtgtccacagtcctgctggcatggccctttcggtgttggtgctcctgcttctggctgtactgtatgaaggcatcaaggttggcaaagccaagctgctcaaccaggtactggtgaacctgccaacctccatcagccagcagaccatcgcagagacagacggggactctgcaggctcagattcattccctgttggcagaacccaccacaggtggtatttgtgtcactttggccagtctctaatccatgtcatccaggtggtcatcggctacttcatcatgctggccgtaatgtcctacaacacctggattttccttggtgtggtcttgggctctgctgtgggctactacctagcttacccacttctcagcacagcttagctggtgaggaacgtgcaggcactgaggctggagggacatggagccccctcttccagacactatacttccaactgccctttcttctgatggctattcctccaccttattcccagcccctggaaactttgagctgaagccagcacttgctccctggagttcggaagccattgcagcaaccttccttctcagccagcctacgtagggcccaggcatggtcttgtgtcttaagacagctgctgtgaccaaagggagaatggagataacaggggtggcagggttactgagcccatgacaatgcttctctgtgactcaaaccaggaatttccaaagatttcaagccagggagaagggttcttggtgatgcagggcatggaacctggacaccctcagctctcctgctttgtgccttatctacaggagcatcgcccattggacttcctgacctcttctgtctttgagggacagagaccaagctagatcctttttctcacctttctgcctttggaacacatgaagatcatctcgtctatggatcatgttgacaaactaagttttttttatttttcccattgaactcctagttggcaattttgcacattcatacaaaaaaatttttaatgaaatgatttcattgattcatgatggatggcagaaactgctgagacctatttccctttcttggggagagaataagtgacagctgattaaaggcagagacacaggactgctttcaggctcctggtttattctctgatagactgagctccttccaccagaaggcactgcctgcaggaagaagatgatctgatggccgtgggtgtctgggaagctcttcgtggcctcaatgccctcctttatcctcatctttcttctatgcagaacaaaaagctgcatctaataatgttcaatacttaatattctctatttattacttactgcttactcgtaatgatctagtggggaaacatgattcattcacttaaaatactgattaagccatgggcaggtactgactgaagatgcaatccaaccaaagccattacattttttgagttagatgggactctctggatagttgaacctcttcactttataaaaaaggaaagagagaaaatcactgctgtatactaaatacctcacagattagatgaaaagatggttgtaagctttgggaattaaaaacaaacaaatacattttagtaaatatatatttttaaata

SEQ ID NO: 28996 - DNA, 2404 bp, Homo sapiens
  source 1..2404: mol_type = unassigned DNA
atatgctttttctggagtcctgtagagaaagtgctctctgccgcattgatagcagcgagagctggaggtgttgggtcgggagaccagccgttcgatcccgccgcaggtaggagctggtttccatcctggcaccacggcacacacctccagcctcgagcccggcgctgctgcccgggggtctccttcaggctctttgacgccgttccagggggcacctatccaggcatcctctgggcctctagccagaggactggctcccggcttcagcactccgggctgcagtaagaagtgcccttatcgctctgagccctgccaccatcccgtgaaccaccgaaaccctggtccagcgcgacagccttggacctgggactggacggatccaaaacgctcagcctcggccccccacagacggggctctgcatcgtctctgatatgtcacccaccatctcccacaaggacagcagccggcaacggcggccagggaatttcagtcactctctggatatgaagagcggtcccctgccgccaggcggttgggatgacagtcatttggactcagcgggccgggaaggggacagagaagctcttctgggggataccggcactggcgacttcttaaaagccccacagagcttccgggccgaactaagcagcattttgctactactctttctttacgtgcttcagggtattcccctgggcttggcgggaagcatcccactcattttgcaaagcaaaaatgttagctatacagaccaagctttcttcagttttgtcttttggcccttcagtctcaaattactctgggccccgttggttgatgcggtctacgttaagaacttcggtcgtcgcaaatcttggcttgtcccgacacagtatatactaggactcttcatgatctatttatccactcaggtggaccgtttgcttgggaataccgatgacagaacacccgacgtgattgctctcactgtggcgttctttttgtttgaattcttggccgccactcaggacattgccgtcgatggttgggcgttaactatgttatccagggaaaatgtgggttatgcttctacttgcaattcggtgggccaaacagcgggttactttttgggcaatgttttgtttttggcccttgaatctgccgacttttgtaacaaatatttgcggtttcagcctcaacccagaggaatcgttactctttcagatttcctttttttctggggaactgtatttttaataacaacaacattggttgcccttctgaaaaaagaaaacgaagtatcagtagtaaaagaagaaacacaagggatcacagatacttacaagctgctttttgcaattataaaaatgccagcagttctgacattttgccttctgattctaactgcaaagattggtttttcagcagcagatgctgtaacaggactgaaattggtagaagagggagtacccaaagaacatttagccttattggcagttccaatggttcctttgcagataatactgcctctgattatcagcaaatacactgcaggtccccagccattaaacacattttacaaagccatgccctacagattattgcttgggttagaatatgccctactggtttggtggactcctaaagtagaacatcaagggggattccctatatattactatatcgtagtcctgctgagttatgctttacatcaggttacagtgtacagcatgtatgtttctataatggctttcaatgcaaaggttagtgatccacttattggaggaacatacatgacccttttaaataccgtgtccaatctgggaggaaactggccttctacagtagctctttggcttgtagatcccctcacagtaaaagagtgtgtaggagcatcaaaccagaattgtcgaacacctgatgctgttgagctttgcaaaaaactgggtggctcatgtgttacagccctggatggttattatgtggagtccattatttgtgttttcattggatttggttggtggttctttcttggtccaaaatttaaaaagttacaggatgaaggatcatcttcgtggaaatgcaaaaggaacaattaatatatatgctactggacattctagcaaggttgaattttagagtggggtttttataagtaatggaggataaaatgggtgggagaaaatggcacacagcacctgaagaaagatggggcagtgacctctagaactcatgcattgccattggaaagcctgtgttgggcatcgatgtcagatcctgaagaatcacctggaaaaaatcccatcctagaggcaaggaggctacaccaaaccatacactacagtactttgtcacatggttgtccattatcatgtattagagtctaaatgattacttgaataaagaaaaaaaaccacttaa

SEQ ID NO: 28997 - DNA, 3725 bp, Homo sapiens
  source 1..3725: mol_type = unassigned DNA
gcagcgagagctggaggtgttgggtcgggagaccagccgttcgatcccgccgcaggtaggagctggtttccatcctggcaccacggcacacacctccagcctcgagcccggcgctgctgcccgggggtctccttcaggctctttgacgccgttccagggggcacctatccaggcatcctctgggcctctagccagaggactggctcccggcttcagcactccgggctgcagtaagaagtgcccttatcgctctgagccctgccaccatcccgtgaaccaccgaaaccctggtccagcgcgacagccttggacctgggactggacggatccaaaacgctcagcctcggccccccacagacggggctctgcatcgtctctgatatgtcacccaccatctcccacaaggacagcagccggcaacggcggccagggaatttcagtcactctctggatatgaagagcggtcccctgccgccaggcggttgggatgacagtcatttggactcagcgggccgggaaggggacagagaagctcttctgggggataccggcactggcgacttcttaaaagccccacagagcttccgggccgaactaagcagcattttgctactactctttctttacgtgcttcagggtattcccctgggcttggcgggaagcatcccactcattttgcaaagcaaaaatgttagctatacagaccaagctttcttcagttttgtcttttggcccttcagtctcaaattactctgggccccgttggttgatgcggtctacgttaagaacttcggtcgtcgcaaatcttggcttgtcccgacacagtatatactaggactcttcatgatctatttatccactcaggtggaccgtttgcttgggaataccgatgacagaacacccgacgtgattgctctcactgtggcgttctttttgtttgaattcttggccgccactcaggacattgccgtcgatggttgggcgttaactatgttatccagggaaaatgtgggttatgcttctacttgcaattcggtgggccaaacagcgggttactttttgggcaatgttttgtttttggcccttgaatctgccgacttttgtaacaaatatttgcggtttcagcctcaacccagaggaatcgttactctttcagatttcctttttttctggggaactgtatttttaataacaacaacattggttgcccttctgaaaaaagaaaacgaagtatcagtagtaaaagaagaaacacaagggatcacagatacttacaagctgctttttgcaattataaaaatgccagcagttctgacattttgccttctgattctaactgcaaagattggtttttcagcagcagatgctgtaacaggactgaaattggtagaagagggagtacccaaagaacatttagccttattggcagttccaatggttcctttgcagataatactgcctctgattatcagcaaatacactgcaggtccccagccattaaacacattttacaaagccatgccctacagattattgcttgggttagaatatgccctactggtttggtggactcctaaagtagaacatcaagggggattccctatatattactatatcgtagtcctgctgagttatgctttacatcaggttacagtgtacagcatgtatgtttctataatggctttcaatgcaaaggttagtgatccacttattggaggaacatacatgacccttttaaataccgtgtccaatctgggaggaaactggccttctacagtagctctttggcttgtagatcccctcacagtaaaagagtgtgtaggagcatcaaaccagaattgtcgaacacctgatgctgttgagctttgcaaaaaactgggtggctcatgtgttacagccctggatggttattatgtggagtccattatttgtgttttcattggatttggttggtggttctttcttggtccaaaatttaaaaagttacaggatgaaggatcatcttcgtggaaatgcaaaaggaacaattaatatatatgctactggacattctagcaaggtaattgtagtttagttttaattcggagagcaatgataatcagtgcacaggagtataaaatattattttaaacagcgaaattaataatataaaatgccaaatggttgaaaaaatagaaacctttctgtatatttgatcatattttttttttgccttgtcaatgtatttaaagtttacttaaggtcaggaaattctaaaacaacttttctggccttgttatttgatgtatatcttttaaatttactgaccaaagcatgttttaagctgcaatgcagtagtcacgggtggtaaccatgtagtcaggtattgttattagtacctatcactgctgagctgtatttaaaattttggtacaatatataaaatggagaagagcttgatattcaggtactaaccacaactagtctgacattgttggcagttaaaatcttattttgaattgtaaattagttaaattttatgtggaatttgctgagaaaagaatatagactactgaaatgtcattttagttatttttcttatgaccacattgtacaaatgaatctgtgttaaaaagactattttaaatgtatttcctgcttttgtaagcattaaagatttataagaaaattattcaaactattttttataaaatgaaagttatgatttttaaacttattgattcctcttgcccctaccccctctttttggaagatattttgattccttataaacttttaccctaagcttatatatgttttctgtcacaagtgcttcctggcacacagacagccaatggaggggatcaaattcagtgttgtatgtatgtttatggcaacattttgaaaataaaaattaaatgtttttcttcaagtagtttttttttaattgctgagagaaaaaaacagtaaagctttctgattaagtaaaatttaaatgggcagtaccataatttaaaaaactaatactttaaagagagagacaaagatattttgtgcctttgacaaattaaatctaatagtggaaaaatgtttcttaattaagcactttactagtgaaaaagatctcacaatttatgccaaatcaggtactgtattttcatgtattaacacataaccttttgtttgaatactatagttttcagtggacagttgctattccaagaaaattaagcttttgagtactttagcaattcccagcgtattacatacacccagtgataaggttctttgcatgttttgtgttatgtattactctgactctttagagattatataaatcctccaaaagttagacgaaacaagatagtacattatgagtcttaattttatcattgtggaaaaatgtgtactaactcctgattttgttaattttataacataggttgaattttagagtggggtttttataagtaatggaggataaaatgggtgggagaaaatggcacacagcacctgaagaaagatggggcagtgacctctagaactcatgcattgccattggaaagcctgtgttgggcatcgatgtcagatcctgaagaatcacctggaaaaaatcccatcctagaggcaaggaggctacaccaaaccatacactacagtactttgtcacatggttgtccattatcatgtattagagtctaaatgattacttgaataaagaaaaaaaaccacttaactcttacata

SEQ ID NO: 28998 - DNA, 2573 bp, Homo sapiens
  source 1..2573: mol_type = unassigned DNA
cttcattgagctgctgagcagaagctgaaacacagaattctaagcgttgctgagacccactgacctgcagacctcatagtgggtgcccaggatgttgtcctacggagagaggctggggtcccctgctgtctccccactcccagtccgtggggggcatgtgatgcgagggacggcctttgcctacgtgcccagccctcaggtcctacacaggatcccggggacctctgcctatgccttccccagcctgggccctgtggcccttgctgagcacacctgcccctgtggggaggtcctggagcgccatgaaccactgcctgccaagctggccctggaggaggagcagaagccagagtccaggctggtccccaagctgcgccaggctggcgccatgctgctcaaggtgccactgatgctcaccttcctctacctcttcgtctgctccctggacatgctcagctcggccttccagctggctggagggaaggtggctggtgacatcttcaaggataacgccatcctgtccaacccggtggccgggctggtggtggggatcctggtgaccgtgctggtgcagagctccagcacctccacatccatcatcgtcagcatggtctcctctggcttgctggaggtgagctctgccatccccatcatcatgggctccaacatcggcacctctgtcaccaacaccatcgtggccctgatgcaggcgggggacaggactgacttccggcgggccttcgcgggggccacggtgcatgactgctttaactggctgtcagtgctggtcctgctgcccctggaggctgccactggctacctgcaccacatcactcgacttgtggtggcctccttcaacatccatggtggccgtgatgctcctgacctgctcaagatcatcacagagcccttcacgaagctcatcatccagctggacgagtctgtgataaccagcattgccactggtgatgagtccctgaggaaccacagtctcatccagatctggtgccacccagactccttacaggctcccacctccatgtccagagcagaggccaactccagccagacccttggaaatgccaccatggagaaatgcaaccacatctttgtggacactggcctaccggacctggctgtggggctcatcctgctggcaggatccctggtgctgctgtgcacctgcctcatcctcctagtcaagatgctcaactccctgctcaagggccaagtggccaaggtcatccagaaggtcatcaatacggacttccctgcccccttcacctgggtcacaggctactttgccatggtggtgggcgccagcatgaccttcgtggtccagagcagttctgtgttcacctcggccatcaccccactcatcggtcttggtgtgatcagcattgagagggcctacccgctcacactgggttccaacatcggcaccaccaccacggccatcctggctgccctggccagccccagggagaagctgtccagcgctttccagattgccctctgtcacttcttcttcaacatctcgggtatccttctgtggtacccggtgccctgcacacgcctgcccatccgcatggccaaggcgctggggaaacgcacggccaagtaccgctggtttgccgtcctctatctccttgtctgcttcctgctgctgccctcactggtgtttggcatctccatggcaggctggcaggtcatggtaggtgtgggcacgcccttcggggccctgctggccttcgtggtgctcatcaatgtcctgcagagtcggagtcccgggcacctgcccaagtggttacagacatgggacttcctgcctcgctggatgcactccctgaagcccctggaccacctcatcacccgcgccaccctatgctgtgccaggcctgagccccgctcacccccgctgccccccagggtcttcctggaggagctaccccctgccacaccctccccccgtcttgcactgcctgctcaccacaatgccacccgcctctaggctgtgggcccagactacagcctggaatggggaaggcctggggtggaaaggcaggggagggagggtgtgtgtaggtatgtgcatgtgcctgtgccaccctgggtgccagtctctccttctgtagctccgcaaagctctgggcttgtgtgagagtgtcggtgtgtgtgcatgtgtgggggtgagtctgcatgtgcacctgtcatgtgtagaagcttgtatttgtgtacaggtgtgccagcccatgcaggtgtacacagacacacctgtgggaggctgtgtgcaggctgcaggatatctgggtatgatttcaggtcctctgcacgtgtacacatgactaggataggcaggagtaagggtgggtctgggtatatgactgtgcagctgtttgtgcatagatgttggtgcctgcgttactgaatttgcacacctccttgccaccttccttcctccaagataccatctcctcatcctaacccaggtcttcggcaccaccacaattaattcccttcccaacacttgcctgatggaaaaaaaacaaaggaattaaaactctcctcaggca

SEQ ID NO: 28999 - DNA, 532 bp, Homo sapiens
  source 1..532: mol_type = unassigned DNA
atctggaaaatagaacttggaagagacgatgtttcagggccttgcctgctctgtgctggggccaggcagctctgttgaagtccaggctctccaagagaggacaaagtcaaggaggccaggaaagccattgctttgttacccaaagggaacccaccgcgttgctgagacccactgacctgcagacctcatagtgggtgcccaggatgttgtcctacggagagaggctggggtcccctgctgtctccccactcccagtccgtggggggcatgtgatgcgagggacggcctttgcctacgtgcccagccctcaggtcctacacaggatcccggggacctctgcctatgccttccccagcctgggccctgtggcccttgctgagcacacctgcccctgtggggaggtcctggagcgccatgaaccactgcctgccaagctggccctggaggaggagcagaagccagagtccaggctggtccccaagctgcgccaggctggcgccatgctgctcaaggtgccactgatgctcacctt

SEQ ID NO: 29000 - DNA, 1912 bp, Homo sapiens
  source 1..1912: mol_type = unassigned DNA
gtcctggaggcttcattgagctgctgagcagaagctgaaacacagaattctaagcgttgctgagacccactgacctgcagacctcatagtgggtgcccaggatgttgtcctacggagagaggctggggtcccctgctgtctccccactcccagtccgtggggggcatgtgatgcgagggacggcctttgcctacgtgcccagccctcaggtcctacacaggatcccggggacctctgcctatgccttccccagcctgggccctgtggcccttgctgagcacacctgcccctgtggggaggtcctggagcgccatgaaccactgcctgccaagctggccctggaggaggagcagaagccagagtccaggctggtccccaagctgcgccaggctggcgccatgctgctcaaggtgccactgatgctcaccttcctctacctcttcgtctgctccctggacatgctcagctcggccttccagctggctggagggaaggtggctggtgacatcttcaaggataacgccatcctgtccaacccggtggccgggctggtggtggggatcctggtgaccgtgctggtgcagagctccagcacctccacatccatcatcgtcagcatggtctcctctggcttgctggaggtgagctctgccatccccatcatcatgggctccaacatcggcacctctgtcaccaacaccatcgtggccctgatgcaggcgggggacaggactgacttccggcgggccttcgcgggggccacggtgcatgactgctttaactggctgtcagtgctggtcctgctgcccctggaggctgccactggctacctgcaccacatcactcgacttgtggtggcctccttcaacatccatggtggccgtgatgctcctgacctgctcaagatcatcacagagcccttcacgaagctcatcatccagctggacgagtctgtgataaccagcattgccactggtgatgagtccctgaggaaccacagtctcatccagatctggtgccacccagactccttacagcaaaatctggaagggagagaaatcacacactttgatcttcgcaaaaagcaagccatggaagacagctctgttcctcactgcccctgagctccctgccggccacctactgcagcttccggcagatctcaaccagcagcctccacgtcctcacttgaagtcatcctcacccaggttcactctggggaggccgcccttgggcctttctctacggctgcagctgacacttgtccagctggtttctcttcctcactctaccaggaaatgctttccttaaacgctttctgcagggcagggtctcatttcctcggcttggagagtagctggtgggtgggacccaagctctcactttcatcccctttctgggacagcgccccgaaggagtgtgactcacacagcagtggatgtgcttggtcttgcaaagtgtgaagtgcgtcctggctcttcctgcccaaagacgggccacagagtctccccgtgctcccttccaacctgttcccattgacgccaactttcaccatgctggacctgaaccagcccgaaacagtctccagggaagctatgcaccagggagaggaggcaagtccaaggcctaccagatggggaaagcagcagcagcggcagttgagtgatcagacacttgagtctcccgggaccctgacaccgtcctgggaatcaccttcttatgtggccacactgtggactgtcaactatacctgcctggattaaacaagcatcttttgaggacttgcaacctgggaggcagggattatcacgtccccattttacagacgaggagcactgagccccagagaagtgcagtggcttgcccaagtccatgtaattgaggtaggatacaaatcctggtagaatcctga

SEQ ID NO: 29001 - DNA, 4122 bp, Homo sapiens
  source 1..4122: mol_type = unassigned DNA
tccacctggccgccgcctccagcccagcacctgcggagggagcgctgaccatggctccctggcctgaattgggagatgcccagcccaaccccgataagtacctcgaaggggccgcaggtcagcagcccactgcccctgataaaagcaaagagaccaacaaaacagataacactgaggcacctgtaaccaagattgaacttctgccgtcctactccacggctacactgatagatgagcccactgaggtggatgacccctggaacctacccactcttcaggactcggggatcaagtggtcagagagagacaccaaagggaagattctctgtttcttccaagggattgggagattgattttacttctcggatttctctactttttcgtgtgctccctggatattcttagtagcgccttccagctggttggaggaaaaatggcaggacagttcttcagcaacagctctattatgtccaaccctttgttggggctggtgatcggggtgctggtgaccgtcttggtgcagagctccagcacctcaacgtccatcgttgtcagcatggtgtcctcttcattgctcactgttcgggctgccatccccattatcatgggggccaacattggaacgtcaatcaccaacactattgttgcgctcatgcaggtgggagatcggagtgagttcagaagagcttttgcaggagccactgtccatgacttcttcaactggctgtccgtgttggtgctcttgcccgtggaggtggccacccattacctcgagatcataacccagcttatagtggagagcttccacttcaagaatggagaagatgccccagatcttctgaaagtcatcactaagcccttcacaaagctcattgtccagctggataaaaaagttatcagccaaattgcaatgaacgatgaaaaagcgaaaaacaagagtcttgtcaagatttggtgcaaaacttttaccaacaagacccagattaacgtcactgttccctcgactgctaactgcacctccccttccctctgttggacggatggcatccaaaactggaccatgaagaatgtgacctacaaggagaacatcgccaaatgccagcatatctttgtgaatttccacctcccggatcttgctgtgggcaccatcttgctcatactctccctgctggtcctctgtggttgcctgatcatgattgtcaagatcctgggctctgtgctcaaggggcaggtcgccactgtcatcaagaagaccatcaacactgatttcccctttccctttgcatggttgactggctacctggccatcctcgtcggggcaggcatgaccttcatcgtacagagcagctctgtgttcacgtcggccttgacccccctgattggaatcggcgtgataaccattgagagggcttatccactcacgctgggctccaacatcggcaccaccaccaccgccatcctggccgccttagccagccctggcaatgcattgaggagttcactccagatcgccctgtgccactttttcttcaacatctccggcatcttgctgtggtacccgatcccgttcactcgcctgcccatccgcatggccaaggggctgggcaacatctctgccaagtatcgctggttcgccgtcttctacctgatcatcttcttcttcctgatcccgctgacggtgtttggcctctcgctggccggctggcgggtgctggttggtgtcggggttcccgtcgtcttcatcatcatcctggtactgtgcctccgactcctgcagtctcgctgcccacgcgtcctgccgaagaaactccagaactggaacttcctgccgctgtggatgcgctcgctgaagccctgggatgccgtcgtctccaagttcaccggctgcttccagatgcgctgctgctgctgctgccgcgtgtgctgccgcgcgtgctgcttgctgtgtgactgccccaagtgctgccgctgcagcaagtgctgcgaggacttggaggaggcgcaggaggggcaggatgtccctgtcaaggctcctgagacctttgataacataaccattagcagagaggctcagggtgaggtccctgcctcggactcaaagaccgaatgcacggccttgtaggggacgccccagattgtcagggatggggggatggtccttgagttttgcatgctctcctccctcccacttctgcaccctttcaccacctcgaggagatttgctccccattagcgaatgaaattgatgcagtcctacctaactcgattccctttggcttggtggtaggcctgcagggcacttttattccaacccctggtcactcagtaatcttttactccaggaaggcacaggatggtacctaaagagaattagagaatgaacctggcgggacggatgtctaatcctgcgcctagctgggttggtcagtagaacctattttcagactcaaaaaccatcttcagaaagaaaaggcccagggaaggaatgtatgagaggctctcccagatgaggaagtgtactctctatgactatcaagctcaggcctctccctttttttaaaccaaagtctggcaaccaagagcagcagctccatggcctccttgccccagatcagcctgggtcaggggacatagtgtcattgtttggaaactgcagaccacaaggtgtgggtctatcccacttcctagtgctccccacattccccatcagggcttcctcacgtggacaggtgtgctagtccaggcagttcacttgcagtttccttgtcctcatgcttcggggatgggagccacgcctgaactagagttcaggctggatacatgtgctcacctgctgctcttgtcttcctaagagacagagagtggggcagatggaggagaagaaagtgaggaatgagtagcatagcattctgccaaaagggccccagattcttaatttagcaaactaagaagcccaattcaaaagcattgtggctaaagtctaacgctcctctcttggtcagataacaaaagccctccctgttggatcttttgaaataaaacgtgcaagttatccaggctcgtagcctgcatgctgccaccttgaatcccagggagtatctgcacctggaatagctctccacccctctctgcctccttactttctgtgcaagatgacttcctgggttaacttccttctttccatccacccacccactggaatctctttccaaacatttttccattttcccacagatgggctttgattagctgtcctctctccatgcctgcaaagctccagatttttggggaaagctgtacccaactggactgcccagtgaactgggatcattaagtacagtcgagcacacgtgtgtgcatgggtcaaaggggtgtgttccttctcatcctagatgccttctctgtgccttccacagcctcctgcctgattacaccactgcccccgccccaccctcagccatcccaattcttcctggccagtgcgctccagccttatctaggaaaggaggagtgggtgtagccgtgcagcaagattggggcctcccccatcccagcttctccaccatcccagcaagtcaggatatcagacagtcctcccctgaccctcccccttgtagatatcaattcccaaacagagccaaatactctatatctatagtcacagccctgtacagcatttttcataagttatatagtaaatggtctgcatgatttgtgcttctagtgctctcatttggaaatgaggcaggcttcttctatgaaatgtaaagaaagaaaccactttgtatattttgtaataccacctctgtggccatgcctgccccgcccactctgtatatatgtaagttaaacccgggcaggggctgtggccgtctttgtactctggtgatttttaaaaattgaatctttgtacttgcattgattgtataataattttgagaccaggtctcgctgtgttgctcaggctggtctcaaactcctgagatcaagcaatccgcccacctcagcctcccaaagtgctgagatcacaggcgtgagccaccaccaggcctgattgtaatttttttttttttttttttactggttatgggaagggagaaataaaatcatcaaacccaaaa

SEQ ID NO: 29002 - DNA, 2174 bp, Homo sapiens
  source 1..2174: mol_type = unassigned DNA
agtttgtttctattagggcccgtggccatcagcgaagggtccgtccttcagccgtcttggggagcaaagcccgcaatttatgttttccaagccacaaatggaccatggctccctggcctgaattgggagatgcccagcccaaccccgataagtacctcgaaggggccgcaggtcagcagcccactgcccctgataaaagcaaagagaccaacaaaaataacactgaggcacctgtaaccaagattgaacttctgccgtcctactccacggctacactgatagatgagcccactgaggtggatgacccctggaacctacccactcttcaggactcggggatcaagtggtcagagagagacaccaaagggaagattctctgtttcttccaagggattgggagattgattttacttctcggatttctctactttttcgtgtgctccctggatattcttagtagcgccttccagctggttggaggaaaaatggcaggacagttcttcagcaacagctctattatgtccaaccctttgttggggctggtgatcggggtgctggtgaccgtcttggtgcagagctccagcacctcaacgtccatcgttgtcagcatggtgtcctcttcattgctcactgttcgggctgccatccccattatcatgggggccaacattggaacgtcaatcaccaacactattgttgcgctcatgcaggtgggagatcggagtgagttcagaagagcttttgcaggagccactgtccatgacttcttcaactggctgtccgtgttggtgctcttgcccgtggaggtggccacccattacctcgagatcataacccagcttatagtggagagcttccacttcaagaatggagaagatgccccagatcttctgaaagtcatcactaagcccttcacaaagctcattgtccagctggataaaaaagttatcagccaaattgcaatgaacgatgaaaaagcgaaaaacaagagtcttgtcaagatttggtgcaaaacttttaccaacaagacccagattaacgtcactgttccctcgactgctaactgcacctccccttccctctgttggacggatggcatccaaaactggaccatgaagaatgtgacctacaaggagaacatcgccaaatgccagcatatctttgtgaatttccacctcccggatcttgctgtgggcaccatcttgctcatactctccctgctggtcctctgtggttgcctgatcatgattgtcaagatcctgggctctgtgctcaaggggcaggtcgccactgtcatcaagaagaccatcaacactgatttcccctttccctttgcatggttgactggctacctggccatcctcgtcggggcaggcatgaccttcatcgtacagagcagctctgtgttcacgtcggccttgacccccctgattggaatcggcgtgataaccattgagagggcttatccactcacgctgggctccaacatcggcaccaccaccaccgccatcctggccgccttagccagccctggcaatgcattgaggagttcactccagatcgccctgtgccactttttcttcaacatctccggcatcttgctgtggtacccgatcccgttcactcgcctgcccatccgcatggccaaggggctgggcaacatctctgccaagtatcgctggttcgccgtcttctacctgatcatcttcttcttcctgatcccgctgacggtgtttggcctctcgctggccggctggcgggtgctggttggtgtcggggttcccgtcgtcttcatcatcatcctggtactgtgcctccgactcctgcagtctcgctgcccacgcgtcctgccgaagaaactccagaactggaacttcctgccgctgtggatgcgctcgctgaagccctgggatgccgtcgtctccaagttcaccggctgcttccagatgcgctgctgctgctgctgccgcgtgtgctgccgcgcgtgctgcttgctgtgtgactgccccaagtgctgccgctgcagcaagtgctgcgaggacttggaggaggcgcaggaggggcaggatgtccctgtcaaggctcctgagacctttgataacataaccattagcagagaggctcagggtgaggtccctgcctcggactcaaagaccgaatgcacggccttgtag

SEQ ID NO: 29003 - DNA, 2162 bp, Homo sapiens
  source 1..2162: mol_type = unassigned DNA
atatatacccggggcgctgcgctccacctggccgccgcctccagcccagcacctgcggagggagcgctgaccatggctccctggcctgaattgggagatgcccagcccaaccccgataagtacctcgaaggggccgcaggtcagcagcccactgcccctgataaaagcaaagagaccaacaaaaataacactgaggcacctgtaaccaagattgaacttctgccgtcctactccacggctacactgatagatgagcccactgaggtggatgacccctggaacctacccactcttcaggactcggggatcaagtggtcagagagagacaccaaagggaagattctctgtttcttccaagggattgggagattgattttacttctcggatttctctactttttcgtgtgctccctggatattcttagtagcgccttccagctggttggaggaaaaatggcaggacagttcttcagcaacagctctattatgtccaaccctttgttggggctggtgatcggggtgctggtgaccgtcttggtgcagagctccagcacctcaacgtccatcgttgtcagcatggtgtcctcttcattgctcactgttcgggctgccatccccattatcatgggggccaacattggaacgtcaatcaccaacactattgttgcgctcatgcaggtgggagatcggagtgagttcagaagagcttttgcaggagccactgtccatgacttcttcaactggctgtccgtgttggtgctcttgcccgtggaggtggccacccattacctcgagatcataacccagcttatagtggagagcttccacttcaagaatggagaagatgccccagatcttctgaaagtcatcactaagcccttcacaaagctcattgtccagctggataaaaaagttatcagccaaattgcaatgaacgatgaaaaagcgaaaaacaagagtcttgtcaagatttggtgcaaaacttttaccaacaagacccagattaacgtcactgttccctcgactgctaactgcacctccccttccctctgttggacggatggcatccaaaactggaccatgaagaatgtgacctacaaggagaacatcgccaaatgccagcatatctttgtgaatttccacctcccggatcttgctgtgggcaccatcttgctcatactctccctgctggtcctctgtggttgcctgatcatgattgtcaagatcctgggctctgtgctcaaggggcaggtcgccactgtcatcaagaagaccatcaacactgatttcccctttccctttgcatggttgactggctacctggccatcctcgtcggggcaggcatgaccttcatcgtacagagcagctctgtgttcacgtcggccttgacccccctgattggaatcggcgtgataaccattgagagggcttatccactcacgctgggctccaacatcggcaccaccaccaccgccatcctggccgccttagccagccctggcaatgcattgaggagttcactccagatcgccctgtgccactttttcttcaacatctccggcatcttgctgtggtacccgatcccgttcactcgcctgcccatccgcatggccaaggggctgggcaacatctctgccaagtatcgctggttcgccgtcttctacctgatcatcttcttcttcctgatcccgctgacggtgtttggcctctcgctggccggctggcgggtgctggttggtgtcggggttcccgtcgtcttcatcatcatcctggtactgtgcctccgactcctgcagtctcgctgcccacgcgtcctgccgaagaaactccagaactggaacttcctgccgctgtggatgcgctcgctgaagccctgggatgccgtcgtctccaagttcaccggctgcttccagatgcgctgctgctgctgctgccgcgtgtgctgccgcgcgtgctgcttgctgtgtgactgccccaagtgctgccgctgcagcaagtgctgcgaggacttggaggaggcgcaggaggggcaggatgtccctgtcaaggctcctgagacctttgataacataaccattagcagagaggctcagggtgaggtccctgcctcggactcaaagaccgaatgcacggccttgtaggggacgccccagattgtcag

SEQ ID NO: 29004 - DNA, 582 bp, Homo sapiens
  source 1..582: mol_type = unassigned DNA
gtttctattagggcccgtggccatcagcgaagggtccgtccttcagccgtcttggggagcaaagcccgcaatttatgttttccaagccacaaatggaccatggctccctggcctgaattgggagatgcccagcccaaccccgataagtacctcgaaggggccgcaggtcagcagcccactgcccctgataaaagcaaagagaccaacaaaacagataacactgaggcacctgtaaccaagattgaacttctgccgtcctactccacggctacactgatagatgagcccactgaggtggatgacccctggaacctacccactcttcaggactcggggatcaagtggtcagagagagacaccaaagggaagattctctgtttcttccaagggattgggagattgattttacttctcggatttctctactttttcgtgtgctccctggatattcttagtagcgccttccagctggttggaggaaaaatggcaggacagttcttcagcaacagctctattatgtccaaccctttgttggggctggtgatcggggtgctggtgaccgtcttggtgcagagctccagc

SEQ ID NO: 29005 - DNA, 549 bp, Homo sapiens
  source 1..549: mol_type = unassigned DNA
attgcggacctagagcccagactcccagggcagaaagcgccccacagactgataaagaccatggctccctggcctgaattgggagatgcccagcccaaccccgataagtacctcgaaggggccgcaggtcagcagcccactgcccctgataaaagcaaagagaccaacaaaaataacactgaggcacctgtaaccaagattgaacttctgccgtcctactccacggctacactgatagatgagcccactgaggtggatgacccctggaacctacccactcttcaggactcggggatcaagtggtcagagagagacaccaaagggaagattctctgtttcttccaagggattgggagattgattttacttctcggatttctctactttttcgtgtgctccctggatattcttagtagcgccttccagctggttggaggaaaaatggcaggacagttcttcagcaacagctctattatgtccaaccctttgttggggctggtgatcggggtgctggtgaccgtcttggtgcagagctccagcacctcaacg

SEQ ID NO: 29006 - DNA, 2124 bp, Homo sapiens
  source 1..2124: mol_type = unassigned DNA
acacaggtaggagctcctaggaccaggctgaggcccagggacagtgaggccgaggctgggtggcctccaggccaagggcttgggccccatcctgagtctccaggacccaagggcaagagacgccaggcttgggcagcaggagggaggatctagacctgggcctgggtctgtccctgcccgaaatccatgccgagttcccttcccggcagccaggtcccccaccccactctggacgcggttgacctagtggaaaagactctgaggaatgaagggacctccagttctgctccagtcttggaggaaggggacacagacccctggaccctccctcagctgaaggacacaagccagccctggaaagagctccgcgtggccggcaggctgcgccgcgtggccggcagcgtcctcaaggcctgcgggctcctcggcagcctgtacttcttcatctgctctctggacgtcctcagctccgccttccagctgctgggcagcaaagtggccggagacatcttcaaggacaacgtggtgctgtccaaccctgtggctggactggtcattggcgtgctggtcacagccctggtgcagagttccagcacgtcctcctccatcgtggtcagcatggtggctgctaagctgctgactgtccgggtgtctgtgcccatcatcatgggtgtcaacgtaggcacatccatcaccagcaccctggtctcaatggcgcagtcaggggaccgggatgaatttcagagggctttcagcggctcggcggtgcacgggatcttcaactggctcacagtgctggtcctgctgccactggagagcgccacggccctgctggagaggctaagtgagctagccctgggtgccgccagcctgacacccagggcgcaggcgcccgacatcctcaaggtgctgacgaagccgctcacacacctcatcgtgcagttggactccgacatgatcatgagcagtgccacaggcaacgccactaacagcagtctcattaagcactggtgcggcaccacggggcagccgacccaggagaacagcagctgtggcgccttcggcccgtgcacagagaagaacagcacagccccggcggacaggctgccctgccgccacctgtttgcgggcacggagctcacggacctggccgtgggctgcatcctgctggccggctccctgctggtgctctgcggctgcctggtcctcatagtcaagctgctcaactctgtgctgcgcggccgcgtggcccaggtcgtgaggacagtcatcaatgcggacttccccttcccgctgggctggctcggcggctacctggccgtcctcgcgggcgccggcctgaccttcgcactgcagagcagcagcgtcttcacggcggccgtcgtgcccctcatgggggtcggggtgatcagtctggaccgggcgtaccccctcttactgggctccaacatcggcaccactaccacagccctgctggctgccctggccagccccgcagacaggatgctcagcgccctgcaggtcgccctcatccacttcttcttcaacctggccggcatcctgctgtggtacctggtgcctgcactgcggctgcccatcccgctggccaggcacttcggggtggtgaccgcccgttaccgctgggtggctggggtctacctgctgctcggattcctgctgctgcccctggcggccttcgggctctccctggcagggggcatggagctggccgctgtcgggggtcccctggtggggctggtgctcctcgtcatcctggttactgtcctgcagcggcgccggccggcctggctgcctgtccgcctgcgctcctgggcctggctccccgtctggctccattctctggagccctgggaccgcctggtgacccgctgctgcccctgcaacgtctgcagccccccgaaggccaccaccaaagaggcctactgctacgagaaccctgagatcttggcctcccagcagttgtgacgggcagttgctgagcagaccgccccaccctccccggctgggagggctctggagggccctggagggggggtccccgcggcagctgacctccggtcacctgcttccccttctgtgcaaataaaccaggctgttatctgg

SEQ ID NO: 29007 - DNA, 2162 bp, Homo sapiens
  source 1..2162: mol_type = unassigned DNA
atggagacaaggcctaggggccttggggccaggagggtacccccgtgagggcctgggctcctgggtaaacattaatgggctcagtacccagcaggtcatgtgcgcgatcaggggatctttgacctgcaactgctcccgccccgtgtctcctccctgcaggtgccccctcaccacccacacagcagatctagacctgggcctgggtctgtccctgcccgaaatccatgccgagttcccttcccggcagccaggtcccccaccccactctggacgcggttgacctagtggaaaagactctgaggaatgaagggacctccagttctgctccagtcttggaggaaggggacacagacccctggaccctccctcagctgaaggacacaagccagccctggaaagagctccgcgtggccggcaggctgcgccgcgtggccggcagcgtcctcaaggcctgcgggctcctcggcagcctgtacttcttcatctgctctctggacgtcctcagctccgccttccagctgctgggcagcaaagtggccggagacatcttcaaggacaacgtggtgctgtccaaccctgtggctggactggtcattggcgtgctggtcacagccctggtgcagagttccagcacgtcctcctccatcgtggtcagcatggtggctgctaagctgctgactgtccgggtgtctgtgcccatcatcatgggtgtcaacgtaggcacatccatcaccagcaccctggtctcaatggcgcagtcaggggaccgggatgaatttcagagggctttcagcggctcggcggtgcacgggatcttcaactggctcacagtgctggtcctgctgccactggagagcgccacggccctgctggagaggctaagtgagctagccctgggtgccgccagcctgacacccagggcgcaggcgcccgacatcctcaaggtgctgacgaagccgctcacacacctcatcgtgcagttggactccgacatgatcatgagcagtgccacaggcaacgccactaacagcagtctcattaagcactggtgcggcaccacggggcagccgacccaggagaacagcagctgtggcgccttcggcccgtgcacagagaagaacagcacagccccggcggacaggctgccctgccgccacctgtttgcgggcacggagctcacggacctggccgtgggctgcatcctgctggccggctccctgctggtgctctgcggctgcctggtcctcatagtcaagctgctcaactctgtgctgcgcggccgcgtggcccaggtcgtgaggacagtcatcaatgcggacttccccttcccgctgggctggctcggcggctacctggccgtcctcgcgggcgccggcctgaccttcgcactgcagagcagcagcgtcttcacggcggccgtcgtgcccctcatgggggtcggggtgatcagtctggaccgggcgtaccccctcttactgggctccaacatcggcaccactaccacagccctgctggctgccctggccagccccgcagacaggatgctcagcgccctgcaggtcgccctcatccacttcttcttcaacctggccggcatcctgctgtggtacctggtgcctgcactgcggctgcccatcccgctggccaggcacttcggggtggtgaccgcccgttaccgctgggtggctggggtctacctgctgctcggattcctgctgctgcccctggcggccttcgggctctccctggcagggggcatggagctggccgctgtcgggggtcccctggtggggctggtgctcctcgtcatcctggttactgtcctgcagcggcgccggccggcctggctgcctgtccgcctgcgctcctgggcctggctccccgtctggctccattctctggagccctgggaccgcctggtgacccgctgctgcccctgcaacgtctgcagccccccgaaggccaccaccaaagaggcctactgctacgagaaccctgagatcttggcctcccagcagttgtgacgggcagttgctgagcagaccgccccaccctccccggctgggagggctctggagggccctggagggggggtccccgcggcagctgacctccggtcacctgcttccccttctgtgcaaataaaccaggctgttatctgg

SEQ ID NO: 29008 - DNA, 1206 bp, Homo sapiens
  source 1..1206: mol_type = unassigned DNA
acaatgtcactttattattcaagttatactgcttggcagtgatgaccctgatggctgcagtctataccatagctttaagatacacaaggacatcagacaaagaactctacttttcaaccacagccgtgtgtatcacagaagttataaagttattgctaagtgtgggaattttagctaaagaaactggtagtctgggtagattcaaagcatctttaagagaaaatgtcttggggagccccaaggaactgttgaagttaagtgtgccatcgttagtgtatgctgttcagaacaacatggctttcctagctcttagcaatctggatgcagcagtgtaccaggtgacctaccagttgaagattccgtgtactgctttatgcactgttttaatgttaaaccggacactcagcaaattacagtgggtttcagtttttatgctgtgtgctggagttacgcttgtacagtggaaaccagcccaagctacaaaagtggtggagtatattttgaaaaagtttaaagagttcagatacttctctttgggtgagaaacattcaaatgtatctatcagggattattgtgacattagctggcgtctacttgtcagatggagctgaaattaaagaaaaaggatttttctatggttacacatattatgtctggtttgtcatctttcttgcaagtgttggtggcctctacacttctgttgtggttaagtacacagacaacatcatgaaaggcttttctgcagcagcggccattgtcctttccaccattgcttcagtaatgctgtttggattacagataacactcacctttgccctgggtactcttcttgtatgtgtttccatatatctctatggattacccagacaagacactacatccatccaacaaggagaaacagcttcaaaggagagagttattggtgtgtgattttagcctcacgtgagactccttttaagactaaaccatttgcattaaactagagccttaagtcaatctcagaaggtagcataaacaaataaaaattaactgtatggcatgatcagtgcggttatgtggaaacaacaacaaacaaacgaagctatctgagtgaactgctaatacagaaacttaatgtagacctgtttggggtctactattgttttagaatgaaggaattgtattattgtgtgtatatataatttgtaaataaaaagtatggagatg

SEQ ID NO: 29009 - DNA, 1851 bp, Homo sapiens
  source 1..1851: mol_type = unassigned DNA
agttccgcggggggctgtcggggaaccatggctgccccgagagacaatgtcactttattattcaagttatactgcttggcagtgatgaccctgatggctgcagtctataccatagctttaagatacacaaggacatcagacaaagaactctacttttcaaccacagccgtgtgtatcacagaagttataaagttattgctaagtgtgggaattttagctaaagaaactggtagtctgggtagattcaaagcatctttaagagaaaatgtcttggggagccccaaggaactgttgaagttaagtgtgccatcgttagtgtatgctgttcagaacaacatggctttcctagctcttagcaatctggatgcagcagtgtaccaggtgacctaccagttgaagattccgtgtactgctttatgcactgttttaatgttaaaccggacactcagcaaattacagtgggtttcagtttttatgctgtgtgctggagttacgcttgtacagtggaaaccagcccaagctacaaaagtggtggtggaacaaaatccattattagggtttggcgctatagctattgctgtattgtgctcaggatttgcaggagtatattttgaaaaagttttaaagagttcagatacttctctttgggtgagaaacattcaaatgtatctatcagggattattgtgacattagctggcgtctacttgtcagatggagctgaaattaaagaaaaaggatttttctatggttacacatattatgtctggtttgtcatctttcttgcaagtgttggtggcctctacacttctgttgtggttaagtacacagacaacatcatgaaaggcttttctgcagcagcggccattgtcctttccaccattgcttcagtaatgctgtttggattacagataacactcacctttgccctgggtactcttcttgtatgtgtttccatatatctctatggattacccagacaagacactacatccatccaacaaggagaaacagcttcaaaggagagagttattggtgtgtgattttagcctcacgtgagactccttttaagactaaaccatttgcattaaactagagccttaagtcaatctcagaaggtagcataaacaaataaaaattaactgtatggcatgatcagtgcggttatgtggaaacaacaacaaacaaacgaagctatctgagtgaactgctaatacagaaacttaatgtagacctgtttggggtctactattgttttagaatgaaggaattgtattattgtgtgtatatataatttgtaaataaaaagtatggagatgatacggtgttaaaaaaaatcatggtaaggctacaatactcaagtaacaaggtttgggacaatgtctaagggttaaagtgccaaagccatttctgtactaactgttctcttgttccggtaccggggagaaggatgacccctccttattctccaattcatgtacagtattttgtcctagcagcataaagacctagctcttttcttacaagaggcagaaacaagacaggctagttcataaacaaactgtgtaacttctcaaaatgaatctatttcataactcggacaatttctgggtggtgactgagtacccctttagtgagtacccctttagtgctatatttgtgccattcattatctggttcatatttcttttctgttagatgatacacatttcttcaaaaaaatttctaatgtcacttttgtacttttttaaataaagtatgtttaactgttgggctctcaataatttgtgaaatttcagtgttttctataatgttaatggggaaattcagcaataaactttatttgtaagaaa

SEQ ID NO: 29010 - DNA, 1720 bp, Homo sapiens
  source 1..1720: mol_type = unassigned DNA
acaaggggcggtccccggtgtcctgcgcgggggcgcggagggggcgggcgtcagttccgcggggggctgtcggggaaccatggctgccccgagagacaatgtcactttattattcaagttatactgcttggcagtgatgaccctgatggctgcagtctataccatagctttaagatacacaaggacatcagacaaagaactctacttttcaaccacagccgtgtgtatcacagaagttataaagttattgctaagtgtgggaattttagctaaagaaactggtagtctgggtagattcaaagcatctttaagagaaaatgtcttggggagccccaaggaactgttgaagttaagtgtgccatcgttagtgtatgctgttcagaacaacatggctttcctagctcttagcaatctggatgcagcagtgtaccaggtgacctaccagttgaagattccgtgtactgctttatgcactgttttaatgttaaaccggacactcagcaaattacagtgggtttcagtttttatgctgtgtgctggagttacgcttgtacagtggaaaccagcccaagctacaaaagtggtggtggaacaaaatccattattagggtttggcgctatagctattgctgtattgtgctcaggatttgcagttcttgcaagtgttggtggcctctacacttctgttgtggttaagtacacagacaacatcatgaaaggcttttctgcagcagcggccattgtcctttccaccattgcttcagtaatgctgtttggattacagataacactcacctttgccctgggtactcttcttgtatgtgtttccatatatctctatggattacccagacaagacactacatccatccaacaaggagaaacagcttcaaaggagagagttattggtgtgtgattttagcctcacgtgagactccttttaagactaaaccatttgcattaaactagagccttaagtcaatctcagaaggtagcataaacaaataaaaattaactgtatggcatgatcagtgcggttatgtggaaacaacaacaaacaaacgaagctatctgagtgaactgctaatacagaaacttaatgtagacctgtttggggtctactattgttttagaatgaaggaattgtattattgtgtgtatatataatttgtaaataaaaagtatggagatgatacggtgttaaaaaaaatcatggtaaggctacaatactcaagtaacaaggtttgggacaatgtctaagggttaaagtgccaaagccatttctgtactaactgttctcttgttccggtaccggggagaaggatgacccctccttattctccaattcatgtacagtattttgtcctagcagcataaagacctagctcttttcttacaagaggcagaaacaagacaggctagttcataaacaaactgtgtaacttctcaaaatgaatctatttcataactcggacaatttctgggtggtgactgagtacccctttagtgagtacccctttagtgctatatttgtgccattcattatctggttcatatttcttttctgttagatgatacacatttcttcaaaaaaatttctaatgtcacttttgtacttttttaaataaagtatgtttaactgttgggctctcaataatttgtgaaatttcagtgttttctataatgttaatggggaaattcagcaataaactttatttgt

SEQ ID NO: 29011 - DNA, 770 bp, Homo sapiens
  source 1..770: mol_type = unassigned DNA
atggctgccccgagagacaatgtcactttattattcaagttatactgcttggcagtgatgaccctgatggctgcagtctataccatagctttaagatacacaaggacatcagacaaagaactctacttttcaaccacagccgtgtgtatcacagaagttataaagttattgctaagtgtgggaattttagctaaagaaactggtagtctgggtagattcaaagcatctttaagagaaaatgtcttggggagccccaaggaactgttgaagttaagtgtgccatcgttagtgtatgctgttcagaacaacatggctttcctagctcttagcaatctggatgcagcagtgtaccaggtgacctaccagttgaagattccgtgtactgctttatgcactgttttaatgttaaaccggacactcagcaaattacagtgggtttcagtttttatgctgtgtgctggagttacgcttgtacagtggaaaccagcccaagctacaaaagtggtgttcttgcaagtgttggtggcctctacacttctgttgtggttaagtacacagacaacatcatgaaaggcttttctgcagcagcggccattgtcctttccaccattgcttcagtaatgctgtttggattacagataacactcacctttgccctgggtactcttcttgtatgtgtttccatatatctctatggattacccagacaagacactacatccatccaacaaggagaaacagcttcaaaggagagagttattggtgtgtga

SEQ ID NO: 29012 - DNA, 924 bp, Homo sapiens
  source 1..924: mol_type = unassigned DNA
agttccgcggggggctgtcggggaaccatggctgccccgagagacaatgtcactttattattcaagttatactgcttggcagtgatgaccctgatggctgcagtctataccatagctttaagatacacaaggacatcagacaaagaactctacttttcaaccacagccgtgtgtatcacagaagttataaagttattgctaagtgtgggaattttagctaaagaaactggtagtctgggtagattcaaagcatctttaagagaaaatgtcttggggagccccaaggaactgttgaagttaagtgtgccatcgttagtgtatgctgttcagaacaacatggctttcctagctcttagcaatctggatgcagcagtgtaccaggtgacctaccagttgaagattccgtgtactgctttatgcactgttttaatgttaaaccggacactcagcaaattacagaaaaaggatttttctatggttacacatattatgtctggtttgtcatctgtaagtatccaggaattaaaggttcttagtagatcctttattttttttttaagttagatgtccattttaagctgttataacattttgaaattaatcctttgatactgtaaataccagtttgaatataattttcattttgttgacttagttttgattgtgaaggcaaaattgctttgggatagcaatgccccaaaatatctaacattagcaaaaaatgtgtaaaatttaatagaccacatagccctctgggcattgttttggaaaaacagtgttatataggaactaccaattttagtacaaactctcagatggctccttctaaggaaaacagtattttccttttcctaggtaaagtatggcatctctggggatgaaaattgcctcaccattatgtaatgtttcatttatttgagtgat

SEQ ID NO: 29013 - DNA, 1207 bp, Homo sapiens
  source 1..1207: mol_type = unassigned DNA
gtcagttccgcggggggctgtcggggaaccatggctgccccgagagacaatgtcactttattattcaagttatactgcttggcagtgatgaccctgatggctgcagtctataccatagctttaagatacacaaggacatcagacaaagaactctacttttcaaccacagccgtgtgtatcacagaagttataaagttattgctaagtgtgggaattttagctaagtgacctaccagttgaagattccgtgtactgctttatgcactgttttaatgttaaaccggacactcagcaaattacagtgggtttcagtttttatgctgtgtgctggagttacgcttgtacagtggaaaccagcccaagctacaaaagtggtggtggaacaaaatccattattagggtttggcgctatagctattgctgtattgtgctcaggatttgcaggagtatattttgaaaaagttttaaagagttcagatacttctctttgggtgagaaacattcaaatgtatctatcagggattattgtgacattagctggcgtctacttgtcagatggagctgaaattaaagaaaaaggatttttctatggttacacatattatgtctggtttgtcatctttcttgcaagtgttggtggcctctacacttctgttgtggttaagtacacagacaacatcatgaaaggcttttctgcagcagcggccattgtcctttccaccattgcttcagtaatgctgtttggattacagataacactcacctttgccctgggtactcttcttgtatgtgtttccatatatctctatggattacccagacaagacactacatccatccaacaaggagaaacagcttcaaaggagagagttattggtgtgtgattttagcctcacgtgagactccttttaagactaaaccatttgcattaaactagagccttaagtcaatctcagaaggtagcataaacaaataaaaattaactgtatggcatgatcagtgcggttatgtggaaacaacaacaaacaaacgaagctatctgagtgaactgctaatacagaaacttaatgtagacctgtttggggtctactattgttttagaatgaaggaattgtattattgtgtgtatatataatttgtaaataaaaagtatggagatgatacggtgttaaaaaaaatcatggtaaggctacaatactcaagtaac

SEQ ID NO: 29014 - DNA, 1451 bp, Homo sapiens
  source 1..1451: mol_type = unassigned DNA
caacatggcagcggttggggctggtggttccaccgcggcgcccgggccaggggcggtttccgcgggtgcattggagccggggaccgccagtgcggctcacaggcgcctgaagtacatatccctagctgtgctggtggtccagaatgcctccctcatcctcagcatccgctacgcccgcacgttgccaggggaccgcttctttgccaccactgctgtggtcatggcggaagtgctcaaaggtctcacctgcctgctgctgctcttcgcacagaagaggggtaacgtgaagcacctggttctcttcctccatgaggctgtcctggtgcagtatgtggacacgctcaagctcgcagtgccctctctcatctacaccttgcagaataacctccagtatgttgccatctctaacctaccagctgccactttccaggtgacataccagctgaagatcctgaccacagcgctgttctccgtgctcatgctgaatcgcagcctttcccggctgcagtgggcctccctgctgctcctcttcactggcgtcgccattgtccaggcacagcaagccggtgggggaggcccacggccactggatcagaaccctggggcaggcctggcagccgtcgtggcctcctgtctctcctccggcttcgcaggtgtctactttgagaagatcctcaaaggcagctcaggctccgtgtggctgcgcaacctgcaactgggcctcttcggcacagcactgggcctggtggggctctggtgggctgagggtaccgccgtggccacccgtggtttcttttttgggtacacacctgctgtctggggcgtggtgctcaaccaggccttcggcgggctactggtggctgtggttgtcaagtacgctgacaatatcctcaagggctttgccacctccctgtccattgtgctgtccactgttgcctccattcgcctctttggcttccacgtggacccattatttgcccttggcgctggactcgtcattggtgctgtctacctctacagccttccccgaggtgcagccaaagccatagcctctgcctctgcctccgcctccgggccctgcgttcaccagcagcctcccgggcagccaccaccaccgcagctgtcttcccaccgtggagacctcatcacggagccctttctgccaaagttgctcaccaaggtgaagggttcctagccgctgggattgaagacattggcctggcctcgttctctcttcttgcccttggcccagctgggaccaaactctgatcagtattaggggtagagtgaggtagacactggactccctgtccccaccacccctgccccacccagggccaacatgactaagctctctcatgacccacctcagctcagccccccagcccctgccagctccacactatctcttagctgagtttttgcaaataaaatgtgttgtgtatcttgcc

SEQ ID NO: 29015 - DNA, 655 bp, Homo sapiens
  source 1..655: mol_type = unassigned DNA
gttgccgaggggacgggccgggcagatgccaacatggcagcggttggggctggtggttccaccgcggcgcccgggccaggggcggtttccgcgggtgcattggagccggggaccgccagtgcggctcacaggcgcctgaagtacatatccctagctgtgctggtggtccagaatgcctccctcatcctcagcatccgctacgcccgcacgttgccaggggaccgcttctttgccaccactgctgtggtcatggcggaagtgctcaaaggtctcacctgcctgctgctgctcttcgcacagaagaggggtaacgtgaagcacctggttctcttcctccatgaggctgtcctggtgcagtatgtggacacgctcaagctcgcagtgccctctctcatctacaccttgcagaataacctccagtatgttgccatctctaacctaccagctgccactttccaggtgagccccaagcccagcatggccccagaggaactaactgggttggggactggagtatgggaatagcgtggtgggggggtgttgcagaggacaggggctatgtcaccttcagaatgtccttggaactccttcaacctcccttttctcgtctgtgaaaattgggggtggaaatagtaatgcctgttcattgagatgc

SEQ ID NO: 29016 - DNA, 1000 bp, Homo sapiens
  source 1..1000: mol_type = unassigned DNA
atcgggggatgatctggaaagcgcgatcagtgaagcggacgaacggcaggataaggcgggtctagtgacaggaatgggccgatgaagctctgtagggatgctcacaggcgcctgaagtacatatccctagctgtgctggtggtccagaatgcctccctcatcctcagcatccgctacgcccgcacgttgccaggggaccgcttctttgccaccactgctgtggtcatggcggaagtgctcaaaggtctcacctgcctgctgctgctcttcgcacagaagaggggtaacgtgaagcacctggttctcttcctccatgaggctgtcctggtgcagtatgtggacacgctcaagctcgcagtgccctctctcatctacaccttgcagaataacctccagtatgttgccatctctaacctaccagctgccactttccagccttccccgaggtgcagccaaagccatagcctctgcctctgcctccgcctccgggccctgcgttcaccagcagcctcccgggcagccaccaccaccgcagctgtcttcccaccgtggagacctcatcacggagccctttctgccaaagtcagtgctggtgaagtgagggctggcagcaatggggggacacaagggagggggactggggtggagggtgttgggcatctgcaggacccaagtcgccaccctccggggcctggctcctctgggtttgggagatggtcttttctcccaggtcactgagacttctggaggggtgtgggactagagctgggtgtcacgtgaacccttcctggtagggtgacccccttcccctggagggggttttagagctgccgcctctgctccctctaacctctttggaggcagggttgggggtattgtcattcaaggccttttttttgtctgctccctccccgaccctgtgccctcttctggaggtttctcgtctgggagagtccctcccagcagtccctccacctccataaggacacactggacaaaa

SEQ ID NO: 29017 - DNA, 2619 bp, Homo sapiens
  source 1..2619: mol_type = unassigned DNA
atcgggggatgatctggaaagcgcgatcagtgaagcggacgaacggcaggataaggcgggtctagtgacaggaatgggccgatgaagctctgtagggatggtgggtaggccgatcgggccgtgtccccggcctcccgatccgacggaatttggaaatcccggggctattcatacattgagcttttaggagcggaggagaaaagccaccaccctgacgatcccggctctcgctccaccttcactcaggtggcccggcagcggaagtgacgaacgcggaagtggtttttctgttgccgaggggacgggccgggcagatgccaacatggcagcggttggggctggtggttccaccgcggcgcccgggccaggggcggtttccgcgggtgcattggagccggggaccgccagtgcggctcacaggcgcctgaagtacatatccctagctgtgctggtggtccagaatgcctccctcatcctcagcatccgctacgcccgcacgttgccaggggaccgcttctttgccaccactgctgtggtcatggcggaagtgctcaaaggtctcacctgcctgctgctgctcttcgcacagaagaggggtaacgtgaagcacctggttctcttcctccatgaggctgtcctggtgcagtatgtggacacgctcaagctcgcagtgccctctctcatctacaccttgcagaataacctccagtatgttgccatctctaacctaccagctgccactttccaggtgacataccagctgaagatcctgaccacagcgctgttctccgtgctcatgctgaatcgcagcctttcccggctgcagtgggcctccctgctgctcctcttcactggcgtcgccattgtccaggcacagcaagccggtgggggaggcccacggccactggatcagaaccctggggcaggcctggcagccgtcgtggcctcctgtctctcctccggcttcgcaggtgtctactttgagaagatcctcaaaggcagctcaggctccgtgtggctgcgcaacctgcaactgggcctcttcggcacagcactgggcctggtggggctctggtgggctgagggtaccgccgtggccacccgtggtttcttttttgggtacacacctgctgtctggggcgtggtgctcaaccaggccttcggcgggctactggtggctgtggttgtcaagtacgctgacaatatcctcaagggctttgccacctccctgtccattgtgctgtccactgttgcctccattcgcctctttggcttccacgtggacccattatttgcccttggcgctggactcgtcattggtgctgtctacctctacagccttccccgaggtgcagccaaagccatagcctctgcctctgcctccgcctccgggccctgcgttcaccagcagcctcccgggcagccaccaccaccgcagctgtcttcccaccgtggagacctcatcacggagccctttctgccaaagtcagtgctggtgaagtgagggctggcagcaatggggggacacaagggagggggactggggtggagggtgttgggcatctgcaggacccaagtcgccaccctccggggcctggctcctctgggtttgggagatggtcttttctcccaggtcactgagacttctggaggggtgtgggactagagctgggtgtcacgtgaacccttcctggtagggtgacccccttcccctggagggggttttagagctgccgcctctgctccctctaacctctttggaggcagggttgggggtattgtcattcaaggccttttttttgtctgctccctccccgaccctgtgccctcttctggaggtttctcgtctgggagagtccctcccagcagtccctccacctccataaggacacactggacaaaactcccgcagctcttcaggaatgaccgatgcctacctgtggggttcagttgcccatagtttgaggccttctctcctcccttaccaccgctctggatcatgttactagttccgtcttttgtgtggccttgggccagcttccttgataccttgaagatgggcttcttgtgagtccccagggagaaagggacaagagctaagatttttgcatcagcccttctggcagaaggtgtggtaggggccatttgttttttttagtggacttgggatttgtggtgtaatcatatcattaatgatccagggtgtgggaaaaatggaggtccttgaagtggctgaatctcattgtatttaagacactgtcagttgccagatgtaggcttatttttggagatgtctaggagaggaaaaagctaccaatcatactcttgatatccgtctggctgtgtgaggcacccctacctcatgggggtgtcttgggattgatgaactgtggaacctgcctcctgcgctccccaaagcttattaaccccttaactgtatcggggcggggtgtgtgtgtgcatggaagatgcctgggctgtctttgctatatgtaaatagagccattggatctttatttttgattaatttgttctgattttttggtttgttttttaaggaactgtaatgaacaaatgtcaggatatccaatgccaaataaagatgttgtatttatttag

SEQ ID NO: 29018 - DNA, 778 bp, Homo sapiens
  source 1..778: mol_type = unassigned DNA
atggcagcggttggggctggtggttccaccgcggcgcccgggccaggggcggtttccgcgggtgcattggagccggggaccgccagtgcggctcacaggcgcctgaagtacatatccctagctgtgctggtggtccagaatgcctccctcatcctcagcatccgctacgcccgcacgttgccaggggaccgcttctttgccaccactgctgtggtcatggcggaagtgctcaaaggtctcacctgcctgctgctgctcttcgcacagaagaggggtaacgtgaagcacctggttctcttcctccatgaggctgtcctggtgcagtatgtggacacgctcaagctcgcagtgccctctctcatctacaccttgcagaataacctccagtatgttgccatctctaacctaccagctgccactttccagccttccccgaggtgcagccaaagccatagcctctgcctctgcctccgcctccgggccctgcgttcaccagcagcctcccgggcagccaccaccaccgcagctgtcttcccaccgtggagacctcatcacggagccctttctgccaaagttgctcaccaaggtgaagggttcctagccgctgggattgaagacattggcctggcctcgttctctcttcttgcccttggcccagctgggaccaaactctgatcagtattaggggtagagtgaggtagacactggactccctgtccccaccacccctgccccacccagggccaacatgactaagctctctcatgacccacctcag

SEQ ID NO: 29019 - DNA, 1424 bp, Homo sapiens
  source 1..1424: mol_type = unassigned DNA
agatgccaacatggcagcggttggggctggtggttccaccgcggcgcccgggccaggggcggtttccgcgggtgcattggagccggggaccgccagtgcgggtaacgtgaagcacctggttctcttcctccatgaggctgtcctggtgcagtatgtggacacgctcaagctcgcagtgccctctctcatctacaccttgcagaataacctccagtatgttgccatctctaacctaccagctgccactttccaggtgacataccagctgaagatcctgaccacagcgctgttctccgtgctcatgctgaatcgcagcctttcccggctgcagtgggcctccctgctgctcctcttcactggcgtcgccattgtccaggcacagcaagccggtgggggaggcccacggccactggatcagaaccctggggcaggcctggcagccgtcgtggcctcctgtctctcctccggcttcgcaggtgtctactttgagaagatcctcaaaggcagctcaggctccgtgtggctgcgcaacctgcaactgggcctcttcggcacagcactgggcctggtggggctctggtgggctgagggtaccgccgtggccacccgtggtttcttttttgggtacacacctgctgtctggggcgtggtgctcaaccaggccttcggcgggctactggtggctgtggttgtcaagtacgctgacaatatcctcaagggctttgccacctccctgtccattgtgctgtccactgttgcctccattcgcctctttggcttccacgtggacccattatttgcccttggcgctggactcgtcattggtgctgtctacctctacagccttccccgaggtgcagccaaagccatagcctctgcctctgcctccgcctccgggccctgcgttcaccagcagcctcccgggcagccaccaccaccgcagctgtcttcccaccgtggagacctcatcacggagccctttctgccaaagtcagtgctggtgaagtgagggctggcagcaatggggggacacaagggagggggactggggtggagggtgttgggcatctgcaggacccaagtcgccaccctccggggcctggctcctctgggtttgggagatggtcttttctcccaggtcactgagacttctggaggggtgtgggactagagctgggtgtcacgtgaacccttcctggtagggtgacccccttcccctggagggggttttagagctgccgcctctgctccctctaacctctttggaggcagggttgggggtattgtcattcaaggccttttttttgtctgctccctccccgaccctgtgccctcttctggaggtttctcgtctgggagagtccctcccagcagtccctccacctccataaggacacactggacaaaactcccgcagctcttca

SEQ ID NO: 29020 - DNA, 1726 bp, Homo sapiens
  source 1..1726: mol_type = unassigned DNA
cgggccgggcagatgccaacatggcagcggttggggctggtggttccaccgcggcgcccgggccaggggcggtttccgcgggtgcattggagccggggaccgccagtgcggctcacaggcgcctgaagtacatatccctagctgtgctggtggtccagaatgcctccctcatcctcagcatccgctacgcccgcacgttgccaggggaccgcttctttgccaccactgctgtggtcatggcggaagtgctcaaaggtctcacctgcctgctgctgctcttcgcacagaagaggggtaacgtgaagcacctggttctcttcctccatgaggctgtcctggtgcagtatgtggacacgctcaagctcgcagtgccctctctcatctacaccttgcagaataacctccagtatgttgccatctctaacctaccagctgccactttccagccttccccgaggtgcagccaaagccatagcctctgcctctgcctccgcctccgggccctgcgttcaccagcagcctcccgggcagccaccaccaccgcagctgtcttcccaccgtggagacctcatcacggagccctttctgccaaagtcagtgctggtgaagtgagggctggcagcaatggggggacacaagggagggggactggggtggagggtgttgggcatctgcaggacccaagtcgccaccctccggggcctggctcctctgggtttgggagatggtcttttctcccaggtcactgagacttctggaggggtgtgggactagagctgggtgtcacgtgaacccttcctggtagggtgacccccttcccctggagggggttttagagctgccgcctctgctccctctaacctctttggaggcagggttgggggtattgtcattcaaggccttttttttgtctgctccctccccgaccctgtgccctcttctggaggtttctcgtctgggagagtccctcccagcagtccctccacctccataaggacacactggacaaaactcccgcagctcttcaggaatgaccgatgcctacctgtggggttcagttgcccatagtttgaggccttctctcctcccttaccaccgctctggatcatgttactagttccgtcttttgtgtggccttgggccagcttccttgataccttgaagatgggcttcttgtgagtccccagggagaaagggacaagagctaagatttttgcatcagcccttctggcagaaggtgtggtaggggccatttgttttttttagtggacttgggatttgtggtgtaatcatatcattaatgatccagggtgtgggaaaaatggaggtccttgaagtggctgaatctcattgtatttaagacactgtcagttgccagatgtaggcttatttttggagatgtctaggagaggaaaaagctaccaatcatactcttgatatccgtctggctgtgtgaggcacccctacctcatgggggtgtcttgggattgatgaactgtggaacctgcctcctgcgctccccaaagcttattaaccccttaactgtatcggggcggggtgtgtgtgtgcatggaagatgcctgggctgtctttgctatatgtaaatagagccattggatctttatttttgattaatttgttctgattttttggtttgttttttaaggaactgtaatgaacaaatgtcaggatatccaatgccaaataaagatgttgtatttattta

SEQ ID NO: 29021 - DNA, 877 bp, Homo sapiens
  source 1..877: mol_type = unassigned DNA
cgcgatcagtgaagcggacgaacggcaggataaggcgggtctagtgacaggaatgggccgatgaagctctgtagggatggtgggtaggccgatcgggccgtgtccccggcctcccgatccgacggaatttggaaatcccggggctattcatacattgagcttttaggagcggaggagaaaagccaccaccctgacgatcccggctctcgctccaccttcactcagctcacaggcgcctgaagtacatatccctagctgtgctggtggtccagaatgcctccctcatcctcagcatccgctacgcccgcacgttgccaggggaccgcttctttgccaccactgctgtggtcatggcggaagtgctcaaaggtctcacctgcctgctgctgctcttcgcacagaagaggggtaacgtgaagcacctggttctcttcctccatgaggctgtcctggtgcagtatgtggacacgctcaagctcgcagtgccctctctcatctacaccttgcagaataacctccagtatgttgccatctctaacctaccagctgccactttccaggtgacataccagctgaagatcctgaccacagcgctgttctccgtgctcatgctgaatcgcagcctttcccggctgcagtgggcctccctgctgctcctcttcactggcgtcgccattgtccaggcacagcaagccggtgggggaggcccacggccactggatcagaaccctggggcaggcctggcagccgtcgtggcctcctgtctctcctccggcttcgcaggtgtctactttgagaagatcctcaaaggcagctcaggctccgtgtggctgcgcaacctgcaactgggcctcttcggcacagcactgggcctggt

SEQ ID NO: 29022 - DNA, 1563 bp, Homo sapiens
  source 1..1563: mol_type = unassigned DNA
agatgccaacatggcagcggttggggctggtggttccaccgcggcgcccgggccaggggcggtttccgcgggtgcattggagccggggaccgccagtgcggagttgcttctcacttgggaggaagccgaggcgcgtggccagggtttgcctcagccattacctgacacctcagtaaggattccagctcacaggcgcctgaagtacatatccctagctgtgctggtggtccagaatgcctccctcatcctcagcatccgctacgcccgcacgttgccaggggaccgcttctttgccaccactgctgtggtcatggcggaagtgctcaaaggtctcacctgcctgctgctgctcttcgcacagaagaggggtaacgtgaagcacctggttctcttcctccatgaggctgtcctggtgcagtatgtggacacgctcaagctcgcagtgccctctctcatctacaccttgcagaataacctccagtatgttgccatctctaacctaccagctgccactttccaggtgacataccagctgaagatcctgaccacagcgctgttctccgtgctcatgctgaatcgcagcctttcccggctgcagtgggcctccctgctgctcctcttcactggcgtcgccattgtccaggcacagcaagccggtgggggaggcccacggccactggatcagaaccctggggcaggcctggcagccgtcgtggcctcctgtctctcctccggcttcgcaggtgtctactttgagaagatcctcaaaggcagctcaggctccgtgtggctgcgcaacctgcaactgggcctcttcggcacagcactgggcctggtggggctctggtgggctgagggtaccgccgtggccacccgtggtttcttttttgggtacacacctgctgtctggggcgtggtgctcaaccaggccttcggcgggctactggtggctgtggttgtcaagtacgctgacaatatcctcaagggctttgccacctccctgtccattgtgctgtccactgttgcctccattcgcctctttggcttccacgtggacccattatttgcccttggcgctggactcgtcattggtgctgtctacctctacagccttccccgaggtgcagccaaagccatagcctctgcctctgcctccgcctccgggccctgcgttcaccagcagcctcccgggcagccaccaccaccgcagctgtcttcccaccgtggagacctcatcacggagccctttctgccaaagtcagtgctggtgaagtgagggctggcagcaatggggggacacaagggagggggactggggtggagggtgttgggcatctgcaggacccaagtcgccaccctccggggcctggctcctctgggtttgggagatggtcttttctcccaggtcactgagacttctggaggggtgtgggactagagctgggtgtcacgtgaacccttcctggtagggtgacccccttcccctggagggggttttagagctgccgcctctgctccctctaacctctttggaggcagggttgggggtattgtcattcaagg

SEQ ID NO: 29023 - DNA, 6162 bp, Homo sapiens
  source 1..6162: mol_type = unassigned DNA
ccaactcctggagtcccctgggagctgccgctgcaggcccccgagccgctaggccccgccgccaggccaccgctgctgcggcagccatggcggaagttcatagacgtcagcatgctcgggttaaaggagaagcccccgcgaaatcctccacactccgagatgaggaggagctggggatggcgtcggccgaaacgctgaccgtgtttctgaagctgctggccgccggcttttacggcgtgagctccttcctgatcgtggtggtgaataagagcgtgctcaccaattacagatttccctcctcactatgtgttggacttggccagatggtggccacagtggcagttctctgggtgggaaaggcgctcagagtagtcaagtttcctgaccttgacagaaatgtacctcgaaagacgtttccactacctctactatattttgggaaccaaatcacgggactgttcagcacaaagaaactgaacttgccaatgtttacagttctgagaaggttctccatcctgtttacaatgtttgctgaaggagttttactcaagaagactttttcttggggtattaaaatgactgtatttgcaatgattattggagcctttgtagctgccagctctgacttggcatttgatctggaaggatatgcttttattctgataaacgatgtcctaacagcagcaaatggtgcatacgtaaaacaaaaattagattcaaaagagctgggaaaatatggactgctctattacaatgcactgttcatgattctgcccaccctggccattgcgtatttcacaggagatgcacaaaaggctgtggagtttgaaggctgggctgacaccctctttcttctgcagttcaccctctcctgtgtgatggggtttatcttaatgtacgccacagtactctgcacgcagtataattctgctcttacaactacaatagttggctgtattaagaatatattaataacttatattggaatggtctttggtggagattatattttcacgtggacaaacttcattggtttaaatatcagcattgctgggagcctggtatattcctatatcactttcactgaagagcagctgagcaaacagtcagaggctaataacaagctggacattaaggggaaaggagcagtgtgaccagaggattgcttcatctgatacgtaggcctaagtttttaatcaactcagaacactggcagttcctacagagacactgaggtgtcttgattatggaggaaataaccattcctttgcacttgtacaatctgaggattgattgctgccttttaaaattttatgaagagagaaacttataattgactctattttaaatatgttgtttgaattaatttatatcagactggaaaaggtactgggctttttaatttatttttcttatatgccgacagtgaaacatcagtgttttgaaagtattttatttcataatttgatatccaggtgtccctgagagctgcatatgtaatgtttgccaactggagcttcatcattcaaattgttgctgcatctggaggcagtttagcctttcctctgctggaaatgcagacgaatatgtgaaatttctcttctttgaatcttatttcttatgattgcattgtcttcatcatatcatcattccatttgccaaggaaaacaactttggcactataaaaatatgtggggctttgaagtgtattgctatctatgttggcttccctgactttcataggatgagcagagtgcattccttgaaaacatgttctttttttgttgtgtagaatggggataatgaagggggtgagaaagtaggccttttactaatttttcatctatttgacttattgattcaactaaaatgttttaagtatatgtgccaggcattgtgctaaatgctggggatacagagatgtttgcagaggtagttgaaacatctcactcctgccatagtgactcaggtaaggttgagaatttagctctgttaatctattcagaagatgtcactaagagtaagttgtttcagcactcaaaagccgcaaatctgtaaattggattaagaacacctgccctacctacccggcaatagtgtgaatccaaatgctgcaatgtgagatgaggtacaagtaaagagctgtgttttgtaaaccagtgcagctcagcattgactccctctctaagtgaaaattgcagacaggcaagtctgttttcccttgccaccttcctttgggtttggttgctctttggatgaatatgatgaggtcccacatttctgaatttattggtttgaggggaaaggctggttagacgtctttgtattgtcaatggttggtttttctctggcagtgtcagtgttagagctatcatcttccttcttaaatggcatgagcaatgagcaaacttccctcctttcaacattctcacctacatcatgtgccccttggctcacctactgagcttgccaacttctctcaaaaccaatgctgcattttgggagagcagctgtgaatgggcactgcctaaattgcctcttggggtaatctggagggtggaggtgttaactcaaacataaccctatgacttgactcagagatatccattgactttgaggattagtgtgtttgctcaggccagttgtacagccagtgtgcaagagatttggtacctttgcactaatgcacacaccagtgtctatttcattgggtttggaatccactggactctgttgacctaaacagttagggttttgattttttttgatatgcaaatttatattgagatcattttcatattcctgtcttttggtttgtctttactaaagcttggctggtggtgctgtgtccctagaattatccctgcaaccaactcccaagttacaagcttcattaagagccttagactcacttttttctagcatcttctgacctgagaaaattccactgggagtaaaggatagtatcttgtgtcatatgggtcttactctccctattttaccaatgagaaaacaaaactcagagaaagatgacttgctaatacatcaaacccatgtcctttttattgaactatgctgccatttaattaaccgcccttcccctctgagggagtaaggaaacagatcctgagttcacttgagcactttcaaaaaagcaagcagttgattgaatttggtgtcagagaggagcatactttgcaaatcaggaagagtgacagcttaccctgtcctggaacccttatcccacttccaggctgactttagttgataatgcacttctggctgtaaatgttgccaacacttcctggttttgcttaggtacagtgaaagggcatagtgagagctatttttagtgattctgttctttctgtcagcaacatgaaggagggacgtttgaataatttttgttgtagaatatttcttcatgaaaggcttttgggtgtctttaacaggtgttgggctagagccccaccaggagttgaactgcctcttgggggtcaggttccctaggagatctgtcacctcttcaggagtatttgagaacattgtgtagttacagcttcactaaatgcacgtgacaggcttctgtgccttgggagccctggcttatgctgaaacttctggctgaccagagcagtacagcaactttgccctgtctgtgttctgcttcctggatgcatccttcagccactaaccagcattgcaagatggagcagggtgaacaagctggagactgaatagtcttttggagtttgcgttttgattattgcaggcgtgttacaatatactggtgatttacctggtactgtggcacctcccagaaagtctggtttttgccccatgtttgatatttactaggcagaaattctttgtcctgttaactgcctcctgggagaaaaagaggcaatacagagttaaatccttaatttgcccactgagacagatgagctgtggtattccaaaagacaaattctatgactagtgtctcctgttcaatgtaagtgagaccctctttggccaatctgcttctagtcaaggctaaatggattggaataaccctagttggccaggctacacattgccagcatgtcccgttgagttttaattgcctcatgtggctgtggactttatgagtcaatcatttgtaggctccagtttgcacctagtttttttttttaaaaagtgcatttacacgcttttggtagtcctgttttatcaagaatccatggagggttttggtcagtacagctggtgcaggatcctcacggagaaacagtggagtttcacattgagttggtttgaaatggcaccccaggactttgggcctgccttacttgatagcctcgttcagtgagcaaagacttagtgagcagctcttgtatgccaagtattttgctaagctctggaaaaaagataaacaagacatggttcttgctttcaaggagtgtgtaattctttagccagatatggaaacctggaccctgagtgggagaaaggagacagatgaaaggagtccgtgattttgtaaccaagagctgcctgcatggttatgagtatcactgattttagggacgccccacagagctaaagcatttttttaatccgagaggacttttgtaactcatattagttaatcttctagctctgagatagcaacacagctcttagaattctgtaagtagcttgaggcctcctcctctactgtacatgttcttgctttcccaaaattgtaagtttggtttttcctatgaacaagactgtaattgatttttctctccctgaggaaaaaagttcggaataaatgagacatggatatgaaactacttagcacaatgcctggtacatattaggccctcagcaaatgtggctaccgtgtcattatttcatggtgagactcaaggcaaaacaagattcttaatttatgctccgtaaatgctagaggcttgggcaatacggtctgtcctgaaaaacaggactctgtgtctcattgcctctagaatccttaggtagcagtttctgttcactgtcttttcttttttaaaaatatctgctggacacaattacggccattacatgatgcaggtgattctacctattttttaaaaagaacaaaatttcttttatattgtgacagtacattttaataaaggaaaattattttcttccccctactccccctccttttttttaaaaaaaaaaaaaaaaaagaaagaaggtcttgctctgtcgccagccaggctggagtgtaatggcgtaatcatagcagctcaccacagtctcaaactcctaggctcaagtgatcctcctgccttagcctgctaagtagctacgactataggcatgtgccattacgcctggctcgtttcttcctttttttttttttttctggtaaagacagggtctcactctgttgccagactggtctcaaactcctggcctcaagtaacccttctgtctcagcctcccaaagtgctgggattacaggtgtgtgccacatgtccggccaggaaaattattttctatcttaaagaaacatagttacattttagaatgtcaattcagttaaatctttctcagtttttacctttagatggctcctggaaaggccagcgttccttttcccctctctgaattgaaagcacttgaccccatgctgcccctgcttccaggcctgtctcagttgtcatatattgtgagtccctggcaccattactgttttctaagccagtcttctaggtcttactttcaggatgctgcttcatggcatgaggatatagtttacagtgttgtagtttttttttttttaaagctttgttctttaaaaatactttttaaaaagaaatctactggttagatttattgtctcacaaaaatgtttttagagattatttttttcacaaatgttttctttctcatgctgatgatcaactgatttttgtctacaggtgttagcttctcacagtattttttcattttagagtctatttaccaaatgaccatttttagtgttaaaaggtactgaggaattgaggtatgtaaatcaggtgacataaacatgaaaattatgtgcctaaatatttttgtaatggtgtaaaataaatactttttcctgaaaacaagtattaaaattcctttgtaactgcatacagagactaatccaga

SEQ ID NO: 29024 - DNA, 1748 bp, Homo sapiens
  source 1..1748: mol_type = unassigned DNA
ttcacggagctaagttaggtttgttctgatcttgtttttttctttgccctttttgtagatttccctcctcactatgtgttggacttggccagatggtggccacagtggcagttctctgggtgggaaaggcgctcagagtagtcaagtttcctgaccttgacagaaatgtacctcgaaagacgtttccactacctctactatattttgggaaccaaatcacgggactgttcagcacaaagaaactgaacttgccaatgtttacagttctgagaaggttctccatcctgtttacaatgtttgctgaaggagttttactcaagaagactttttcttggggtattaaaatgactgtatttgcaatgattattggagcctttgtagctgccagctctgacttggcatttgatctggaaggatatgcttttattctgataaacgatgtcctaacagcagcaaatggtgcatacgtaaaacaaaaattagattcaaaagagctgggaaaatatggactgctctattacaatgcactgttcatgattctgcccaccctggccattgcgtatttcacaggagatgcacaaaaggctgtggagtttgaaggctgggctgacaccctctttcttctgcagttcaccctctcctgtgtgatggggtttatcttaatgtacgccacagtactctgcacgcagtataattctgctcttacaactacaatagttggctgtattaagaatatattaataacttatattggaatggtctttggtggagattatattttcacgtggacaaacttcattggtttaaatatcagctgtatctgccacagaggtctctgtgagttaagagttggtagtgccactttgggaggctgaggcgggcagatcacaaggtcaagagatcaagaccaccctggccaacatggtgataccccgtctctactaaaaatacaaaaattagctggatgtggtggcaggcacctgtagtcccagctgctcgggaggctgaggcaggagaatcgcttgaacccaggaggcggaggttgcagtgatccgagattgcgccgctgcactccagcctggcaacagagtgagactccgtcccaacaaaataaaacagttggtagtgctgttgtttgaagattagacagatggaaaattgcttgaaaattttttaaaaggcataaacttaggcttgcataatgactgtaccttattttcaatatgcatgttttaactttttaaaagaaaatcttgttgaccagtactaataccaggagttctacttttaaaaaatgaatatttaggatgatctaatgtattaacaccaatttcatagtactagaaggtatcaactttaatgtgaatatttatggggccaatagattagttaaagggtctctgtttgaagtagtagaagatcctgatttagaatcatttggtagtgttgtataaaaagtcagatataacccctctccccttcaaatctgggcttttcctcattttccctttcccttccttctagttttccccttccccaaagctgctagagagcaaattatagttcctttccaaagcgtttactcatcactgcgtaacacatagtatgctcgttgatgaatattcagttctcttcaggtggttcatgaattgccctttccgaaaatctatatttgataatgatcgagtcagtaataaagatgaaattaaatatattttattgttgcctcaagttacaaccatgtggca

SEQ ID NO: 29025 - DNA, 2078 bp, Homo sapiens
  source 1..2078: mol_type = unassigned DNA
atgagctctcgctcggtgttgagccctgtggtaggcacagatgcacccgaccagcacctggagctcaagaagccgcaggaacttaaagaaatggaaaggctgcccttggcaaatgaagataaaacaatgttcgccaacctaaaatacgtttccctgggaattttggtctttcagactaccagtttggttctaacaatgcgttattccagaactttaaaagaagaaggacctcgttatctatcttctacagcagtggttgttgctgaacttttgaagataatggcctgcattttattggtctacaaagacagcaaatgtagtctaagagcactgaatcgagtactacatgatgaaattcttaataaacctatggaaacacttaaacttgctattccatcagggatctatactcttcagaataatttactgtatgtggcactatcaaatctagatgcagctacttatcaggtcacgtatcagttaaaaattcttacaacagcattattttctgtgtctatgcttagtaaaaaattgggtgtataccagtggctgtccctagtaattttgatgacaggagttgcttttgtacagtggccctcagattctcagcttgattctaaggaactttcagctggttctcaatttgtaggactcatggcagttctcacagcatgtttttcaagtggctttgctggggtttactttgagaaaatcttaaaagaaacaaaacaatcagtgtggataagaaatattcagcttggtttctttggaagtatatttggattaatgggtgtatacatttatgatggagaactggtatcaaagaatggattttttcagggatataaccgactgacctggatagtagttgttcttcaggcacttggaggccttgtaatagctgctgttattaagtatgcagataatattttaaaaggatttgcaacctctttatcgataatattatcaacattgatctcctatttttggcttcaagattttgtgccaaccagtgtctttttccttggagccatccttgtaataacagctacttttttgtatggttatgatcccaaacctgcaggaaatcccactaaagcatagttgtatactatctttaactggtttttcacgatggggcactaggaatctcgacattaatcttgcacagaggacttctacagagtctgagaagatatcatcatgctgaatctgatcatactgttttttaaaagtttaaggataagacatgtgtatatgtaacaaaacacattgcatctagaaatcaaaacttgaaagtatttccagggattaggattagaaggaatattagaggaaacttgaaatctgagtttaaaaagattttacctttttgattgctgcagaaatgtcctatgcactctttgcaagagcacacaacaaatgtcagataccaatttttgcaaattagatttaatcttattaaatgtttttatcttactctttctgtacagatatatcaaatcacatgaaatatttaaagtttgaaaattataattacctataaagctgtgaaaaatagaagtataatttgaaaaaacatttcacttatcagagatttttatatttatacaaaagattactaaatgaaggattgctaaatgtttttggttcaattacataaaaattaatattctgggtctgatctgtcagagaataaatatcaaatctaaatttaatgtagagatacatactatttctccatatgaattttaagatattttagtgcttcaagactgctgaaagcaatccagttgctcctgtgctagatggtagccagagaattttatagtaatggaggttagcccttaatctcttcattgcatttcatttctgtaaatcagattaagtccttaatattattttaaattaaaatttgtgtgtaattgccattaaattttcaaaatgtaatttaaaaggattaaatactcatttaataatttaaaataattattgtataatatctacatttggagaattttgaactatcaagcatatactgtatacagttagaaagttattaaatgaacattttactc

SEQ ID NO: 29026 - DNA, 2347 bp, Homo sapiens
  source 1..2347: mol_type = unassigned DNA
gagaggtgtagcagaaagcagtgccccaggcctccacgcgacggtgaagcaggaaccaggggctgccagcagagcagcccaggtgcgtcgccttagggacagagctgccaagtgccgagctggggctgccagagccgagccgggaacggcatttgccagagccgaggcggaagccggagcatttgggggacgggaccgcgggaacccggaaacgcctgggctgcaccgagctggcggtggctacggcgacgggagccggcggcgctgcgggtcagcggtcgcgtaggacccagcggactcggcagcctggggcgcccggcggagctgaaccgcggcccccggtggtgggctcagccggtcgagctgcgcgggaggcaaatgaagataaaacaatgttcgccaacctaaaatacgtttccctgggaattttggtctttcagactaccagtttggttctaacaatgcgttattccagaactttaaaagaagaaggacctcgttatctatcttctacagcagtggttgttgctgaacttttgaagataatggcctgcattttattggtctacaaagacagcaaatgtagtctaagagcactgaatcgagtactacatgatgaaattcttaataaacctatggaaacacttaaacttgctattccatcagggatctatactcttcagaataatttactgtatgtggcactatcaaatctagatgcagctacttatcaggtcacgtatcagttaaaaattcttacaacagcattattttctgtgtctatgcttagtaaaaaattgggtgtataccagtggctgtccctagtaattttgatgacaggagttgcttttgtacagtggccctcagattctcagcttgattctaaggaactttcagctggttctcaatttgtaggactcatggcagttctcacagcatgtttttcaagtggctttgctggggtttactttgagaaaatcttaaaagaaacaaaacaatcagtgtggataagaaatattcagcttggtttctttggaagtatatttggattaatgggtgtatacatttatgatggagaactggtatcaaagaatggattttttcagggatataaccgactgacctggatagtagttgttcttcaggcacttggaggccttgtaatagctgctgttattaagtatgcagataatattttaaaaggatttgcaacctctttatcgataatattatcaacattgatctcctatttttggcttcaagattttgtgccaaccagtgtctttttccttggagccatccttgtaataacagctacttttttgtatggttatgatcccaaacctgcaggaaatcccactaaagcatagttgtatactatctttaactggtttttcacgatggggcactaggaatctcgacattaatcttgcacagaggacttctacagagtctgagaagatatcatcatgctgaatctgatcatactgttttttaaaagtttaaggataagacatgtgtatatgtaacaaaacacattgcatctagaaatcaaaacttgaaagtatttccagggattaggattagaaggaatattagaggaaacttgaaatctgagtttaaaaagattttacctttttgattgctgcagaaatgtcctatgcactctttgcaagagcacacaacaaatgtcagataccaatttttgcaaattagatttaatcttattaaatgtttttatcttactctttctgtacagatatatcaaatcacatgaaatatttaaagtttgaaaattataattacctataaagctgtgaaaaatagaagtataatttgaaaaaacatttcacttatcagagatttttatatttatacaaaagattactaaatgaaggattgctaaatgtttttggttcaattacataaaaattaatattctgggtctgatctgtcagagaataaatatcaaatctaaatttaatgtagagatacatactatttctccatatgaattttaagatattttagtgcttcaagactgctgaaagcaatccagttgctcctgtgctagatggtagccagagaattttatagtaatggaggttagcccttaatctcttcattgcatttcatttctgtaaatcagattaagtccttaatattattttaaattaaaatttgtgtgtaattgccattaaattttcaaaatgtaatttaaaaggattaaatactcatttaataatttaaaataattattgtataatatctacatttggagaattttgaactatcaagcatatactgtatacagttagaaagttattaaatgaacattttactcatt

SEQ ID NO: 29027 - DNA, 748 bp, Homo sapiens
  source 1..748: mol_type = unassigned DNA
ttgaaaagattttattctgaaagactcttgccttctcaggcctttggttagagaaagcaaatgaagataaaacaatgttcgccaacctaaaatacgtttccctgggaattttggtctttcagactaccagtttggttctaacaatgcgttattccagaactttaaaagaagaaggacctcgttatctatcttctacagcagtggttgttgctgaacttttgaagataatggcctgcattttattggtctacaaagacagcaaatgtagtctaagagcactgaatcgagtactacatgatgaaattcttaataaacctatggaaacacttaaacttgctattccatcagggatctatactcttcagaataatttactgtatgtggcactatcaaatctagatgcagctacttatcaggtcacgtatcagttaaaaattcttacaacagcattattttctgtgtctatgcttagtaaaaaattgggtgtataccagtggctgtccctagtaattttgatgacaggagttgcttttgtacagtggccctcagattctcagcttgattctaaggaactttcagctggttctcaatttgtaggactcatggcagttctcacagcatgtttttcaagtggctttgctggggtttactttgagaaaatcttaaaagaaacaaaacaatcagtgtggataagaaatattcagcttggtttctttggaagtatatttggattaatgggtgtatacat

SEQ ID NO: 29028 - DNA, 1759 bp, Homo sapiens
  source 1..1759: mol_type = unassigned DNA
cgggaccgcgggaacccggaaacgcctgggctgcaccgagctggcggtggctacggcgacgggagccggcggcgctgcgggtcagcggtcgcgtaggacccagcggactcggcagcctggggcgcccggcggagctgaaccgcggcccccggtggtgggctcagccggtcgagctgcgcgggagggtctcactgtcaccttggctggagtacagaggcgcaatctcagctcactgcaacttccacctccctggctcaagtgatctcccaccttagcctcccaagcaaatgaagataaaacaatgttcgccaacctaaaatacgtttccctgggaattttggtctttcagactaccagtttggttctaacaatgcgttattccagaactttaaaagaagaaggacctcgttatctatcttctacagcagtggttgttgctgaacttttgaagataatggcctgcattttattggtctacaaagacagcaaatgtagtctaagagcactgaatcgagtactacatgatgaaattcttaataaacctatggaaacacttaaacttgctattccatcagggatctatactcttcagaataatttactgtatgtggcactatcaaatctagatgcagctacttatcaggtcacgtatcagttaaaaattcttacaacagcattattttctgtgtctatgcttagtaaaaaattgggtgtataccagtggctgtccctagtaattttgatgacaggagttgcttttgtacagtggccctcagattctcagcttgattctaaggaactttcagctggttctcaatttgtaggactcatggcagttctcacagcatgtttttcaagtggctttgctggggtttactttgagaaaatcttaaaagaaacaaaacaatcagtgtggataagaaatattcagcttggtttctttggaagtatatttggattaatgggtgtatacatttatgatggagaactggtatcaaagaatggattttttcagggatataaccgactgacctggatagtagttgttcttcaggcacttggaggccttgtaatagctgctgttattaagtatgcagataatattttaaaaggatttgcaacctctttatcgataatattatcaacattgatctcctatttttggcttcaagattttgtgccaaccagtgtctttttccttggagccatccttgtaataacagctacttttttgtatggttatgatcccaaacctgcaggaaatcccactaaagcatagttgtatactatctttaactggtttttcacgatggggcactaggaatctcgacattaatcttgcacagaggacttctacagagtctgagaagatatcatcatgctgaatctgatcatactgttttttaaaagtttaaggataagacatgtgtatatgtaacaaaacacattgcatctagaaatcaaaacttgaaagtatttccagggattaggattagaaggaatattagaggaaacttgaaatctgagtttaaaaagattttacctttttgattgctgcagaaatgtcctatgcactctttgcaagagcacacaacaaatgtcagataccaatttttgcaaattagatttaatcttattaaatgtttttatcttactctttctgtacagatatatcaaatcacatgaaatatttaaagtttgaaaattataattacctataaagctgtgaaaaatagaagtataatttgaaaaaacattt

SEQ ID NO: 29029 - DNA, 5533 bp, Homo sapiens
  source 1..5533: mol_type = unassigned DNA
gagaggtgtagcagaaagcagtgccccaggcctccacgcgacggtgaagcaggaaccaggggctgccagcagagcagcccaggtgcgtcgccttagggacagagctgccaagtgccgagctggggctgccagagccgagccgggaacggcatttgccagagccgaggcggaagccggagcatttgggggacgggaccgcgggaacccggaaacgcctgggctgcaccgagctggcggtggctacggcgacgggagccggcggcgctgcgggtcagcggtcgcgtaggacccagcggactcggcagcctggggcgcccggcggagctgaaccgcggcccccggtggtgggctcagccggtcgagctgcgcgggaggcaaatgaagataaaacaatgttcgccaacctaaaatacgtttccctgggaattttggtctttcagactaccagtttggttctaacaatgcgttattccagaactttaaaagaagaaggacctcgttatctatcttctacagcagtggttgttgctgaacttttgaagataatggcctgcattttattggtctacaaagacagcaaatgtagtctaagagcactgaatcgagtactacatgatgaaattcttaataaacctatggaaacacttaaacttgctattccatcagggatctatactcttcagaataatttactgtatgtggcactatcaaatctagatgcagctacttatcaggtcacgtatcagttaaaaattcttacaacagcattattttctgtgtctatgcttagtaaaaaattgggtgtataccagtggctgtccctagtaattttgatgacaggagttgcttttgtacagtggccctcagattctcagcttgattctaaggaactttcagctggttctcaatttgtaggactcatggcagttctcacagcatgtttttcaagtggctttgctggggtttactttgagaaaatcttaaaagaaacaaaacaatcagtgtggataagaaatattcagcttgtgtctttttccttggagccatccttgtaataacagctacttttttgtatggttatgatcccaaacctgcaggaaatcccactaaagcatagttgtatactatctttaactggtttttcacgatggggcactaggaatctcgacattaatcttgcacagaggacttctacagagtctgagaagatatcatcatgctgaatctgatcatactgttttttaaaagtttaaggataagacatgtgtatatgtaacaaaacacattgcatctagaaatcaaaacttgaaagtatttccagggattaggattagaaggaatattagaggaaacttgaaatctgagtttaaaaagattttacctttttgattgctgcagaaatgtcctatgcactctttgcaagagcacacaacaaatgtcagataccaatttttgcaaattagatttaatcttattaaatgtttttatcttactctttctgtacagatatatcaaatcacatgaaatatttaaagtttgaaaattataattacctataaagctgtgaaaaatagaagtataatttgaaaaaacatttcacttatcagagatttttatatttatacaaaagattactaaatgaaggattgctaaatgtttttggttcaattacataaaaattaatattctgggtctgatctgtcagagaataaatatcaaatctaaatttaatgtagagatacatactatttctccatatgaattttaagatattttagtgcttcaagactgctgaaagcaatccagttgctcctgtgctagatggtagccagagaattttatagtaatggaggttagcccttaatctcttcattgcatttcatttctgtaaatcagattaagtccttaatattattttaaattaaaatttgtgtgtaattgccattaaattttcaaaatgtaatttaaaaggattaaatactcatttaataatttaaaataattattgtataatatctacatttggagaattttgaactatcaagcatatactgtatacagttagaaagttattaaatgaacattttactcattgatctgtaaaaacttctttaatctacaactgtttacaaaaacaacattcaaacaaatagtacagatgtcagtgacagaacaaaatgacttttcttggagacattccagattgccatattactttattttaaacagcgctatgactttaaatccaaggctgctcggaagatttttttaggtctctcataagcctattcttccctgatcacatgagtgggagaggtagccaaattttgaattccctttctgtgttcccacaagagctgctgagaaggcctggcgcagtggctcacgcctgtaatcctagcagtttgggaggctgaggcaggtggatcacaaggtcaagagattgagactatcctgaccaacatggtgaaaccccgtctctaccaaaaatacaaaaattagctgggtgtggtggcacgcacctgtagtcccagctactcgggagactgaggcaggagaatcacttgaacccgggaggcagaggttgcagtaagtggagatcacgccactgcactccaacctgggcgacacagtgagagtctgtctcaaaaaaaagaaaaaaaaaaaagctactgagaaggagccaccattttgctttaaaatagtgggtttttttcctttttaatgaacactggagctgaggatgcagattacatgagttatttaataagttgattcaagagagagagagtatattagaaatggtaagatgatttggtgggcaaaaatgctttctataatttgaatatgggtttaatttaattattaactatagacagaattacttactgagtataagaagtattttactgtctgggcacagtggctcatgcctgtaatcccagcactttgggaggccgaggcgggtggatcacaaggtcaggaattcgagaccagcctggccagcatggtgaaatcccatctctactaataatacaaaaattagctgggcatggtggtgcgcgcctgtagtcccagctactcaggaggctgaggcaggagaatttcttgaacacaccaggtggaagttgcagtgagccaagatcgtgccactgcaccccagcctgggtgacagagcgagactccgtctcaaaaaaaaaaaaaagaaaacacacacacacacacacacacccacagtatgaatgaaaaaaataaaatacttctttttttttttttttgagacagagtctcactttgtcgccaggctggagtgctgtggcgcgatctcggcttactgcaacctcccactccctggttcaagggattctcctgcctcagcctctgagtagctgggattgcaggcgtgagccactgcgcccggcctatactgtatatatttttaaagactgttctaatagatataaaaactgtaaaaaataagtatttttatatagctctcatggattttattaaacagaattggctcaaaaatactatgttacagactgttgggtacccttgcctaacgtgaactggcagtgttaccttgcttttgcagtaatagtctacagattgcaggtctcatcaattccatccaaagtttaaaagcatttaaaattaccaaatctttaaaatcactttggtggtgattccaaattggtaccaagcaaactttctggatgcccaacatgattttcagtaaccaccctttagagtatttgtttactaagttcaccacattttgaacatggtagttttagactgcaataatatttagacttacattattacttactgctaagtaaaatctaaatcctgcaaatgcacagaattcaagctgaaatataatgatttatgtttagctcacattgaagtattggttggttacttatgtattaatgcagtgtgcattcacatttaatcaggtttagtctgtttctattttaataattttaaaaaattatacaagcaaattagatattagacatgttagttacaatggtaacacatttttaggtgtcgaaacacaattttcaaaattcctaatgaaagttataaaaatgtaaacaagaattgtaaaaatggacaaagtagtcaaatatattttcaaagcacaattttattagacaggcataatttacattttgcttttctagtgggtttgaaaatgtttattggagattgggctatgtagtttataatttttaattcataaaaaagtaatcatacatgagaaggtagacctgtgccctaggatcatgtcacatatacagataatgccatttccttgtgtgtgtgatgtgtgttttgatgacctccacaggccttactgtatcaagcttttataatgatgactccttcattatttaaattcctatactttttatttgttatcacgcaactactttgttcaatgtgaaaatgtgctaactcatgggagaagagtgccaattgatagttcttttagcaattaagaatatggtatttgggaagaaaagtttgaaatgcaacaaatggatatttcaacacagtagtattatattatcagttctttagtaagtgattttagagatgttgtaggctacttttacggtggaatatatagtatagagatgcaaaacttaaatgtttacatcaatttatattgaatgtcacataatttcatggaaggaaaggtagcttgatatttagattctaagatataatctgaaaggaaactaattatgttctctacacttactgtaatactgattattcttacatatcaaattattgaactttaaaaatttcattgtatagtcattaaactgagttgggttttttcttaaagggtttagcatcactcatttgatttacacattcacattataatatttaattatcatgggtgtatgctttacataaaaaaggtttataaaagttatttatgctatattgaaagtcatcttaagaatctccaggttatttaaagtagttataggagcagagaacaagcacctttatcaaaatctggtcctatgtgccttgctttaccaaatacctgatttttctggagggtgttcctgtaattcacaactgtagacacatgggcaaaattaggatttttaagaataaatacatttctatttttttggttgtttcaacattagctcttcaaattcattaacaaaattaaaataggtatattacaaaagcataaacatttgtgaacagtacttaaataaattgtgatactattgctccatcattgaactttttgaaactttaacaattgtataaaactgtcagtttgttgtttcatttgtaattacaaaataatttaaaaactttttaaaataatttggatcctgactttgtctatatctgtatttcatttgtttagaaagattcttttgggtttgataatgtaatttgtatatttaaattttttatggacataattcaaaggaatgtataaattggtcttttgttaaatggctttttaattgataaa

SEQ ID NO: 29030 - DNA, 563 bp, Homo sapiens
  source 1..563: mol_type = unassigned DNA
agtgtgtgcctcagcgcctggtgcgtgcggagctagtgacgggtgggcccggctggggcccgtcattccttcagtgaacatcccatgagctctcgctcggtgttgagccctgtggtaggcacagatgcacccgaccagcacctggagctcaagaagccgcaggaacttaaagaaatggaaaggctgcccttgggtctcactgtcaccttggctggagtacagaggcgcaatctcagctcactgcaacttccacctccctggctcaagtgatctcccaccttagcctcccaagcaaatgaagataaaacaatgttcgccaacctaaaatacgtttccctgggaattttggtctttcagactaccagtttggttctaacaatgcgttattccagaactttaaaagaagaaggacctcgttatctatcttctacagcagtggttgttgctgaacttttgaagataatggcctgcattttattggtctacaaagacagcaaatgtagtctaagagcactgaatcgagtactacatgatgaaattcttaataaacctatggaaacact

SEQ ID NO: 29031 - DNA, 5218 bp, Homo sapiens
  source 1..5218: mol_type = unassigned DNA
aagcgaatgaagacggcagtgtgtgcctcagcgcctggtgcgtgcggagctagtgacgggtgggcccggctggggcccgtcattccttcagtgaacatcccatgagctctcgctcggtgttgagccctgtggtaggcacagatgcacccgaccagcacctggagctcaagaagccgcaggaacttaaagaaatggaaaggctgcccttggcaaatgaagataaaacaatgttcgccaacctaaaatacgtttccctgggaattttggtctttcagactaccagtttggttctaacaatgcgttattccagaactttaaaagaagaaggacctcgttatctatcttctacagcagtggttgttgctgaacttttgaagataatggcctgcattttattggtctacaaagacagcaaatgtagtctaagagcactgaatcgagtactacatgatgaaattcttaataaacctatggaaacacttaaacttgctattccatcagggatctatactcttcagaataatttactgtatgtggcactatcaaatctagatgcagctacttatcaggtcacgtatcagttaaaaattcttacaacagcattattttctgtgtctatgcttagtaaaaaattgggtgtataccagtggctgtccctagtaattttgatgacaggagttgcttttgtacagtggccctcagattctcagcttgattctaaggaactttcagctggttctcaatttgtaggactcatggcagttctcacagcatgtttttcaagtggctttgctggggtttactttgagaaaatcttaaaagaaacaaaacaatcagtgtggataagaaatattcagcttggtttctttggaagtatatttggattaatgggtgtatacatttatgatggagaactggtatcaaagaatggattttttcagggatataaccgactgacctggatagtagttgttcttcaggcacttggaggccttgtaatagctgctgttattaagtatgcagataatattttaaaaggatttgcaacctctttatcgataatattatcaacattgatctcctatttttggcttcaagattttgtgccaaccagtgtctttttccttggagccatccttgtaataacagctacttttttgtatggttatgatcccaaacctgcaggaaatcccactaaagcatagttgtatactatctttaactggtttttcacgatggggcactaggaatctcgacattaatcttgcacagaggacttctacagagtctgagaagatatcatcatgctgaatctgatcatactgttttttaaaagtttaaggataagacatgtgtatatgtaacaaaacacattgcatctagaaatcaaaacttgaaagtatttccagggattaggattagaaggaatattagaggaaacttgaaatctgagtttaaaaagattttacctttttgattgctgcagaaatgtcctatgcactctttgcaagagcacacaacaaatgtcagataccaatttttgcaaattagatttaatcttattaaatgtttttatcttactctttctgtacagatatatcaaatcacatgaaatatttaaagtttgaaaattataattacctataaagctgtgaaaaatagaagtataatttgaaaaaacatttcacttatcagagatttttatatttatacaaaagattactaaatgaaggattgctaaatgtttttggttcaattacataaaaattaatattctgggtctgatctgtcagagaataaatatcaaatctaaatttaatgtagagatacatactatttctccatatgaattttaagatattttagtgcttcaagactgctgaaagcaatccagttgctcctgtgctagatggtagccagagaattttatagtaatggaggttagcccttaatctcttcattgcatttcatttctgtaaatcagattaagtccttaatattattttaaattaaaatttgtgtgtaattgccattaaattttcaaaatgtaatttaaaaggattaaatactcatttaataatttaaaataattattgtataatatctacatttggagaattttgaactatcaagcatatactgtatacagttagaaagttattaaatgaacattttactcattgatctgtaaaaacttctttaatctacaactgtttacaaaaacaacattcaaacaaatagtacagatgtcagtgacagaacaaaatgacttttcttggagacattccagattgccatattactttattttaaacagcgctatgactttaaatccaaggctgctcggaagatttttttaggtctctcataagcctattcttccctgatcacatgagtgggagaggtagccaaattttgaattccctttctgtgttcccacaagagctgctgagaaggcctggcgcagtggctcacgcctgtaatcctagcagtttgggaggctgaggcaggtggatcacaaggtcaagagattgagactatcctgaccaacatggtgaaaccccgtctctaccaaaaatacaaaaattagctgggtgtggtggcacgcacctgtagtcccagctactcgggagactgaggcaggagaatcacttgaacccgggaggcagaggttgcagtaagtggagatcacgccactgcactccaacctgggcgacacagtgagagtctgtctcaaaaaaaagaaaaaaaaaaaagctactgagaaggagccaccattttgctttaaaatagtgggtttttttcctttttaatgaacactggagctgaggatgcagattacatgagttatttaataagttgattcaagagagagagagtatattagaaatggtaagatgatttggtgggcaaaaatgctttctataatttgaatatgggtttaatttaattattaactatagacagaattacttactgagtataagaagtattttactgcgtgagccactgcgcccggcctatactgtatatatttttaaagactgttctaatagatataaaaactgtaaaaaataagtatttttatatagctctcatggattttattaaacagaattggctcaaaaatactatgttacagactgttgggtacccttgcctaacgtgaactggcagtgttaccttgcttttgcagtaatagtctacagattgcaggtctcatcaattccatccaaagtttaaaagcatttaaaattaccaaatctttaaaatcactttggtggtgattccaaattggtaccaagcaaactttctggatgcccaacatgattttcagtaaccaccctttagagtatttgtttactaagttcaccacattttgaacatggtagttttagactgcaataatatttagacttacattattacttactgctaagtaaaatctaaatcctgcaaatgcacagaattcaagctgaaatataatgatttatgtttagctcacattgaagtattggttggttacttatgtattaatgcagtgtgcattcacatttaatcaggtttagtctgtttctattttaataattttaaaaaattatacaagcaaattagatattagacatgttagttacaatggtaacacatttttaggtgtcgaaacacaattttcaaaattcctaatgaaagttataaaaatgtaaacaagaattgtaaaaatggacaaagtagtcaaatatattttcaaagcacaattttattagacaggcataatttacattttgcttttctagtgggtttgaaaatgtttattggagattgggctatgtagtttataatttttaattcataaaaaagtaatcatacatgagaaggtagacctgtgccctaggatcatgtcacatatacagataatgccatttccttgtgtgtgtgatgtgtgttttgatgacctccacaggccttactgtatcaagcttttataatgatgactccttcattatttaaattcctatactttttatttgttatcacgcaactactttgttcaatgtgaaaatgtgctaactcatgggagaagagtgccaattgatagttcttttagcaattaagaatatggtatttgggaagaaaagtttgaaatgcaacaaatggatatttcaacacagtagtattatattatcagttctttagtaagtgattttagagatgttgtaggctacttttacggtggaatatatagtatagagatgcaaaacttaaatgtttacatcaatttatattgaatgtcacataatttcatggaaggaaaggtagcttgatatttagattctaagatataatctgaaaggaaactaattatgttctctacacttactgtaatactgattattcttacatatcaaattattgaactttaaaaatttcattgtatagtcattaaactgagttgggttttttcttaaagggtttagcatcactcatttgatttacacattcacattataatatttaattatcatgggtgtatgctttacataaaaaaggtttataaaagttatttatgctatattgaaagtcatcttaagaatctccaggttatttaaagtagttataggagcagagaacaagcacctttatcaaaatctggtcctatgtgccttgctttaccaaatacctgatttttctggagggtgttcctgtaattcacaactgtagacacatgggcaaaattaggatttttaagaataaatacatttctatttttttggttgtttcaacattagctcttcaaattcattaacaaaattaaaataggtatattacaaaagcataaacatttgtgaacagtacttaaataaattgtgatactattgctccatcattgaactttttgaaactttaacaattgtataaaactgtcagtttgttgtttcatttgtaattacaaaataatttaaaaactttttaaaataatttggatcctgactttgtctatatctgtatttcatttgtttagaaagattcttttgggtttgataatgtaatttgtatatttaaattttttatggacataattcaaaggaatgtataaattggtcttttgttaaatggctttttaattgataaacttctcttgtcattttttggtatccagctattacctatttaatagatttattgaaatagattattttcataaagaactctatacaaa

SEQ ID NO: 29032 - DNA, 1606 bp, Homo sapiens
  source 1..1606: mol_type = unassigned DNA
atgcagctcctatgaggcccctgccgccggtcggcgatgtccggctggagctgtcgcctccgccgccgctgctgccggtgccggttgtgagcgggtctccagtcggctcctctgggcgtctcatggcctctagcagctccctggtgcccgaccggctgcgcctgccgctctgcttcctgggtgtctttgtctgctatttttactatgggatcctgcaggaaaagataacaagaggaaagtatggggaaggagccaagcaggagacgttcacctttgccttaactttggtcttcattcaatgtgtgatcaatgctgtgtttgccaagatcttgatccagttttttgacactgccagggtggatcgtacccggagctggctctatgctgcctgttctatctcctatctgggtgccatggtctccagcaattcagcactacagtttgtcaactacccaactcaggtccttggtaaatcctgcaagccaatcccagtcatgctccttggggtgaccctcttgaagaagaagtacccgttggccaagtacctgtgtgtgctgttaattgtggctggagtggcccttttcatgtacaaacccaagaaagttgttgggatagaagaacacacagtcggctatggagagctactcttgctattatcgctgaccctggatggactgactggtgtttcccaggaccacatgcgggctcattaccaaacaggctccaaccacatgatgctgaacatcaacctttggtcgacattgctgctgggaatgggaatcctgttcactggggagctctgggagttcttgagctttgctgaaaggtaccctgccatcatctataacatcctgctctttgggctgaccagtgccctgggtcagagcttcatctttatgacggttgtgtattttggtcccctgacctgctccatcatcactacaactcgaaagttcttcacaattttggcctctgtgatcctcttcgccaatcccatcagccccatgcagtgggtgggcactgtgcttgtgttcctgggtcttggtcttgatgccaagtttgggaaaggagctaagaagacatcccactaggaagagagagactacctccacatcaagaatatttaagttattatctcaaacagtgacatctcttgggaaaatggacttaataggaatatgggactgagttccagtcttttttaataaaataaaatcaagcaaaatcacatattctaaaaaatgcacttggattttaacaagacagagtggtggtttttgttcttcatgccctggagcagtctatggtaaataaaagagggagggaagaggcagagctggatgttcattacccaggctgctcctctcacgggtgtggttagcatggttgagtgggcgattcctccaagaacctgaggattatagggaggaactctgtgagatcgcagaattgtgctaatggcttctgttccgatgggtgaggcttgtcccgttagagctggtcccattagaggacgggtggctgtccattagagccagagaatgtaaaagtcacttcctctcctaaagctcctgtgggcaaatatttcattaaaaaaacaaagttg

SEQ ID NO: 29033 - DNA, 1150 bp, Homo sapiens
  source 1..1150: mol_type = unassigned DNA
cctcagagttgcctgattggaaaaatctccagggcgagggatcagtctcgaggctgccggttcccctggccctcagggatggagccaaggacccgagtcggcccccttttggtactcccagatgcttgcaaacaacctattcgtcctcggccttggtgccatagccgaaataccgtctcctcctgcctgggaacaagaggaaagtatggggaaggagccaagcaggagacgttcacctttgccttaactttggtcttcattcaatgtgtgatcaatgctgtgtttgccaagatctggtggatcgtacccggagctggctctatgctgcctgttctatctcctatctgggtgccatggtctccagcaattcagcactacagtttgtcaactacccaactcaggtccttggtaaatcctgcaagccaatcccagtcatgctccttggggtgaccctcttgaagaagaagtacccgttggccaagtacctgtgtgtgctgttaattgtggctggagtggcccttttcatgtacaaacccaagaaagttgttgggatagaagaacacacagtcggctatggagagctactcttgctattatcgctgaccctggatggactgactggtgtttcccaggaccacatgcgggctcattaccaaacaggctccaaccacatgatgctgaacatcaacctttggtcgacattgctgctgggaatgggaatcctgttcactggggagctctgggagttcttgagctttgctgaaaggtaccctgccatcatctataacatcctgctctttgggctgaccagtgccctgggtcagagcttcatctttatgacggttgtgtattttggtcccctgacctgctccatcatcactacaactcgaaagttcttcacaattttggcctctgtgatcctcttcgccaatcccatcagccccatgcagtgggtgggcactgtgcttgtgttcctgggtcttggtcttgatgccaagtttgggaaaggagctaagaagacatcccactaggaagagagagactacctccacatcaagaatatttaagttattatctcaaacagtgacatctcttgggaaaatggacttaataggaatatgggactgagttccagtcttttttaataaaa

SEQ ID NO: 29034 - DNA, 1587 bp, Homo sapiens
  source 1..1587: mol_type = unassigned DNA
agctcctatgaggcccctgccgccggtcggcgatgtccggctggagctgtcgcctccgccgccgctgctgccggtgccggttgtgagcgggtctccagtcggctcctctgggcgtctcatggcctctagcagctccctggtgcccgaccggctgcgcctgccgctctgcttcctgggtgtctttgtctgctatttttactatgggatcctgcaggaaaagataacaagaggaaagtatggggaaggagccaagcaggagacgttcacctttgccttaactttggtcttcattcaatgtgtgatcaatgctgtgtttgccaagatcttgatccagttttttgacactgccagggtggatcgtacccggagctggctctatgctgcctgttctatctcctatctgggtgccatggtctccagcaattcagcactacagtttgtcaactacccaactcaggtccttggtaaatcctgcaagccaatcccagtcatgctccttggggtgaccctcttgaagaagaagtacccgttggccaagtacctgtgtgtgctgttaattgtggctggagtggcccttttcatgtacaaacccaagaaagttgttgggatagaagaacacacagtcggctatggagagctactcttgctattatcgctgaccctggatggactgactggtgtttcccaggaccacatgcgggctcattaccaaacaggctccaaccacatgatgctgaacatcaacctttggtcgacattgctgctgggaatgggaatcctgttcactggggagctctgggagttcttgagctttgctgaaaggtaccctgccatcatctataacatcctgctctttgggctgaccagtgccctgggtcagagcttcatctttatgacggttgtgtattttggtcccctgacctgctccatcatcactacaactcgaaagttcttcacaattttggcctctgtgatcctcttcgccaatcccatcagccccatgcagtgggtgggcactgtgcttgtgttcctgggtcttggtcttgatgccaagtttgggaaaggagctaagaagacatcccactaggaagagagagactacctccacatcaagaatatttaagttattatctcaaacagtgacatctcttgggaaaatggacttaataggaatatgggactgagttccagtcttttttaataaaataaaatcaagcaaaatcacatattctaaaaaatgcacttggattttaacaagacagagtggtggtttttgttcttcatgccctggagcagtctatggtaaataaaagagggagggaagaggcagagctggatgttcattacccaggctgctcctctcacgggtgtggttagcatggttgagtgggcgattcctccaagaacctgaggattatagggaggaactctgtgagatcgcagaattgtgctaatggcttctgttccgatgggtgaggcttgtcccgttagagctggtcccattagaggacgggtggctgtccattagagccagagaatgtaaaagtcacttcctctcctaaagctcctgtgggcaaatatttcatt

SEQ ID NO: 29035 - DNA, 910 bp, Homo sapiens
  source 1..910: mol_type = unassigned DNA
gatgtccggctggagctgtcgcctccgccgccgctgctgccggtgccggttgtgagcgggtctccagtcggctcctctgggcgtctcatggcctctagcagctccctggtgcccgaccggctgcgcctgccgctctgcttcctgggtgtctttgtctgctatttttactatgggatcctgcaggaaaagataacaagaggaaagtatggggaaggagccaagcaggagacgttcacctttgccttaactttggtcttcattcaatgtgtgatcaatgctgtgtttgccaagatcttgatccagttttttgacactgccagggtggatcgtacccggagctggctctatgctgcctgttctatctcctatctgggtgccatggtctccagcaattcagcactacagtttgtcaactacccaactcaggtccttggtaaatcctgcaagccaatcccagtcatgctccttggggtgaccctcttgaagaagaagtacccgttggccaagtacctgtgtgtgctgttaattgtggctggagtggcccttttcatgtacaaacccaagaaagttgttgggatagaagaacacacagtcggctatggagagctactcttgctattatcgctgaccctggatggactgactggtgtttcccaggaccacatgcgggctcattaccaaacaggctccaaccacatgatgctgaacatcaacctttggtcgacattgctgctgggaatgggtgagagccagttctgctgttcttcccatgtatcaccagagggcaggctgccctcatccttttgatccctctagctgttagttgcccagaccaagggcctgaattagttccaagatgcccttttgttcaagcccttgagaaaccttcctggaaaaacctgcaccagca

SEQ ID NO: 29036 - DNA, 1477 bp, Homo sapiens
  source 1..1477: mol_type = unassigned DNA
gtcctcagagttgcctgattggaaaaatctccagggcgagggatcagtctcgaggctgccggttcccctggccctcagggatggagccaaggacccgagtcggcccccttttggtactcccagatgcttgcaaacaacctattcgtcctcggccttggtgccatagccgaaataccgtctcctcctgcctgggaacaagaggaaagtatggggaaggagccaagcaggagacgttcacctttgccttaactttggtcttcattcaatgtgtgatcaatgctgtgtttgccaagatctggtggatcgtacccggagctggctctatgctgcctgttctatctcctatctgggtgccatggtctccagcaattcagcactacagtttgtcaactacccaactcaggtgaaacctcagggtgggatgatggttggctcagatatcatttgaaaaggactaagagttcttccctcaggtctgtgagttaaaaaaaaaaaaaaaaaaaagataacggtcctgtaagacattgggagtgtatagaaccatagaacttacgtttagtggtggtgggttgggccatgatagggctgctttctgaggctgaggtctctggtgcaggccctgtgcttactcatcttaatcagtgcggtacctagcatagtacctgacacatcacagatgctcagaaattatttgctggatttaatttcaggtccttggtaaatcctgcaagccaatcccagtcatgctccttggggtgaccctcttgaagaagaagtacccgttggccaagtacctgtgtgtgctgttaattgtggctggagtggcccttttcatgtacaaacccaagaaagttgttgggatagaagaacacacagtcggctatggagagctactcttgctattatcgctgaccctggatggactgactggtgtttcccaggaccacatgcgggctcattaccaaacaggctccaaccacatgatgctgaacatcaacctttggtcgacattgctgctgggaatgggaatcctgttcactggggagctctgggagttcttgagctttgctgaaaggtaccctgccatcatctataacatcctgctctttgggctgaccagtgccctgggtcagagcttcatctttatgacggttgtgtattttggtcccctgacctgctccatcatcactacaactcgaaagttcttcacaattttggcctctgtgatcctcttcgccaatcccatcagccccatgcagtgggtgggcactgtgcttgtgttcctgggtcttggtcttgatgccaagtttgggaaaggagctaagaagacatcccactaggaagagagagactacctccacatcaagaatatttaagttattatctcaaacagtgacatctcttgggaaaatggacttaataggaatatgggactgagttccagtcttttttaataaaataaaatcaagcaaaatca

SEQ ID NO: 29037 - DNA, 2424 bp, Homo sapiens
  source 1..2424: mol_type = unassigned DNA
ctttgtctgctatttttactatgggatcctgcaggaaaagatgtgagcgaccccgggggcgggccgacagtctctccccagcctgtgacagggatcccgggccttctgcctctggacccgggctttcctcttgtcctcctgcccggctgtcgccctcttagcaccctactacttttgcagctatggctgagcctacccagaattccagaactccaggattattttctggattcttcggacttggttattttcttttcttagctgtttttccccgcttggttctaagggcctgcgttttacaggctgagacttctattcctcaaacaggacccgagtcggcccccttttggtactcccagatgcttgcaaacaacctattcgtcctcggccttggtgccatagccgaaataccgtctcctcctgcctgggaacaagaggaaagtatggggaaggagccaagcaggagacgttcacctttgccttaactttggtcttcattcaatgtgtgatcaatgctgtgtttgccaagatctggtggatcgtacccggagctggctctatgctgcctgttctatctcctatctgggtgccatggtctccagcaattcagcactacagtttgtcaactacccaactcaggtgaaacctcagggtgggatgatggttggctcagatatcatttgaaaaggactaagagttcttccctcaggtctgtgagttaaaaaaaaaaaaaaaaaaaagataacggtcctgtaagacattgggagtgtatagaaccatagaacttacgtttagtggtggtgggttgggccatgatagggctgctttctgaggctgaggtctctggtgcaggccctgtgcttactcatcttaatcagtgcggtacctagcatagtacctgacacatcacagatgctcagaaattatttgctggatttaatttcaggtccttggtaaatcctgcaagccaatcccaggtaagcaaagaagatggtcttcctcttctgtcgtcactcttcctatagtaagctctctctctgctacaactgtgtccctctcggcttcatcatcccatcatggctgtctccagggactttcccccagctctccctgctgcccatcctgtcatctgtgtcacttcttgtgatgttcataggctggtaatccttaataggagctaaaggctgacctagcctgcttcacttggtcagccatttctgtgttgcatgtgtttatattgtcattagacaacttaattcccattttgatcatcagtttctttatctcaacttcttttccttctccactgttccctacccttgtcctgtcccttcctggacttttcacctttgttctctacctcctccctgtcttatacttaaccctgttgctcaatccttatctaggtgccagcctggcaccctccttttgtcctctctaagccttccttctcagtcattcttttctccctgagtcttttcttggttcctgggagggagggcattggggtcatcaataccttatggatgcctgaattttccactctgttttttccctgtagtcatgctccttggggtgaccctcttgaagaagaagtacccgttggccaagtacctgtgtgtgctgttaattgtggctggagtggcccttttcatgtacaaacccaagaaagttgttgggatagaagaacacacagtcggctatggagagctactcttgctattatcgctgaccctggatggactgactggtgtttcccaggaccacatgcgggctcattaccaaacaggctccaaccacatgatgctgaacatcaacctttggtcgacattgctgctgggaatgggaatcctgttcactggggagctctgggagttcttgagctttgctgaaaggtaccctgccatcatctataacatcctgctctttgggctgaccagtgccctgggtcagagcttcatctttatgacggttgtgtattttggtcccctgacctgctccatcatcactacaactcgaaagttcttcacaattttggcctctgtgatcctcttcgccaatcccatcagccccatgcagtgggtgggcactgtgcttgtgttcctggcgatggggtcttgctgtgttgcctaggctggccttaaactcctgggctcaaatgatcctcctgcctcagtctcccaaaatgctgggattgcaggtcttggtcttgatgccaagtttgggaaaggagctaagaagacatcccactaggaagagagagactacctccacatcaagaatatttaagttattatctcaaacagtgacatctcttgggaaaatggacttaataggaatatgggactgagttccagtcttttttaataaaataaaatcaagcaaaatcacatattctaaaaaatgcacttggattttaacaag

SEQ ID NO: 29038 - DNA, 1315 bp, Homo sapiens
  source 1..1315: mol_type = unassigned DNA
aggcgggaagagcgcggcacttccgctggccgctggctcgctggccgctcctggaggcggcggcgggagcgcagggggcgcgcggcccggggactcgcattccccggttccccctccaccccacgcggcctggaccatggacgccagatggtgggcagtggtggtgctggctgcgttcccctccctaggggcaggtggggagactcccgaagcccctccggagtcatggacccagctatggttcttccgatttgtggtgaatgctgctggctatgccagctttatggtacctggctacctcctggtgcagtacttcaggcggaagaactacctggagaccggtaggggcctctgctttcccctggtgaaagcttgtgtgtttggcaatgagcccaaggcctctgatgaggttcccctggcgccccgaacagaggcggcagagaccaccccgatgtggcaggccctgaagctgctcttctgtgccacagggctccaggtgtcttatctgacttggggtgtgctgcaggaaagagtgatgacccgcagctatggggccacagccacatcaccgggtgagcgctttacggactcgcagttcctggtgctaatgaaccgagtgctggcactgattgtggctggcctctcctgtgttctctgcaagcagccccggcatggggcacccatgtaccggtactcctttgccagcctgtccaatgtgcttagcagctggtgccaatacgaagctcttaagttcgtcagcttccccacccaggtgctggccaaggcctctaaggtgatccctgtcatgctgatgggaaagcttgtgtctcggcgcagctacgaacactgggagtacctgacagccaccctcatctccattggggtcagcatgtttctgctatccagcggaccagagccccgcagctccccagccaccacactctcaggcctcttcacagtgggctcactgctagaacagggggccctactggagggaacccgcttcatggggcgacacagtgagtttgctgcccatgccctgctactctccatctgctccgcatgtggccagctcttcatcttttacaccattgggcagtttggggctgccgtcttcaccatcatcatgaccctccgccaggcctttgccatccttctttcctgccttctctatggccacactgtcactgtggtgggagggctgggggtggctgtggtctttgctgccctcctgctcagagtctacgcgcggggccgtctaaagcaacggggaaagaaggctgtgcctgttgagtctcctgtgcagaaggtttga

SEQ ID NO: 29039 - DNA, 2043 bp, Homo sapiens
  source 1..2043: mol_type = unassigned DNA
ggggagggaggcgggaagagcgcggcacttccgctggccgctggctcgctggccgctcctggaggcggcggcgggagcgcagggggcgcgcggcccggggactcgcattccccggttccccctccaccccacgcggcctggaccatggacgccagatggtgggcagtggtggtgctggctgcgttcccctccctaggggcaggtggggagactcccgaagcccctccggagtcatggacccagctatggttcttccgatttgtggtgaatgctgctggctatgccagctttatggtacctggctacctcctggtgcagtacttcaggcggaagaactacctggagaccggtaggggcctctgctttcccctggtgaaagcttgtgtgtttggcaatgagcccaaggcctctgatgaggttcccctggcgccccgaacagaggcggcagagaccaccccgatgtggcaggccctgaagctgctcttctgtgccacagggctccaggtgtcttatctgacttggggtgtgctgcaggaaagagtgatgacccgcagctatggggccacagccacatcaccgggtgagcgctttacggactcgcagttcctggtgctaatgaaccgagtgctggcactgattgtggctggcctctcctgtgttctctgcaagcagccccggcatggggcacccatgtaccggtactcctttgccagcctgtccaatgtgcttagcagctggtgccaatacgaagctcttaagttcgtcagcttccccacccaggtgctggccaaggcctctaaggtgatccctgtcatgctgatgggaaagcttgtgtctcggcgcagctacgaacactgggagtacctgacagccaccctcatctccattggggtcagcatgtttctgctatccagcggaccagagccccgcagctccccagccaccacactctcaggcctcatcttactggcaggttatattgcttttgacagcttcacctcaaactggcaggatgccctgtttgcctataagatgtcatcggtgcagatgatgtttggggtcaatttcttctcctgcctcttcacagtgggctcactgctagaacagggggccctactggagggaacccgcttcatggggcgacacagtgagtttgctgcccatgccctgctactctccatctgctccgcatgtggccagctcttcatcttttacaccattgggcagtttggggctgccgtcttcaccatcatcatgaccctccgccaggcctttgccatccttctttcctgccttctctatggccacactgtcactgtggtgggagggctgggggtggctgtggtctttgctgccctcctgctcagagtctacgcgcggggccgtctaaagcaacggggaaagaaggctgtgcctgttgagtctcctgtgcagaaggtttgagggtggaaagggcctgaggggtgaagtgaaataggaccctcccaccatccccttctgctgtaacctctgagggagctggctgaaagggcaaaatgcaggtgttttctcagtatcacagaccagctctgcagcaggggattggggagcccaggaggcagccttcccttttgccttaagtcacccatcttccagtaagcagtttattctgagccccgggggtagacagtcctcagtgaggggttttggggagtttggggtcaagagagcataggtaggttccagttactcttcccacaagttcccttaagtcttgccctagctgtgctctgccaccttccagactcactcccctctgcaaatacctgcatttcttaccctggtgagaaaagcacaagcggtgtaggctccaatgctgctttcccaggagggtgaagatggtgctgtgctgaggaaaggggatgcagagccctgcccagcaccaccacctcctatgctcctggatccctaggctctgttccatgagcctgttgcaggttttggtactttagaaatgtaactttttgctcttataattttattttattaaattaaattactgca

SEQ ID NO: 29040 - DNA, 1434 bp, Homo sapiens
  source 1..1434: mol_type = unassigned DNA
agagcgcggcacttccgctggccgctggctcgctggccgctcctggaggcggcggcgggagcgcagggggcgcgcggcccggggactcgcattccccggttccccctccaccccacgcggcctggaccatggacgccaggtgtcttatctgacttggggtgtgctgcaggaaagagtgatgacccgcagctatggggccacagccacatcaccgggtgagcgctttacggactcgcagttcctggtgctaatgaaccgagtgctggcactgattgtggctggcctctcctgtgttctctgcaagcagccccggcatggggcacccatgtaccggtactcctttgccagcctgtccaatgtgcttagcagctggtgccaatacgaagctcttaagttcgtcagcttccccacccaggtgctggccaaggcctctaaggtgatccctgtcatgctgatgggaaagcttgtgtctcggcgcagctacgaacactgggagtacctgacagccaccctcatctccattggggtcagcatgtttctgctatccagcggaccagagccccgcagctccccagccaccacactctcaggcctcatcttactggcaggttatattgcttttgacagcttcacctcaaactggcaggatgccctgtttgcctataagatgtcatcggtgcagatgatgtttggggtcaatttcttctcctgcctcttcacagtgggctcactgctagaacagggggccctactggagggaacccgcttcatggggcgacacagtgagtttgctgcccatgccctgctactctccatctgctccgcatgtggccagctcttcatcttttacaccattgggcagtttggggctgccgtcttcaccatcatcatgaccctccgccaggcctttgccatccttctttcctgccttctctatggccacactgtcactgtggtgggagggctgggggtggctgtggtctttgctgccctcctgctcagagtctacgcgcggggccgtctaaagcaacggggaaagaaggctgtgcctgttgagtctcctgtgcagaaggtttgagggtggaaagggcctgaggggtgaagtgaaataggaccctcccaccatccccttctgctgtaacctctgagggagctggctgaaagggcaaaatgcaggtgttttctcagtatcacagaccagctctgcagcaggggattggggagcccaggaggcagccttcccttttgccttaagtcacccatcttccagtaagcagtttattctgagccccgggggtagacagtcctcagtgaggggttttggggagtttggggtcaagagagcataggtaggttccagttactcttcccacaagttcccttaagtcttgccctagctgtgctctgccaccttccagactcactcccctctgc

SEQ ID NO: 29041 - DNA, 1498 bp, Homo sapiens
  source 1..1498: mol_type = unassigned DNA
acttccgctggccgctggctcgctggccgctcctggaggcggcggcgggagcgcagggggcgcgcggcccggggactcgcattccccggttccccctccaccccacgcggcctggaccatggacgccagatggtgggcagtggtggtgctggctgcgttcccctccctaggggcaggtggggagactcccgaagcccctccggagtcatggacccagctatggttcttccgatttgtggtgaatgctgctggctatgccagctttatggtacctggctacctcctggtgcagtacttcaggcggaagaactacctggagaccggtgtcttatctgacttggggtgtgctgcaggaaagagtgatgacccgcagctatggggccacagccacatcaccgggtgagcgctttacggactcgcagttcctggtgctaatgaaccgagtgctggcactgattgtggctggcctctcctgtgttctctgcaagcagccccggcatggggcacccatgtaccggtactcctttgccagcctgtccaatgtgcttagcagctggtgccaatacgaagctcttaagttcgtcagcttccccacccaggtgctggccaaggcctctaaggtgatccctgtcatgctgatgggaaagcttgtgtctcggcgcagctacgaacactgggagtacctgacagccaccctcatctccattggggtcagcatgtttctgctatccagcggaccagagccccgcagctccccagccaccacactctcaggcctcatcttactggcaggttatattgcttttgacagcttcacctcaaactggcaggatgccctgtttgcctataagatgtcatcggtgcagatgatgtttggggtcaatttcttctcctgcctcttcacagtgggctcactgctagaacagggggccctactggagggaacccgcttcatggggcgacacagtgagtttgctgcccatgccctgctactctccatctgctccgcatgtggccagctcttcatcttttacaccattgggcagtttggggctgccgtcttcaccatcatcatgaccctccgccaggcctttgccatccttctttcctgccttctctatggccacactgtcactgtggtgggagggctgggggtggctgtggtctttgctgccctcctgctcagagtctacgcgcggggccgtctaaagcaacggggaaagaaggctgtgcctgttgagtctcctgtgcagaaggtttgagggtggaaagggcctgaggggtgaagtgaaataggaccctcccaccatccccttctgctgtaacctctgagggagctggctgaaagggcaaaatgcaggtgttttctcagtatcacagaccagctctgcagcaggggattggggagcccaggaggcagccttcccttttgccttaagtcacccatcttccagtaagcagtttattctgagccccgggggtagacagtcctcagtga

SEQ ID NO: 29042 - DNA, 1018 bp, Homo sapiens
  source 1..1018: mol_type = unassigned DNA
gcacgcgcgcagggacacataggcggaagtggcctgcgggcgccggagttgagagtgctttccggggaggcgaccgccgcggtggaaagtgcaggagtgggcgaggaggaggaggaagaggaggccatgattgattccggagcgcagttaatcaaggcataatggcatggacttgacacagcaagcaaaagacatacagaacataacagtccaggaaaccaacaaaaataactctgaaagcattgaatgcagcaaaataacaatggatctcaagttcaacaattccaggaaatatatttctatcactgtgccatccaaaacccaaacaatgtcaccacacatcaagtcagttgacgacgttgtggtacttggcatgaatctcagcaagtttaacaaacttactcagtttttcatatgtgttgctggagtttttgtattttacctaatttatgggtatttacaggaattaatattttcagtggagggttttaagtcctgtggctggtaccttaccttagtgcagtttgccttttactccatatttggcctaatagaacttcagcttattcaggacaaaaggaggagaataccaggaaaaacctacatgataatagcttttctaactgtgggtactatggggttatcaaacacttccttgggctacctgaattaccctacccaagtcatcttcaagtgctgcaaattgattcctgttatgctaggaggagtttttattcaaggaaagcgttataatgttgcagatgtgtctgctgccatatgtatgagccttggcctgatatggtttaccctcgctgacagcacaactgcaccaaatttcaacctgacgggtgtggtgcttatttccctggcactatgtgcagatgccgtcattggaaatgttcaagagaaagctatgaaacttcataatgcttctaattctgaaatgaatattactaccagtagttattctggggtgtttatattcccaaataaactaaaaatcccattggtattgtga

SEQ ID NO: 29043 - DNA, 2137 bp, Homo sapiens
  source 1..2137: mol_type = unassigned DNA
gcggtggaaagtgcaggagtgggcgaggaggaggaggaagaggaggtgatggcgacggaccaggggagggggagatgctccgtctagctcagacgccacgcaggctgccgtcacccttccgggtgacataccggccttggggtacgcgtgccttcggggcctttcctgtgtttgggacccagatctcctctcctccagaaaaccttgacactgcccatcttcctcatccagaaggagcgttcgaggaatggatgaggtcgggatggaagaaacgggtgattcccttttttgaaagagcggaaaccggccgggcggtttccagggaggagcatctgttcctcctcgcccgtttttcgccctcgggctggcgagaactccctcaggtcccaatccgtggactcgcaggggccatgattgattccggagcgcagttaatcaaggcataatggcatggacttgacacagcaagcaaaagacatacagaacataacagtccaggaaaccaacaaaaataactctgaaagcattgaatgcagcaaaataacaatggatctcaagttcaacaattccaggaaatatatttctatcactgtgccatccaaaacccaaacaatgtcaccacacatcaagtcagttgacgacgttgtggtacttggcatgaatctcagcaagtttaacaaacttactcagtttttcatatgtgttgctggagtttttgtattttacctaatttatgggtatttacaggaattaatattttcagtggagggttttaagtcctgtggctggtaccttaccttagtgcagtttgccttttactccatatttggcctaatagaacttcagcttattcaggacaaaaggaggagaataccaggaaaaacctacatgataatagcttttctaactgtgggtactatggggttatcaaacacttccttgggctacctgaattaccctacccaagtcatcttcaagtgctgcaaattgattcctgttatgctaggaggagtttttattcaaggaaagcgttataatgttgcagatgtgtctgctgccatatgtatgagccttggcctgatatggtttaccctcgctgacagcacaactgcaccaaatttcaacctgacgggtgtggtgcttatttccctggcactatgtgcagatgccgtcattggaaatgttcaagagaaagctatgaaacttcataatgcttctaattctgaaatggtattgtattcgtattcaattggttttgtatacattttactgggattgacatgcactagtggattaggccctgcagtaacattttgtgcaaagaatccagttcggacctatggttatgcgttccttttttccctcactggatattttggaatctcctttgttctggctttgattaaaatttttggtgcacttattgctgtaacagtgacaacaggaagaaaagcaatgaccattgtactttcgtttatattctttgctaaaccattcacgtttcagtatgtatggtctggtttgttagttgtccttggtatatttcttaatgtttacagcaaaaatatggataaaataagactaccatcactgtatgatttgataaacaaatcagtggaagcaagaaagtcaaggacgctggcacagactgtatagacagtgattgtcctatttaaaatagaattttaagggaacaatcatcaattaattaactttccaaagggactgataaaaaccaaaggatctggaggcattgctatcccatttgtggacagatttcatatgaagttgttttgcggtgtcagccttttcttcagagcatttgtttgactgacttccaaagcaatcaagagagccacgtctagcagactttacaataaaatgtcaatatgaaggactgtaattcctagcagtttattgagaatttcactggaaatggaccatgtgttgcaagactaattggctataattatatcctatcaaagaaatcgatacgtaatagcagattgttttatattcattccattttgatggtgttatttaaattgattctctgttataagagtaaactgatgagttgaagtctggagagaataacattcattataaataaaattattctgtgatcttttttcaa

SEQ ID NO: 29044 - DNA, 1351 bp, Homo sapiens
  source 1..1351: mol_type = unassigned DNA
ataggcggaagtggcctgcgggcgccggagttgagagtgctttccggggaggcgaccgccgcggtggaaagtgcaggagtgggcgaggaggaggaggaagaggaggtgatggcgacggaccaggggagggggagatgctccgtctagctcagacgccacgcaggctgccgtcacccttccgggtgacataccggccttggggtacgcgtgccttcggggcctttcctgtgtttgggacccagatctcctctcctccagaaaaccttgacactgcccatcttcctcatccagaaggagcgttcgaggaatggatgaggtcgggatggaagaaacgggacttgacacagcaagcaaaagacatacagaacataacagtccaggaaaccaacaaaaataactctgaaagcattgaatgcagcaaaataacaatggatctcaagttcaacaattccaggaaatatatttctatcactgtgccatccaaaacccaaacaatgtcaccacacatcaagtcagttgacgacgttgtggtacttggcatgaatctcagcaagtttaacaaacttactcagtttttcatatgtgttgctggagtttttgtattttacctaatttatgggtatttacaggaattaatattttcagtggagggttttaagtcctgtggctggtaccttaccttagtgcagtttgccttttactccatatttggcctaatagaacttcagcttattcaggacaaaaggaggaggtatgtggtttgtttttattttttgatatttctatattagttgaatttttttggcatactgaatatgcatgaaatttatacttctattaacaaaacatgtgataggcacgaactcttagtgtaactaacttaatactaaatacattttattcatttatacactgaaaaaaataaagtcttaaatgcagtattacaaaataaaaaaatattagctttaggctcaacttagtgttatatgttcttacaacatgataaaaaacacaatgtacatacttgatttgtataaattctgctgaaataggtgcagttactgatttgtagtacaactaacatcacagtggtgaaatgaaatatcagtacaggttgagcatcctaatccaaaaatcctaaatccagaaatgctccaaaattagaaaagttttgagtgccaatgtgacacaagtggaaacttccaaacataagtacttaacacaaattttgttttgtgcacaaaatgatataaaatgtgcaccatgaccagctctgggacagctgggatgcagggcaccaagttcttaagctgcacacagcatagtgaccttgggtgcagcccacaaaacc

SEQ ID NO: 29045 - DNA, 6797 bp, Homo sapiens
  source 1..6797: mol_type = unassigned DNA
cggaagcgggaacgtcgcatcctgaggtaaaggtgcacggcatcctgggacatgtagtctggccggggctcggacgccccctcggatgaatgggaccgaagctgactgcgaactacagcttcttggcagcgtcggtgttggccgcgggagaaggggagaccgcggcggcccccagtgagagcggctttccaggacggtgcgatgtgctgcgcagcgaagaggcaggaggccggcttcctggggtagcggtacaggcgggcgcttactctgtgcgcttgcttccccaaccctgcaccggccatgcgcccggccttggcggtgggcctggtgttcgcaggctgctgcagtaacgtgatcttcctagagctcctggcccggaagcatccaggatgtgggaacattgtgacatttgcacaatttttatttattgctgtggaaggcttcctctttgaagctgatttgggaaggaagccaccagctatcccaataaggtactatgccataatggtgaccatgttcttcaccgtgagcgtggtgaacaactatgccctgaatctcaacattgccatgcccctgcatatgatatttagatccggttctctaattgccaacatgattctaggaattatcattttgaagaaaagatacagtatattcaaatatacctccattgccctggtgtctgtggggatatttatttgcacttttatgtcagcaaagcaggtgacttcccagtccagcttgagtgagaatgatggattccaggcatttgtgtggtggttactaggtattggggcattgacttttgctcttctgatgtcagcaaggatggggatattccaagagactctctacaaacgatttgggaaacactccaaggaggctttgttttataatcacgcccttccacttccgggtttcgtcttcttggcttctgatatttatgaccatgcagttctattcaataagtctgagttatatgaaattcccgtcatcggagtgaccctgcccatcatgtggttctacctcctcatgaacatcatcactcagtacgtgtgcatccggggtgtgtttatcctcaccacagaatgcgcctccctcaccgtcacgctcgtcgtgaccctacgcaaatttgtgagcctcatcttttccatcttgtacttccagaaccccttcaccctgtggcactggctgggcaccttgtttgtcttcattgggaccttaatgtacacagaggtgtggaacaacctagggaccacaaaaagtgagcctcagaaggacagcaagaagaactgaggcctgtctggagtacgtagaccagtgtcgtcgtgagggtgggaccctgtgaaggtctgaccaccgtttcgcttttgttaatgccgagctacccgcagtgctgagccagccgtgcaaaaggaaatcttcaggaggggacttctcacgttgctcagactgacacatgtagactaaatagaaacccctcagccctaaaatagaaaaaagaacagttctggactattgaacagcccattcatttatttctgttttgtttaccgacatattcagtattattcttgttttctgaattctgagtctcctgaacaaaaggcttactatccatggtcttggaaaagattgtcccttctcttgctgttgtaatgcatctctgctacagcagtcattgtcatcctgtgaccttatcccttttgtctcccatcaccttttccttcttcagcagcacctcacagtcagtcagacgctgcaggcaccactatcaccaggagtggccaagtaaaccgagacaccagtaacagcagggctggacttcctccagcgttttgggaaggaaagagatgttcccctgagctgattcccagtgacagtgcagcaagactagtgggactcctctttcccacattttgcttttttttttttctatgcaaaagtcagatgcttctatccattgctttctgtgattagggcggccctgcagcatatctcacagcagacacagtgttcataacaaagaaaggttgtgccgggcacggtggctcacacctgtaatcccagccctttgggaggctgaggtgggtgtatcacttgaggtcaggagttcaagaccaatctggccaacatggtgaaaccccatctctactaaaaatacgaaaattagctgggtgtgatggcgcatgcctgtaatcccagctacttgggaggctgaggcaggagaatcacttgaacccgggagatgaaggttgcagtgagctgaggtcgtgctactgcactcccgcctgggtgacagagtgagactctatctcaaaaaaaaaaaaaaaaaagaaaggttgttatggactggacacccctgaagcccattgcctaggccacagtggtgacggcaggatggccctgctcagcaccgcaagagccatggctgtccctgttggcccagccgggcactcacagggcagaagggtgggtctcaagtgggaggataaggcttcaccaccaggagattcccctctgcccgatgactctgttaagagtcacgacccatcaagggaatgcatagatggagatatatagtgtgtgatgtgtaaatcaggtcaaacctcaacgacaattgaaagttgttattgtcctatgaggtatcttagcattctcgatgggtattgaggatggttggatgtgctttattgtgtgtggaaacatgcctctctttgctaatcatttcagaggtccagttttcctttcactggacaatcttgaataggaggaacgctgttgctgtaatatgcgtagcttctgtgtgctcttgtgtagtctgtgtgtgatcaaagggcacggaagtggctgcactttcacatcccttttctttacttagctggaaccttacataccagtacatgctcctctgtaagcagctgaactcaccggccacttctctgtttgcctatagacaaagactgtgtgtgtgtgtgtgtatgtatgtgtgtgtgtgtggtgcacacattgtgttcttaaactgagacgtggctctgcaggtctcctgggctcattccatggtgtggtatgtttattccactgtccagagctattctctgatggatttgagcaacagcagtggagataaatgtcctagagtcaccaggtcgcttggagaagtcatttaagctgcctcgggtttttgttacttaaaatgtggatattatttctccacctaaatcactgagtttacagagtaataatgtgttgctctggacattgacagctttctagagccagtaatgggctcttctgaaggatgctgaattagaagtgaacctattcataggatcaaaagccacttgctttgaaatatgtagagttcctcagaattgacggtgctagaaatatccaagtgttaaataaccttttaaaagcaacaaaagctacttttttcttaccacttaatagaagaacctgtccctagaggcgacttcattgctatggatctggagtctctgaactcttaataggatgcagcctcacatacataatgtcacccattttatgttgatgaaaacattacaagttttcttcattgggtatgtgttgatgttcacagacagtacttgggcccattaggttttcgcgtctggtcttagagcatgtgtattcatctcagcgtgaatacctcagccagtcttatgaataggaggctatgtatgggcagggaatagattagattagaacactcgcacaagatgaccacatatagaagcagaaagccccaaattccctgggaactgttttttctctagtagctgaatataaggaaatatgtctaatggacaccagttaatactttttaaaactactctttaaaaaaaaaatacgttccccttggttaactgattttttaatccagggtggacattttttcaacctttattaaaaagacaaataaactattttgtagaagatcagactcctacttaactggaagagaaatgtctattaaatgtctctcctctttctctgggtcaagaccatgtaattttatgcttcagagatgaagatactgtttgtttacaaagagtttagtttttaagacatccaaaactctatgctagagcaaaaatcaaatagcaaaggacactagccagaaaatacagtgtgtgtgtgtgcacctgtgtgcctgctgaacaacttgacagtgtaacagataaggtaactgaagatggtggatatttgaattgtattagcttaatgtctacatatctttggccaaaactctattgtcatattagaaacatgttatctttttcatgtttattagtaatttatttttgattctttgttttctttttcgtccaactaaaacaactgtaatgtacttgatacatttatatcaagttctaaagtatttagacaaatccaaatactttgtttttagttttttcctcctttccatcctgttaaccacagtgaaacgctgcagtattttgatttggtcagtgctacggaggaagaccatgaaagctgaattggtctgtgccacccagagtaaacctcttctcttcttctggaaagatggcgtgatgtttttcaaggattctaataaatatcccgcagtcatctcctgagcagctttcctctgtttcacttcagaactccttcccccactttcttcactccagtttcttcacttgcagcgttttctgctaagaaagacttatcatcttgtatctgtttatgcctctcttctttggggcccctggatgtttttgtggatttttacagagtatttatatctgcacagcgtgtattttgttatacattcttacaagcattgatattggggggtacattcataatagtgagaatatctggcagaatgtgtgaatgccatatctgtagatgacgatgaatgtgaagggttaatgtagaaatgtttgtttattctgttacagctcaaaatggaggctgagaatctctaccaccattcccttctctatttgagaatctctaccaccattcccttctctatttgggaaacaatactctcttattttgctatttttaccttcccattaactggcttcactcaacagtgccagatacctatggagaggggaagtaaaacaccttaggtcaggaataataaaccaatgagttagctcagggccggtggacatgttcactggtggaccagttggcattgacctaaacggacagagaaatgcacatggaggagaactacgttgaaatcaagatcctatgtctgttgtattttctctttgcctggagtaaatagcattataagtcattccacccttattagataaccaaagcatattggtctcaatagctttctcctgaaaaatgtgattgaatcttacctgtagcagttcactcttaaggttgaaagaactgtcaatatagataaaatccattccttattattattgattggtgtgacatttgaaaatgtgtctaaacaatatttgtaagtaaaagaaccagtcataagcctcaaatgtgttcagtgtgtaccaagctggaatgggagactggcccctcttggctttaaagtagcatgttgtctttttctagcagcttcttcctagtagacattccagggatgggaggggccagggatcatgtcttactcatttctgtatcgccagcccctggcatagtgtctggcttatgttatgtgaataaatgaatgcttgccaagatctcttcttccctcaagtttctggaaaacctgagggttcgtgatacctgttcccactcctcatcagcgggttggcaagaaagcaaataaggggaaacatttttaacattccaagcaagagaaggaagaacgactattgggaggaggtacaccagagattgctcagtgtgcagcctgctacctcacttttggctctggattgcctggtggtagaagggaagagtattatgtagttagcaccttacatatttgatgctcaggaagaaagtgcaagaagatccctaatagaacattaaagattcttaaaagtttttgaagtaggctgcttggggtgaccagccccacccttacatctccatagttggtacagttagcttgtagcagctgaagctgatgcctggagatcactgtctgttggtctgatctcagtatcatactgagacacctcccctgagccttacctacttaaattggtaaccgtcctaccaaaatttgtcaattttaatcaagtgaggcaagttgcaagggagccagagatacgtgaaaaaagaaaagcagaaatactgatactttctaagaaagaagttgtaataatttctttggcacattgacttactgatatcttttgaaatgcatagatgactcttgtgaaccaaagagagcagtagtggttattccccggcgcaataaaaatgcctttgtgtatcacttgcgattgccagtcatttctgtgccagttgctttcattccagagaatggcctcattctccaaaaaaagatgatgattttagaagtaggatttcctaacaaattatgtggtggggagggacggcggggattttattcatcccgtctgagctcttcatacagtattaccattaggttttaagaacaaagatgggggaggagggagtagaaagctgagagtacgtagaacagctacaagacattagtgggtattcagattttgagctgtgtaaatatcaaacatcggcttccagccttaagagttatttgagcagagagttaaggaggaatgggagattttgtgaataaaatgttttgccaaactgaa

SEQ ID NO: 29046 - DNA, 4171 bp, Homo sapiens
  source 1..4171: mol_type = unassigned DNA
agtgcaccggaggaggtgagcgccaggtcgccttcgcggcccggggacacaggcagggacgcgggagctgatgcggctggaccggccggggaaacagtattttctggaaggggtaagagatgctgtcttgagcctttggaatctcggatccgggccgcccagaggacctcgacaggagcacagggaggacaaactgaagtccgagagaggcggcgtggcctccggcctcggggagcgctgccgggggtctcgggcttgggagagggcctgggggcggtgaaaatggggggaaaggaggggaccacaacattgttatggaagagtgagctcggattggcagagggacgcggggctgcaacgcgagtctccggaggtggaggggtccaggctgatgtagcgccgcccgggtcctgggtcggggttccgggaagtggacctgcgagccaagcctagccaagtcgggggacggaggctccggggcggacggagctgagggtgggcaggcgaggttgatggagcccttccaggaagcagggcgaggctcaagcacccagaaaaacctgtggctgccgaggtcccccgccagcagcgggcagcggagcgcaggggcggggctggggactggcgaactccgcctctctggggctgtcgctttaagggcaaggcggggcgtgcgggccctttaaggccacgtgggggcgtgtcaggaagtgagtccagggcccgcctcccggggagtcggcctcggatgtccggaggctcctgggctgagccggcgacagagcccgggaaggcagcgagacgtgggcgccggcccagccccctcccgcgtccttcagccccaagccccgagcccctctgacccttccgcagccctccctccagccgcgcccggcctccggcagctccctgtacgcctccctccccctgcccgcccctccctcccacagccgcccatgacgccctctcggcacctcttcccactctgccacgcgtccttttcctgcaccttcgccccgcgtacctactcctgccccgccctgccattcctctcccctcccttctctctgcgacccctccctgttaggccccagcctcttctcccctcacaggtcttctctgtcctggcctcaccgccttatcctattcctctcccttgccctgtgtcttgtctcagagccccctcggggtgggagtaggttgtggagcagcacaactgggctcaccccaaagcagaacttctcaatccatgaggacaatggggaggcctttaggccagcccacatgtgacaatggagggctgcggcttccttgcggagagcacaagtgagctcactgccctggactccagggaatcagagttctggccgcggggtgacccagctcctctgctaccatgaatagggcccctctgaagcggtccaggatcctgcacatggcgctgaccggggcctcagacccctctgcagaggcagaggccaacggggagaagccctttctgctgcgggcattgcagatcgcgctggtggtctccctctactgggtcacctccatctccatggtgttccttaataagtacctgctggacagcccctccctgcggctggacacccccatcttcgtcaccttctaccagtgcctggtgaccacgctgctgtgcaaaggcctcagcgctctggccgcctgctgccctggtgccgtggacttccccagcttgcgcctggacctcagggtggcccgcagcgtcctgcccctgtcggtggtcttcatcggcatgatcaccttcaataacctctgcctcaagtacgtcggtgtggccttctacaatgtgggccgctcactcaccaccgtcttcaacgtgctgctctcctacctgctgctcaagcagaccacctccttctatgccctgctcacctgcggtatcatcatcgggggcttctggcttggtgtggaccaggagggggcagaaggcaccctgtcgtggctgggcaccgtcttcggcgtgctggctagcctctgtgtctcgctcaacgccatctacaccacgaaggtgctcccggcggtggacggcagcatctggcgcctgactttctacaacaacgtcaacgcctgcatcctcttcctgcccctgctcctgctgctcggggagcttcaggccctgcgtgactttgcccagctgggcagtgcccacttctgggggatgatgacgctgggcggcctgtttggctttgccatcggctacgtgacaggactgcagatcaagttcaccagtccgctgacccacaatgtgtcgggcacggccaaggcctgtgcccagacagtgctggccgtgctctactacgaggagaccaagagcttcctctggtggacgagcaacatgatggtgctgggcggctcctccgcctacacctgggtcaggggctgggagatgaagaagactccggaggagcccagccccaaagacagcgagaagagcgccatgggggtgtgagcaccacaggcaccctggatggcccggccccggggcccgtacacaggcggggccagcacagtagtgaaggcggtctcctggaccccagaagcgtgctgtggtgtggactgggtgctacttatagacccaatcagaatacggtggttgagaaggaaccagtgtttacaagtaatatcagaaagttgaaggaaccagtgtttacaagtaataccagaaagttgccaaacccttctctatcctctcgtatttctgagtttttgtccttcccgagggagcaccctagtgagagttgaaccccttccttctgcctccagggcctgtctgcctccacatcactctgaggacagggacaggcaacaaccttgaagggacagcaatggcaaagccacaaaggcttcactgtactcaggggagatggccctaccacagccacctggagagggttgggaagccttccgtctgcggtgggcaggcagcctcaccctgggcccacagaccggccttcctttggaggaaagtgtggcctggactgagggaggaaatgagcgagttccctctgacaccagcagatccccaggggctgctgggcagtggcctgggaatggggtggattgtgagaaagtgctcaccatctatacaccctgtatgtccagcttttgaacacaagggaaccatgcttctcttagaggttaagcagggtcattaacatcctcccccagtccctaacatcacattgtcctgcgtggctcctctggccctgagtggcacctgtccctctggtctcccagcacctggcccaggtaacagccttctgaaagcagagccaaggagctgcttctctcttctcccagttctacctccccagaagccttcctccccaggtggggctgatggagcaagggtccagactaggagccttccaccccagctgtgtctggcgcccctagatctctgcaagggaggtgttacagctggttctgagccgcttgccttgtgatggtaagacaccaacctttacattcttccctgaggttgtggctgacagagcctgcttggccccactgttagtccagcgagctcctatatcaaaatgccgtaggccgggtggcttacaaacaacagaaacgtattgctcacagtcctggggggctgggacgcccaagatcaagaggccagcagattcggactccgctgagggctgtttcccgatccatagatggtgccttctcgctgtatcctcaatggtagaagcacaaacaagcaagctccttcctgcctcttttataaggactccaaccctgttcatgagggttccgcccccatgacccaatcagctccaaaggccccacctcctaatactgtcaccttgggggtgagaattccaatgtgaatttgcagggggagtgggggacacacacaaatttcggggccataccacccttcaccacaccctcctgcgctcagggtggcttgcagtccctggcccttctggtgggcatttggtatgtcctttctcttggggtgatttctgatgtttttactctatatagtgaaaagctagggagagcgggtcttctcccccctccctctccagtcccctcacaatcccagatgggttctaatgcagctgctggggcctgatgccctgagttgtttgtgattcaataaagaatccataag

SEQ ID NO: 29047 - DNA, 1756 bp, Homo sapiens
  source 1..1756: mol_type = unassigned DNA
tccccgcacgcacttctggaagtgcaagccggtagcgcggcgggccagggatacagccaagtcccgggacgtgccagctgcggtaactgaagccgggtcccgggcgggcgggggtaccagggacaggagtagccttggaaagaggagagggcctcctcccacgaccgtccggatcaccgcctctccgccggcacccccggggcccatgccgcgaacaggccggcgaggctggcaaggtgcccgggcccggggcggaaagcaggaagtcgatcccgcgggcgcggcccagggtgcggcgctgcagatgcagcacggggtcgcggggcgggcgcccagtgcaccggaggaggtgagcgccaggtcgccttcgcggcccggggacacaggcagggacgcgggagctgatgcggctggaccggccggggaaacagtattttctggaagggggcccctctgaagcggtccaggatcctgcacatggcgctgaccggggcctcagacccctctgcagaggcagaggccaacggggagaagccctttctgctgcgggcattgcagatcgcgctggtggtctccctctactgggtcacctccatctccatggtgttccttaataagtacctgctggacagcccctccctgcggctggacacccccatcttcgtcaccttctaccagtgcctggtgaccacgctgctgtgcaaaggcctcagcgctctggccgcctgctgccctggtgccgtggacttccccagcttgcgcctggacctcagggtggcccgcagcgtcctgcccctgtcggtggtcttcatcggcatgatcaccttcaataacctctgcctcaagtacgtcggtgtggccttctacaatgtgggccgctcactcaccaccgtcttcaacgtgctgctctcctacctgctgctcaagcagaccacctccttctatgccctgctcacctgcggtatcatcatcgggggcttctggcttggtgtggaccaggagggggcagaaggcaccctgtcgtggctgggcaccgtcttcggcgtgctggctagcctctgtgtctcgctcaacgccatctacaccacgaaggtgctcccggcggtggacggcagcatctggcgcctgactttctacaacaacgtcaacgcctgcatcctcttcctgcccctgctcctgctgctcggggagcttcaggccctgcgtgactttgcccagctgggcagtgcccacttctgggggatgatgacgctgggcggcctgtttggctttgccatcggctacgtgacaggactgcagatcaagttcaccagtccgctgacccacaatgtgtcgggcacggccaaggcctgtgcccagacagtgctggccgtgctctactacgaggagaccaagagcttcctctggtggacgagcaacatgatggtgctgggcggctcctccgcctacacctgggtcaggggctgggagatgaagaagactccggaggagcccagccccaaagacagcgagaagagcgccatgggggtgtgagcaccacaggcaccctggatggcccggccccggggcccgtacacaggcggggccagcacagtagtgaaggcggtctcctggaccccagaagcgtgctgtggtgtggactgggtgctacttatagacccaatcagaatacggtggttgagaaggaaccagtgtttacaagtaatatcagaaagttgaaggaaccagtgtttacaagtaataccagaaagttgcc

SEQ ID NO: 29048 - DNA, 3111 bp, Homo sapiens
  source 1..3111: mol_type = unassigned DNA
tccccgcacgcacttctggaagtgcaagccggtagcgcggcgggccagggatacagccaagtcccgggacgtgccagctgcggtaactgaagccgggtcccgggcgggcgggggtaccagggacaggagtagccttggaaagaggagagggcctcctcccacgaccgtccggatcaccgcctctccgccggcacccccggggcccatgccgcgaacaggccggcgaggctggcaaggtgcccgggcccggggcggaaagcaggaagtcgatcccgcgggcgcggcccagggtgcggcgctgcagatgcagcacggggtcgcggggcgggcgcccagtgcaccggaggagggcccctctgaagcggtccaggatcctgcacatggcgctgaccggggcctcagacccctctgcagaggcagaggccaacggggagaagccctttctgctgcgggcattgcagatcgcgctggtggtctccctctactgggtcacctccatctccatggtgttccttaataagtacctgctggacagcccctccctgcggctggacacccccatcttcgtcaccttctaccagtgcctggtgaccacgctgctgtgcaaaggcctcagcgctctggccgcctgctgccctggtgccgtggacttccccagcttgcgcctggacctcagggtggcccgcagcgtcctgcccctgtcggtggtcttcatcggcatgatcaccttcaataacctctgcctcaagtacgtcggtgtggccttctacaatgtgggccgctcactcaccaccgtcttcaacgtgctgctctcctacctgctgctcaagcagaccacctccttctatgccctgctcacctgcggtatcatcatcgggggcttctggcttggtgtggaccaggagggggcagaaggcaccctgtcgtggctgggcaccgtcttcggcgtgctggctagcctctgtgtctcgctcaacgccatctacaccacgaaggtgctcccggcggtggacggcagcatctggcgcctgactttctacaacaacgtcaacgcctgcatcctcttcctgcccctgctcctgctgctcggggagcttcaggccctgcgtgactttgcccagctgggcagtgcccacttctgggggatgatgacgctgggcggcctgtttggctttgccatcggctacgtgacaggactgcagatcaagttcaccagtccgctgacccacaatgtgtcgggcacggccaaggcctgtgcccagacagtgctggccgtgctctactacgaggagaccaagagcttcctctggtggacgagcaacatgatggtgctgggcggctcctccgcctacacctgggtcaggggctgggagatgaagaagactccggaggagcccagccccaaagacagcgagaagagcgccatgggggtgtgagcaccacaggcaccctggatggcccggccccggggcccgtacacaggcggggccagcacagtagtgaaggcggtctcctggaccccagaagcgtgctgtggtgtggactgggtgctacttatagacccaatcagaatacggtggttgagaaggaaccagtgtttacaagtaatatcagaaagttgaaggaaccagtgtttacaagtaataccagaaagttgccaaacccttctctatcctctcgtatttctgagtttttgtccttcccgagggagcaccctagtgagagttgaaccccttccttctgcctccagggcctgtctgcctccacatcactctgaggacagggacaggcaacaaccttgaagggacagcaatggcaaagccacaaaggcttcactgtactcaggggagatggccctaccacagccacctggagagggttgggaagccttccgtctgcggtgggcaggcagcctcaccctgggcccacagaccggccttcctttggaggaaagtgtggcctggactgagggaggaaatgagcgagttccctctgacaccagcagatccccaggggctgctgggcagtggcctgggaatggggtggattgtgagaaagtgctcaccatctatacaccctgtatgtccagcttttgaacacaagggaaccatgcttctcttagaggttaagcagggtcattaacatcctcccccagtccctaacatcacattgtcctgcgtggctcctctggccctgagtggcacctgtccctctggtctcccagcacctggcccaggtaacagccttctgaaagcagagccaaggagctgcttctctcttctcccagttctacctccccagaagccttcctccccaggtggggctgatggagcaagggtccagactaggagccttccaccccagctgtgtctggcgcccctagatctctgcaagggaggtgttacagctggttctgagccgcttgccttgtgatggtaagacaccaacctttacattcttccctgaggttgtggctgacagagcctgcttggccccactgttagtccagcgagctcctatatcaaaatgccgtaggccgggtggcttacaaacaacagaaacgtattgctcacagtcctggggggctgggacgcccaagatcaagaggccagcagattcggactccgctgagggctgtttcccgatccatagatggtgccttctcgctgtatcctcaatggtagaagcacaaacaagcaagctccttcctgcctcttttataaggactccaaccctgttcatgagggttccgcccccatgacccaatcagctccaaaggccccacctcctaatactgtcaccttgggggtgagaattccaatgtgaatttgcagggggagtgggggacacacacaaatttcggggccataccacccttcaccacaccctcctgcgctcagggtggcttgcagtccctggcccttctggtgggcatttggtatgtcctttctcttggggtgatttctgatgtttttactctatatagtgaaaagctagggagagcgggtcttctcccccctccctctccagtcccctcacaatcccagatgggttctaatgcagctgctggggcctgatgccctgagttgtttgtgattcaataaagaatcc

SEQ ID NO: 29049 - DNA, 582 bp, Homo sapiens
  source 1..582: mol_type = unassigned DNA
tctggaagtgcaagccggtagcgcggcgggccagggatacagccaagtcccgggacgtgccagctgcggtaactgaagccgggtcccgggcgggcgggggtaccagggacaggagtagccttggaaagaggagagggcctcctcccacgaccgtccggatcaccgcctctccgccggcacccccggggcccatgccgcgaacaggccggcgaggctggcaaggtgcccgggcccggggcggaaagcaggaagtcgatcccgcgggcgcggcccagggtgcggcgctgcagatgcagcacggggtcgcggggcgggcgcccagtgcaccggaggagggcccctctgaagcggtccaggatcctgcacatggcgctgaccggggcctcagacccctctgcagaggcagaggccaacggggagaagccctttctgctgcgggcattgcagatcgcgctggtggtctccctctactgggtcacctccatctccatggtgttccttaataagtacctgctggacagcccctccctgcggctggacacccccatcttcgtcaccttctaccagtgcctggtgaccacg

SEQ ID NO: 29050 - DNA, 695 bp, Homo sapiens
  source 1..695: mol_type = unassigned DNA
ctcggatgtccggaggctcctgggctgagccggcgacagagcccgggaaggcagcgagacgtgggcgccggcccagccccctcccgcgtccttcagccccaagccccgagcccctctgacccttccgcagccctccctccagccgcgcccggcctccggcagctccctggcccctctgaagcggtccaggatcctgcacatggcgctgaccggggcctcagacccctctgcagaggcagaggccaacggggagaagccctttctgctgcgggcattgcagatcgcgctggtggtctccctctactgggtcacctccatctccatggtgttccttaataagtacctgctggacagcccctccctgcggctggacacccccatcttcgtcaccttctaccagtgcctggtgaccacgctgctgtgcaaaggcctcagcgctctggccgcctgctgccctggtgccgtggacttccccagcttgcgcctggacctcagggtggcccgcagcgtcctgcccctgtcggtggtcttcatcggcatgatcaccttcaataacctctgcctcaagtacgtcggtgtggccttctacaatgtgggccgctcactcaccaccgtcttcaacgtgctgctctcctacctgctgctcaagcagaccacctccttctatgccctgctcacctgcggtatcatcatcg

SEQ ID NO: 29051 - DNA, 1787 bp, Homo sapiens
  source 1..1787: mol_type = unassigned DNA
ctcggatgtccggaggctcctgggctgagccggcgacagagcccgggaaggcagcgagacgtgggcgccggcccagccccctcccgcgtccttcagccccaagccccgagcccctctgacccttccgcagccctccctccagccgcgcccggcctccggcagctccctgtacgcctccctccccctgcccgcccctccctcccacagccgcccatgacgccctctcggcacctcttcccactctgccacgcgtccttttcctgcaccttcgccccgcgtacctactcctgccccgccctgccattcctctcccctcccttctctctgcgacccctccctgttaggccccagcctcttctcccctcacaggtcttctctgtcctggcctcaccgccttatcctattcctctcccttgccctgtgtcttgtctcagagccccctcggggtgggagtaggttgtggagcagcacaactgggctcaccccaaagcagaacttctcaatccatgaggacaatggggaggcctttaggccagcccacatgtgacaatggagggctgcggcttccttgcggagagcacaagtgagctcactgccctggactccagggaatcagagttctggccgcggggtgacccagctcctctgctaccatgaatagggcccctctgaagcggtccaggatcctgcacatggcgctgaccggggcctcagacccctctgcagaggcagaggccaacggggagaagccctttctgctgcgggcattgcagatcgcgctggtggtctccctctactgggtcacctccatctccatggtgttccttaataagtacctgctggacagcccctccctgcggctggacacccccatcttcgtcaccttctaccagtgcctggtgaccacgctgctgtgcaaaggcctcagcgctctggccgcctgctgccctggtgccgtggacttccccagcttgcgcctggacctcagggtggcccgcagcgtcctgcccctgtcggtggtcttcatcggcatgatcaccttcaataacctctgcctcaagtacgtcggtgtggccttctacaatgtgggccgctcactcaccaccgtcttcaacgtgctgctctcctacctgctgctcaagcagaccacctccttctatgccctgctcacctgcggtatcatcatcgggggcttctggcttggtgtggaccaggagggggcagaaggcaccctgtcgtggctgggcaccgtcttcggcgtgctggctagcctctgtgtctcgctcaacgccatctacaccacgaaggtgctcccggcggtggacggcagcatctggcgcctgactttctacaacaacgtcaacgcctgcatcctcttcctgccccttttataaggactccaaccctgttcatgagggttccgcccccatgacccaatcagctccaaaggccccacctcctaatactgtcaccttgggggtgagaattccaatgtgaatttgcagggggagtgggggacacacacaaatttcggggccataccacccttcaccacaccctcctgcgctcagggtggcttgcagtccctggcccttctggtgggcatttggtatgtcctttctcttggggtgatttctgatgtttttactctatatagtgaaaagctagggagagcgggtcttctcccccctccctctccagtcccctcacaatcccagatgggttctaatgcagctgctggggcctgatgccctgagttgtttgtgattcaataaagaatccataag

SEQ ID NO: 29052 - DNA, 1613 bp, Homo sapiens
  source 1..1613: mol_type = unassigned DNA
ggccgggcgggaccagtgcgcagccggggctggcgggcggcggggtccgcggggccgcaggagatgacggccggcggccaggccgaggccgagggcgctggcggggagcccggcgcggcgcggctgccctcgcgggtggcccggctgctgtcggcgctcttctacgggacctgctccttcctcatcgtgcttgtcaacaaggcgctgctgaccacctacggtttcccgtcaccaattttccttggaattggacagatggcagccaccataatgatactatatgtgtccaagctaaacaaaatcattcacttccctgattttgataagaaaattcctgtaaagctgtttcctctgcctctcctctacgttggaaaccacataagtggattatcaagcacaagtaaattaagcctaccgatgttcaccgtgctcaggaaattcaccattccacttaccttacttctggaaaccatcatacttgggaagcagtattcactcaacatcatcctcagtgtctttgccattattctcggggctttcatagcagctgggtctgaccttgcttttaacttagaaggctatatttttgtattcctgaatgatatcttcacagcagcaaatggagtttataccaaacagaaaatggacccaaaggagctagggaaatacggagtacttttctacaatgcctgcttcatgattatcccaactcttattattagtgtctccactggagacctgcaacaggctactgaattcaaccaatggaagaatgttgtgtttatcctacagtttcttctttcctgttttttggggtttctgctgatgtactccacggttctgtgcagctattacaattcagccctgacgacagcagtggttggagccatcaagaatgtatccgttgcctacattgggatattaatcggtggagactacattttctctttgttaaactttgtagggttaaatatttgcatggcagggggcttgagatattcctttttaacactgagcagccagttaaaacctaaacctgtgggtgaagaaaacatctgtttggatttgaagagctaaagagtctgcagcaggattggagactgacttgtgactgcgggctgggggggcattcccagtaggaatgtgaagccagaggtttcggattcgtgacatccaccccctgggcaagtgagagcatctgcaaaatgcaaagagaactacctcatatgcaggatgagccaatggcagtctcaagaaatgtactcgggcgacaccttacctgtggaaagcaaatcttttcaaaataagccactgggactcggtaggtggagccccagctgctcttctagggacctatggggccttcgtggcatctctgtgctgtgtgctggggaggaggttgatgtaatggtgactcttttctgatcagcaccttggccgtgattcccaaggtcccagccaaagcaaagggccagttgtttcagtttaaacagacatgtctttagtctaataaaattagttaactgccagtaaagttatttgttagctttgatgaaagctatgttggtatctttccctaatcatcaaagtaaataaaaaatcatttctatgta

SEQ ID NO: 29053 - DNA, 889 bp, Homo sapiens
  source 1..889: mol_type = unassigned DNA
gtgcgcagccggggctggcgggcggcggggtccgcggggccgcaggagatgacggccggcggccaggccgaggccgagggcgctggcggggagcccggcgcggcgcggctgccctcgcgggtggcccggctgctgtcggcgctcttctacgggacctgctccttcctcatcgtgcttgtcaacaaggcgctgctgaccacctacggtttcccgtcaccaattttccttggaattggacagatggcagccaccataatgatactatatgtgtccaagctaaacaaaatcattcacttccctgattttgataagaaaattcctgtaaagctgtttcctctgcctctcctctacgttggaaaccacataagtggattatcaagcacaagtaaattaagcctaccgatgttcaccgtgctcaggaaattcaccattccacttaccttacttctggaaaccatcatacttgggaagcagtattcactcaacatcatcctcagtgtctttgccattattctcggggctttcatagcagctgggtaagactttggactgtttctgctcaataacttctttgtgtctttgacaataggcccagccccatcctcagtttttcattttccatctggctgctgttgaattgagcaggcaagagacaaatctgttgaagttagtggaatccccatgtgttcctatgaaagtcaaagtgggtcccacattggccagaaaatttctgagaatatatgaagagagcattgcaagatattaatatagcttttcttcacaaaaagcagtgaactgtttacatttcttactgaatgtttgtcttcattataacaactttacttgagaagttcttaggcatttgattaataataacagacttacaaag

SEQ ID NO: 29054 - DNA, 1361 bp, Homo sapiens
  source 1..1361: mol_type = unassigned DNA
tcttccccggcccggccgggcgggaccagtgcgcagccggggctggcgggcggcggggtccgcggggccgcaggagatgacggccggcggccaggccgaggccgagggcgctggcggggagcccggcgcggcgcggctgccctcgcgggtggcccggctgctgtcggcgctcttctacgggacctgctccttcctcatcgtgcttgtcaacaaggcgctgctgaccacctacggtttcccgtcaccaattttccttggaattggacagatggcagccaccataatgatactatatgtgtccaagctaaacaaaatcattcacttccctgattttgataagaaaattcctgtaaagctgtttcctctgcctctcctctacgttggaaaccacataagtggattatcaagcacaagtaaattaagcctaccgatgttcaccgtgctcaggaaattcaccattccacttaccttacttctggaaaccatcatacttgggaagcagtattcactcaacatcatcctcagtgtctttgccattattctcggggctttcatagcagctgggtttctgctgatgtactccacggttctgtgcagctattacaattcagccctgacgacagcagtggttggagccatcaagaatgtatccgttgcctacattgggatattaatcggtggagactacattttctctttgttaaactttgtagggttaaatatttgcatggcagggggcttgagatattcctttttaacactgagcagccagttaaaacctaaacctgtgggtgaagaaaacatctgtttggatttgaagagctaaagagtctgcagcaggattggagactgacttgtgactgcgggctgggggggcattcccagtaggaatgtgaagccagaggtttcggattcgtgacatccaccccctgggcaagtgagagcatctgcaaaatgcaaagagaactacctcatatgcaggatgagccaatggcagtctcaagaaatgtactcgggcgacaccttacctgtggaaagcaaatcttttcaaaataagccactgggactcggtaggtggagccccagctgctcttctagggacctatggggccttcgtggcatctctgtgctgtgtgctggggaggaggttgatgtaatggtgactcttttctgatcagcaccttggccgtgattcccaaggtcccagccaaagcaaagggccagttgtttcagtttaaacagacatgtctttagtctaataaaattagttaactgccagtaaagttatttgttagctttgatgaaagctatgttggtatctttccctaatcatcaaagtaaataaaaaatcatttctatgt

SEQ ID NO: 29055 - DNA, 2359 bp, Homo sapiens
  source 1..2359: mol_type = unassigned DNA
cgcaagaacgcctggccggagctgccctctgcagccgagccggcgccccctgcccttcgccgccgcgctgggcgggcgcccccgccgccctcactccgctgctcccggctcctcgcgcgcaggtcgcggagctccgccaccgctgggtgcggcgaggccggcgcgatgcggcagctgtgccggggccgcgtgctgggcatctcggtggccatcgcgcacggggtcttctcgggctccctcaacatcttgctcaagttcctcatcagccgctaccagttctccttcctgaccctggtgcagtgcctgaccagctccaccgcggcgctgagcctggagctgctgcggcgcctcgggctcatcgccgtgccccccttcggtctgagcctggcgcgctccttcgcgggggtcgcggtgctctccacgctgcagtccagcctcacgctctggtccctgcgcggcctcagcctgcccatgtacgtggtcttcaagcgctgcctgcccctggtcaccatgctcatcggcgtcctggtgctcaagaacggcgcgccctcgccaggggtgctggcggcggtgctcatcaccacctgcggcgccgccctggcaggagccggcgacctgacgggcgaccccatcgggtacgtcacgggagtgctggcggtgctggtgcacgctgcctacctggtgctcatccagaaggccagcgcagacaccgagcacgggccgctcaccgcgcagtacgtcatcgccgtctctgccaccccgctgctggtcatctgctccttcgccagcaccgactccatccacgcctggaccttcccgggctggaaggacccggccatggtctgcatcttcgtggcctgcatcctgatcggctgcgccatgaacttcaccacgctgcactgcacctacatcaattcggccgtgaccaccagcttcgtgggtgtggtgaagagcatcgccaccatcacggtgggcatggtggccttcagcgacgtggagcccacctctctgttcattgccggcgtggtggtgaacaccctgggctctatcatttactgtgtggccaagttcatggagaccagaaagcaaagcaactacgaggacctggaggcccagcctcggggagaggaggcgcagctaagtggagaccagctgccgttcgtgatggaggagctgcccggggagggaggaaatggccggtcagaaggtggggaggcagcaggtggccccgctcaggagagcaggcaagaggtcaggggcagcccccgaggagtcccgctggtggctgggagctctgaagaagggagcaggaggtcgttaaaagatgcttacctcgaggtatggaggttggttaggggaaccaggtatatgaagaaggattatttgatagaaaacgaggagttacccagtccttgagaaggaggtgcatgtacgtacctatgtgcatacacttattttatatgttagaaatgacgtgttttaatgagaggcctccccgttttattctttgaggagtggggaagggaagaaaagaaagaagctgaaaggtactgacacagagcaacaaaattagcacctgtgtgaattatttagtgtgacttcacctgaggcatcacagagacaaaagaatgtgaagctacttaacaaagtaaggcaacgtttctgcttcagactcctggcacatttactttttgtcattataaccataactaaatatctgcatgtaccaagagtccctaagccaccccctccaaagatggagtgtagaaatgatgacagcacttagtaagttcaaagatgacattcagggatgcattttttgatgatagaactacagtttttatcgccagctgggcaaagagtatattgctgaaatgatatataaatatattgaattgatgtttactgtttatagtcatctgaaatatcatatttactctgattctactcacttgttttttaaaaataagtgtcctattattgtattatatattgatagaaactgttaaagctattttgaaaatatgagttcttagctttaatcatgaagtctgaagtttgctttcagtaattattttaaaagttgttttggttcattgctttataatatttattattgaatgccaaacctgttcttttttttactgtgtccaatattctttcaagcaaatgcaatggctggaatataattcagaattaactgaaacccagccagaagagggaccacctgtaaagcaagtcctttcaagtttcactgcacatcccaaaccatgttacaaaaagagcaactgctatattcacattatgatatttttctatcttaaatttgtcaaaataaagtatgagtctaactattaaa

SEQ ID NO: 29056 - DNA, 5781 bp, Homo sapiens
  source 1..5781: mol_type = unassigned DNA
acgtgatgaggtccggaagcggctgccgggcagcaaaggaggatggcgaggggctgatactgaacccgggaagggtgggctgtgctgaagccagagccggagccggagctggggccagaacccgagcagtgagttcctccactggctgccggctggcggcgctcgccgccttgggcaggacccacctcgccttcctcccggcgtggcagatgctccagctgccatgtccacgcagagacttcggaatgaagactaccacgactacagctccacggacgtgagccctgaggagagcccgtcggaaggcctcaacaacctctcctccccgggctcctaccagcgctttggtcaaagcaatagcacaacatggttccagaccttgatccacctgttaaaaggcaacattggcacaggactcctgggactccctctggcggtgaaaaatgcaggcatcgtgatgggtcccatcagcctgctgatcataggcatcgtggccgtgcactgcatgggtatcctggtgaaatgtgctcaccacttctgccgcaggctgaataaatcctttgtggattatggtgatactgtgatgtatggactagaatccagcccctgctcctggctccggaaccacgcacactggggaagacgtgttgtggacttcttcctgattgtcacccagctgggattctgctgtgtctattttgtgtttctggctgacaactttaaacaggtgatagaagcggccaatgggaccaccaataactgccacaacaatgagacggtgattctgacgcctaccatggactcgcgactctacatgctctccttcctgcccttcctggtgctgctggttttcatcaggaacctccgagccctgtccatcttctccctgttggccaacatcaccatgctggtcagcttggtcatgatctaccagttcattgttcagaggatcccagaccccagccacctccccttggtggccccttggaagacctaccctctcttctttggcacagcgattttttcatttgaaggcattggaatggttctgcccctggaaaacaaaatgaaggatcctcggaagttcccactcatcctgtacctgggcatggtcatcgtcaccatcctctacatcagcctggggtgtctggggtacctgcaatttggagctaatatccaaggcagcataaccctcaacctgcccaactgctggttgtaccagtcagttaagctgctgtactccatcgggatctttttcacctacgcactccagttctacgtcccggctgagatcatcatccccttctttgtgtcccgagcgcccgagcactgtgagttagtggtggacctgtttgtgcgcacagtgctggtctgcctgacatgcatcttggccatcctcatcccccgcctggacctggtcatctccctggtgggctccgtgagcagcagcgccctggccctcatcatcccaccgctcctggaggtcaccaccttctactcagagggcatgagccccctcaccatctttaaggacgccctgatcagcatcctgggcttcgtgggctttgtggtggggacctatgaggctctctatgagctgatccagccaagcaatgctcccatcttcatcaattccacctgtgccttcatatagggatctgggttcgtctctgcagctgcctacccctgccccatgtgtcccccgttacctgtcctcagagcctcaggtatggtccaggctctgaggaaagtcagggttgctgtgtgggaacccctctgcctggcacctggataccctgggccaggtaacctgagggcaggggagaggtggggtggcagacacgcagaagtgctactagtgacagggctgccatcgctcacctgtacctatttacacccagaactttccagctccccctcatcatgcctcctccttcctacctgcctcccctctgctggtgcacctcgcccaactcattcttactgcacagttcactttatttaacaattttcatgtcccccacctcatgttttcaccttttctgggccaggcatagattaagtaactgggaacgccccctctttataaagctgggcttctttctcatctctctcccaaatgttgtatctcagtattcttcctattcgagtctccagggggtggctggacctacctggtcatttgaaacaggcccccaagctggagtttttaatctggactctctggcttgctgtgacccctaaggcaatgcttctcttccctggattccttagtgtgggtcacagtactgtgttcttagttgctttagctcttaaaacatacgaagtgttgcctaaactgaaaatatttatcttttatttaaaatcagatttttgtttttagactgtcttagatctggggctattacgaatcacttcttcttcagtaaactttgactcaacttctcctgctgaaaagaagctcgctccagatgtctgcatgggtcctcggcactcttggctgaggactcaaaggttttaatcaggatcgtctaaaaatgtacctcggtgaggaggcacagattttgcctcctgttgaccagcctggtttcataccgaaaagacattgaaggactgcagaaatgtatgggtgcaccgggccgagggaagggtggctgagtgagaggcgtataaaatggggctgtgtgcatgcaggcccatgtttcagcctcagcccacgccaggtgaaaggatcagcaatgctctgttgccatcgtgctgggacgacaccagctctattgccaccgatgagtagctgaggtcagtgtgcacagagtttgaaattaagttaatagactttacagcagctggtctgacactacgcgcagtgctcggttgtttacaatcagtggggaaaagggcagaaccagtgcccggccccacactgcctctgtggcctggactttgaaaggaacccactgaacactaattatgagccctgtctttcccccagaatgcctccctgggtttcacaaacagccttgaggttggccctcctcaaggtcagccttcagatttgggagcaaacttcagagaaggcagaggaagatacattgccttgctgtgggctgcctcttctttcctcttggtgtgcgaagtatttcagaaggccattgatgaattccccctctttagctgtgtatttgtgcacgtgtgtgtgtacgtgcgtgtgtgtgtgtgttcctgtgtaagtaacagaccagactccttttctcttctgtcccgtcaccaggctcttgcttcactgcagatacagttcactctgaaagctggttgaaggagagcagcaaaaatgtatcaggggttttgcttctgtgtttcgccaaagctcataagggctgtgacccacccatatggccccagttttttctgtctcttctgttccaaagccaggagagctgacttccaggtgaagggatgggaaaagtggactctcattgtagtgactcccaacctacctaataatttgttaacttaggaatatgctatcattgttgacttgttcttccttaggagaaggacgattttcacccaccctttctgttctatggtggactcttaacaggtgctatgtgaccaggaatctagccgggagtagcagaggccctgtcttctgaagtctcaggcttagaagttaccaaagtgggctcagaaactgtcatctcctggttccaagttcgggctctggcagcccagccgctatcttagctgtctttcccagcggtgctaagagtggtctcagtgagaaggtagatgccaactggagggccagacctgtgtcctgcccatgtcctccttggtggacgtttctgtttactcagagctgctagagaccatcctgcccatccgagttctgagattgggactgtgatgttgggacctgaggactggatggtagaatactggggtcccccagctcttagcaggatgcaggctattgcttccacacccctggccgtgagaacgtggtatgtaggagagttggctgtagctttaggatttctggaagccaatttggcatggcctatttgatctctggcttgtgctcctgctacactgacagactgattgcgtggctctttcagaagacccaggaagggcagctccagccagaggaccttcctggctatgcaggtgcacagctcttaggcatcaagcaaagggtcagccagtcagtagtagtgggaggaagcccttcctcctcttatgcaagcagctcgcagccagcccagaatctcttatgcagcccaaagggcttcttgaggtagagagccctccccagtgtcttcccaggataagtagaaatatgatcacagagcaacggagcaaaggctttcgggagtgtgaggctgcatctgctggagcaaagggaaaccgtgggcttttccggccagatactcttgagctctgtgaccctgctcctgtcaccccaatttctccaagccagaggtagctttctcagagccccttggtggttctgtcctccaaatgctgctgttgggagcgggcttccagctctcagtgggcagtgcacctcctcctaaatgcaggcacttgctaggaagagtgtgagctggcgtcttctgttcaccctgcctagcagttgtcaccattcacaagtggcattatttatgttgtgctgctgtccagctgctaagatcccttcatctgcacaagccctggctagatatgtgtgaatgtgtggcatcatttcacttcagccgcccaattccatctctcctctgcagccagattcactggctgatgctcactgctcactgtctatccccacgaaatttagttttatcagtagtcttaaagtgttgatctcaaacaagtacattagaaaaatcatgtttcttctctctcatcttactttttcttctcagatttctcccttcctagaacattctctctgtttagcactaatgttcacctcgtattttttggaagtgcaaaaatctcaatttgtgtctgtttacagctctctctcctcactgctcacagcaaggggttctgtatcagtggatttcattttgtagctgctgagatgttaaggcaagcctcagcatctgcccctgctgggtgcacaatgctgcttcctcgaagagaagacacagagtccaagtggcaggacttgaggttggcttccactctgccttagaagttaattttccaaagtacattacaaatctctgaggccattaggggaaaaggaaggggtgtggtttgtctttgaaattacggttaatacttttagacagtaagtccggctggttgcagggctatttgccccgacagcatcagcctgtaacatttcttctctttcctttgtgccactgagtcgttccctggccagaggacataaatggtgctggtaggaggttatcagagtaaggaaggtagcagatataggtgcagggtgcctgtcattcactgtgttatttggtttaaatcaaagtgattctgggggaagctatgctctttcagtggataataaaattggtaactctattgtaaaacatgtcaatggtgtgtgaagaaaaatcaaccaatctgtaggtgttgataactagacagtactgtgtatgttacgtgcctgtgtggatgtgcacttccagcatggtatgtgtagcgatgtggatcatgccagagttcgtagatcctgttttggggtttgcacatggatcgtatgttaagctttttcttttcaataaatgaattttatttttatttttgaga

SEQ ID NO: 29057 - DNA, 1389 bp, Homo sapiens
  source 1..1389: mol_type = unassigned DNA
gcggctgccgggcagcaaaggaggatggcgaggggctgatactgaacccgggaagggtgggctgtgctgaagccagagccggagccggagctgggcaggacccacctcgccttcctcccggcgtggcagatgctccagctgccatgtccacgcagagacttcggaatgaagactaccacgactacagctccacggacgtgagccctgaggagagcccgtcggaaggcctcaacaacctctcctccccgggctcctaccagcgctttggtcaaagcaatagcacaacatggttccagaccttgatccacctgttaaaaggcaacattggcacaggactcctgggactccctctggcggtgaaaaatgcaggcatcgtgatgggtcccatcagcctgctgatcataggcatcgtggccgtgcactgcatgggtatcctggtgaaatgtgctcaccacttctgccgcaggctgaataaatcctttgtggattatggtgatactgtgatgtatggactagaatccagcccctgctcctggctccggaaccacgcacactggggaagacgtgttgtggacttcttcctgattgtcacccagctgggattctgctgtgtctattttgtgtttctggctgacaactttaaacaggtgatagaagcggccaatgggaccaccaataactgccacaacaatgagacggtgattctgacgcctaccatggactcgcgactctacatgctctccttcctgcccttcctggtgctgctggttttcatcaggaacctccgagccctgtccatcttctccctgttggccaacatcaccatgctggtcagcttggtcatgatctaccagttcattgttcagaggatcccagaccccagccacctccccttggtggccccttggaagacctaccctctcttctttggcacagcgattttttcatttgaaggcattggaatggttctgcccctggaaaacaaaatgaaggatcctcggaagttcccactcatcctgtacctgggcatggtcatcgtcaccatcctctacatcagcctggggtgtctggggtacctgcaatttggagctaatatccaaggcagcataaccctcaacctgcccaactgctggttgtaccagtcagttaagctgctgtactccatcgggatctttttcacctacgcactccagttctacgtcccggctgagatcatcatccccttctttgtgtcccgagcgcccgagcactgtgagttagtggtggacctgtttgtgcgcacagtgctggtctgcctgacatgagtgtaagttaaaagacaggatacccttctgtttgctgtggttgaaaactggtgacatttagaaaataaaagtaaattttttttgt

SEQ ID NO: 29058 - DNA, 552 bp, Homo sapiens
  source 1..552: mol_type = unassigned DNA
agcaaaggaggatggcgaggggctgatactgaacccgggaagggtgggctgtgctgaagccagagccggagccggagctggggccagaacccgagcagtgagttcctccactggctgccggctggcggcgctcgccgccttgggcaggacccacctcgccttcctcccggcgtggcagatgctccagaattccatcgacagagaggagaaaatacatctggggaatttgccgctgctctgagttccaaagtccaaaccaatgtaattgtttcagaataacggatgacacttttagcttgcaaacaaggggcgccaatgcgtgaattctggtaggagctgccatgtccacgcagagacttcggaatgaagactaccacgactacagctccacggacgtgagccctgaggagagcccgtcggaaggcctcaacaacctctcctccccgggctcctaccagcgctttggtcaaagcaatagcacaacatggttccagaccttgatccacctgttaaaaggcaacattggcacaggactcctgggactccctctgg

SEQ ID NO: 29059 - DNA, 558 bp, Homo sapiens
  source 1..558: mol_type = unassigned DNA
atgtagagtggatggagcagatgtctgcttactagcatgtgggatgaatggagccgatgtccacttactggcattctcttgtttcccatagaagaagctctcactgagtctgtttacttccacccaggccttggaagaatcctgtacctctctcctttggccaggccttactgtgatgagcacataaagaattccatcgacagagaggagaaaatacatctggggaatttgccgctgctctgagttccaaagtccaaaccaatgtaattgtttcagaataacggatgacacttttagcttgcaaacaaggggcgccaatgcgtgaattctggtaggagctgccatgtccacgcagagacttcggaatgaagactaccacgactacagctccacggacgtgagccctgaggagagcccgtcggaaggcctcaacaacctctcctccccgggctcctaccagcgctttggtcaaagcaatagcacaacatggttccagaccttgatccacctgttaaaaggcaacattggcacaggactcctgggactccctctggcggt

SEQ ID NO: 29060 - DNA, 2005 bp, Homo sapiens
  source 1..2005: mol_type = unassigned DNA
gagctcttcatccgcctgggcccaaccctggaactattcctttcaatggtgtcttttcttgccttgtttcagaaggatctactagttggccctatcttgtgccaagactgacagcaaggaagctgctggctgactgccatgtccacgcagagacttcggaatgaagactaccacgactacagctccacggacgtgagccctgaggagagcccgtcggaaggcctcaacaacctctcctccccgggctcctaccagcgctttggtcaaagcaatagcacaacatggttccagaccttgatccacctgttaaaaggcaacattggcacaggactcctgggactccctctggcggtgaaaaatgcaggcatcgtgatgggtcccatcagcctgctgatcataggcatcgtggccgtgcactgcatgggtatcctggtgaaatgtgctcaccacttctgccgcaggctgaataaatcctttgtggattatggtgatactgtgatgtatggactagaatccagcccctgctcctggctccggaaccacgcacactggggaagacgtgttgtggacttcttcctgattgtcacccagctgggattctgctgtgtctattttgtgtttctggctgacaactttaaacaggtgatagaagcggccaatgggaccaccaataactgccacaacaatgagacggtgattctgacgcctaccatggactcgcgactctacatgctctccttcctgcccttcctggtgctgctggttttcatcaggaacctccgagccctgtccatcttctccctgttggccaacatcaccatgctggtcagcttggtcatgatctaccagttcattgttcagaggatcccagaccccagccacctccccttggtggccccttggaagacctaccctctcttctttggcacagcgattttttcatttgaaggcattggaatggttctgcccctggaaaacaaaatgaaggatcctcggaagttcccactcatcctgtacctgggcatggtcatcgtcaccatcctctacatcagcctggggtgtctggggtacctgcaatttggagctaatatccaaggcagcataaccctcaacctgcccaactgctggttgtaccagtcagttaagctgctgtactccatcgggatctttttcacctacgcactccagttctacgtcccggctgagatcatcatccccttctttgtgtcccgagcgcccgagcactgtgagttagtggtggacctgtttgtgcgcacagtgctggtctgcctgacatgcatcttggccatcctcatcccccgcctggacctggtcatctccctggtgggctccgtgagcagcagcgccctggccctcatcatcccaccgctcctggaggtcaccaccttctactcagagggcatgagccccctcaccatctttaaggacgccctgatcagcatcctgggcttcgtgggctttgtggtggggacctatgaggctctctatgagctgatccagccaagcaatgctcccatcttcatcaattccacctgtgccttcatatagggatctgggttcgtctctgcagctgcctacccctgccccatgtgtcccccgttacctgtcctcagagcctcaggtatggtccaggctctgaggaaagtcagggttgctgtgtgggaacccctctgcctggcacctggataccctgggccaggtaacctgagggcaggggagaggtggggtggcagacacgcagaagtgctactagtgacagggctgccatcgctcacctgtacctatttacacccagaactttccagctccccctcatcatgcctcctccttcctacctgcctcccctctgctggtgcacctcgcccaactcattcttactgcacagttcactttatttaacaattttcatgtcccccacctcatgttttcaccttttctgggccaggcatagattaagtaactgggaacgccccctctttataaa

SEQ ID NO: 29061 - DNA, 1621 bp, Homo sapiens
  source 1..1621: mol_type = unassigned DNA
agcaaaggaggatggcgaggggctgatactgaacccgggaagggtgggctgtgctgaagccagagccggagccggagctggggccagaacccgagcagtgagttcctccactggctgccggctggcggcgctcgccgccttgggcaggacccacctcgccttcctcccggcgtggcagatgctccagctgccatgtccacgcagagacttcggaatgaagactaccacgactacagctccacggacgtgagccctgaggagagcccgtcggaaggcctcaacaacctctcctccccgggctcctaccagcgctttggtcaaagcaatagcacaacatggttccagaccttgatccacctgttaaaaggcaacattggcacaggactcctgggactccctctggcggtgaaaaatgcaggcatcgtgatgggtcccatcagcctgctgatcataggcatcgtggccgtgcactgcatgggtatcctggtgaaatgtgctcaccacttctgccgcaggctgaataaatcctttgtggattatggtgatactgtgatgtatggactagaatccagcccctgctcctggctccggaaccacgcacactggggaagacgtgttgtggacttcttcctgattgtcacccagctgggattctgctgtgtctattttgtgtttctggctgacaactttaaacaggtgatagaagcggccaatgggaccaccaataactgccacaacaatgagacggtgattctgacgcctaccatggactcgcgactctacatgctctccttcctgcccttcctggtgctgctggttttcatcaggaacctccgagccctgtccatcttctccctgttggccaacatcaccatgctggtcagcttggtcatgatctaccagttcattgttcagaggatcccagaccccagccacctccccttggtggccccttggaagacctaccctctcttctttggcacagcgattttttcatttgaaggcattggaatggttctgcccctggaaaacaaaatgaaggatcctcggaagttcccactcatcctgtacctgggcatggtcatcgtcaccatcctctacatcagcctggggtgtctggggtacctgcaatttggagctaatatccaaggcagcataaccctcaacctgcccaactgctggttgtaccagtcagttaagctgctgtactccatcgggatctttttcacctacgcactccagttctacgtcccggctgagatcatcatccccttctttgtgtcccgagcgcccgagcactgtgagttagtggtggacctgtttgtgcgcacagtgctggtctgcctgacatgtgagtagaagatgataattgccttgcttgtttttccctaaagggcacccagtctgcaggctttcatgagaaaagacaatgtgtgttgtagtgaagctggctatgtttgtgacagagaacctggcccatggcctcactttcagagttgaggcacctccagatggggaagtgaattaattacatatgtactgtaaagaacatgggaatgaggacagtggtttatgtatagatagggtatgaaatgctgtggaggtggttatcattcagagt

SEQ ID NO: 29062 - DNA, 3421 bp, Homo sapiens
  source 1..3421: mol_type = unassigned DNA
agcttggccagagccagcccgggcacacaccactgtgctggggtgtacatctacactagacaccttcctgcttccctccttccagagcagacctctttgtcaccccgagctccttgtttcttaagcagtcatgtctgtgacaaaaagtactgagggtccccagggagccgttgccatcaaattggaccttatgtcgcctcctgaaagtgccaagaagttggagaacaaggactctacattcttggatgaaagtccttcagagtcagcaggcttgaagaagaccaagggcataacagtgttccaggccttgattcacctggtgaaaggcaacatgggcacagggatcctgggactacccctcgctgtgaagaacgcgggcatcctgatgggcccactcagtctgctggtgatgggcttcattgcctgccactgtatgcacatcctggtcaagtgtgcccagcgcttctgtaagaggcttaacaagccctttatggactatggggacacggtgatgcatggactagaagccaaccccaacgcctggctccagaatcacgctcactggggaaggcatatcgtgagcttcttccttattatcacccaacttggcttctgctgtgtgtacattgtgtttttggctgataatttaaaacaggtagtggaagctgttaatagcacaaccaacaactgctattccaatgagacggtgattctgacccccaccatggactcgcgactctacatgctctccttcctgcccttcctggtgctgctggtcctcatccggaacctcaggatcttgaccatcttctccatgctggccaacatcagcatgctggtcagcttggtcatcatcatacagtacattacccaggaaatcccagaccccagccggttgccactggtagcaagctggaagacctaccctctcttcttcggaacagccattttttcttttgaaagcattggtgtggttctgcctctggaaaacaagatgaagaatgcccgccacttcccagccatcctgtctttgggaatgtccatcgtcacttccctatacattggcatggcggctctgggctacctgcggtttggagatgacatcaaggccagcataagccttaacctgcctaactgctggctgtaccagtctgtcaagcttctctacattgccggcatcctgtgcacctatgccctgcagttctacgtccctgcagaaatcatcatcccctttgccatctcccgggtgtcaacacgctgggcactgcctctggatctgtccattcgcctcgtcatggtctgcctgacatgcctcctggccatcctcatcccccgcctggacctggtcatctccctggtgggctccgtgagtggcaccgccctggccctcatcatcccaccgctcctggaggtcaccacgttctactcagagggcatgagccccctcaccatcttcaaggacgccctgatcagcatcctgggcttcgtgggctttgtggtggggacctaccaggccctggacgagctgctcaagtcagaagactctcaccccttttccaactccaccacttttgttcggtgagcctggcactgctccttgcctaccagcacccgacttttaattatatggatctctttttttttttttttttttttttgagacggagtttctgtcttgttgcccagactggagtacaatgatgcgatctcagctcaccacaacttcggcctcctgggttcaagcgattctcctgcctcagcctcccgagtagttgggattagaggcatagtccagcacgcctggctaattttgtatttttagtagagacggggtttctccatgttggtcaggctggtcttgaactcccgacctcaggtgatccacccaccccggcctcccaaaatgctgggatcacaggcgtgagccacctcgcctggccagatctcttttatatgcattatctttatgtcactgctttgccttttctctgggccaagtcatggtgaaacaagaaagctacaagctctaaatggtaattttttacatttttgttttgtttattacttcttcttttcatacctctggcattccactacattgtgagctttcccttggaaggctctggactctatccaagcttatgataattcacacaatgaatttcatacctagcgtggagctatgcaagaagcagccaccagagggccccaagtggcagcaactggccaaaggagatgcagccagctaagactgtccacactttggcagacaaccggttttcccttttctgggtctgttcaaaaagcaaacattaagggtgggcacataatccacaagccagaaagttgtgcacggctccagtgttgagatgggtagggccaagatgaccagtgtgaaaactctcagatagaaaggagccatgcatattaaatgaggggcaacaaacatttcaaacgattagataacattttctcccaactcaaagatcccaacaatgaataggaggcatggaagtagatgtgccaatggggagggatgaggagtgaacatgaatattatttgaatagactttacctcttaattcttgcaacatgcattcttgattacctactgtgtgccaaacaagattttgtagaatattgcaaaaatgaccataaattcctcgtgataatgtgactttgcacctgctcctatgaaaagatgaagtctgtatctgtatcccttaaatttttttgcttgtttgtcggttttgttttgtgttttgtttttttgagatgaagtctcgctctgttgcccaggctggagtgcaatggcacaatctcggctcactgcaacctccacctcctgggttcaagcgattcttctgcctcagcctcccaagtagctaggattacaagtgcctgccactatgcctggctaatttttgtttttcgtagagatggggttttaccatgttggccaggctggtctcaaactcctgacctcaggtgatccacttgcctcggcctcccaaagtgctgagattacaagtgtgagccaccacgcccagcctctcccctttaaatttgatcttggccttgtaacttgctttggccaatgggacattagtaaatgtgatgcagtcagaggtttggtaataacctatgcatcaggacttacatcacttgctgctctatggagttgagaccaccaagtaaagcatcctgggctagcctaccggaggatcagagaccatgtggaacataaatgaatcatcccagttgagccctgtccgcagatcaaccagcctaccaacttccagacacgagtaaagccatcctagactatatccaaccccagtcaggctgacacagaccataagaattgtacagataatccacagaactgtgataaataataaagatgtttgtaattttaata

SEQ ID NO: 29063 - DNA, 2459 bp, Homo sapiens
  source 1..2459: mol_type = unassigned DNA
atgaatgatactgccgttctgcctctggaaaacaagatgaagaatgcccgccacttcccagccatcctgtctttgggaatgtccatcgtcacttccctatacattggcatggcggctctgggctacctgcggtttggagatgacatcaaggccagcataagccttaacctgcctaactgctggctgtaccagtctgtcaagcttctctacattgccggcatcctgtgcacctatgccctgcagttctacgtccctgcagaaatcatcatcccctttgccatctcccgggtgtcaacacgctgggcactgcctctggatctgtccattcgcctcgtcatggtctgcctgacatgcctcctggccatcctcatcccccgcctggacctggtcatctccctggtgggctccgtgagtggcaccgccctggccctcatcatcccaccgctcctggaggtcaccacgttctactcagagggcatgagccccctcaccatcttcaaggacgccctgatcagcatcctgggcttcgtgggctttgtggtggggacctaccaggccctggacgagctgctcaagtcagaagactctcaccccttttccaactccaccacttttgttcggtgagcctggcactgctccttgcctaccagcacccgacttttaattatatggatctctttttttttttttttttttttttgagacggagtttctgtcttgttgcccagactggagtacaatgatgcgatctcagctcaccacaacttcggcctcctgggttcaagcgattctcctgcctcagcctcccgagtagttgggattagaggcatagtccagcacgcctggctaattttgtatttttagtagagacggggtttctccatgttggtcaggctggtcttgaactcccgacctcaggtgatccacccaccccggcctcccaaaatgctgggatcacaggcgtgagccacctcgcctggccagatctcttttatatgcattatctttatgtcactgctttgccttttctctgggccaagtcatggtgaaacaagaaagctacaagctctaaatggtaattttttacatttttgttttgtttattacttcttcttttcatacctctggcattccactacattgtgagctttcccttggaaggctctggactctatccaagcttatgataattcacacaatgaatttcatacctagcgtggagctatgcaagaagcagccaccagagggccccaagtggcagcaactggccaaaggagatgcagccagctaagactgtccacactttggcagacaaccggttttcccttttctgggtctgttcaaaaagcaaacattaagggtgggcacataatccacaagccagaaagttgtgcacggctccagtgttgagatgggtagggccaagatgaccagtgtgaaaactctcagatagaaaggagccatgcatattaaatgaggggcaacaaacatttcaaacgattagataacattttctcccaactcaaagatcccaacaatgaataggaggcatggaagtagatgtgccaatggggagggatgaggagtgaacatgaatattatttgaatagactttacctcttaattcttgcaacatgcattcttgattacctactgtgtgccaaacaagattttgtagaatattgcaaaaatgaccataaattcctcgtgataatgtgactttgcacctgctcctatgaaaagatgaagtctgtatctgtatcccttaaatttttttgcttgtttgtcggttttgttttgtgttttgtttttttgagatgaagtctcgctctgttgcccaggctggagtgcaatggcacaatctcggctcactgcaacctccacctcctgggttcaagcgattcttctgcctcagcctcccaagtagctaggattacaagtgcctgccactatgcctggctaatttttgtttttcgtagagatggggttttaccatgttggccaggctggtctcaaactcctgacctcaggtgatccacttgcctcggcctcccaaagtgctgagattacaagtgtgagccaccacgcccagcctctcccctttaaatttgatcttggccttgtaacttgctttggccaatgggacattagtaaatgtgatgcagtcagaggtttggtaataacctatgcatcaggacttacatcacttgctgctctatggagttgagaccaccaagtaaagcatcctgggctagcctaccggaggatcagagaccatgtggaacataaatgaatcatcccagttgagccctgtccgcagatcaaccagcctaccaacttccagacacgagtaaagccatcctagactatatccaaccccagtcaggctgacacagaccataagaattgtacagataatccacagaactgtgataaataataaagatgtttgtaatttt

SEQ ID NO: 29064 - DNA, 2456 bp, Homo sapiens
  source 1..2456: mol_type = unassigned DNA
gagcctggccccacgtccaggcaccaggacctccaatccaatggtgtcttcttcctcccagtcacactgttcactttgccctacagcagcaagggctaaactaggagaggccaaaagcccaggcaagtcctggttgggcaagcaattgcgagtgaaactgaggaccatcctgactgagatgggtctttcataagtcccccaagagccaggtgaggcatcatcaacatcagcctctcctgccaccaccgcttccctgattcatgcacttcaggcttcagccagcagcacgcatccttggggttaggagccagcatctcaggtcagcagccatggtttctctggagaaagacccatcagaggctcattcagagccttaaccctgagcctctgccacctacccaccgtgttgaagatgtcattgcttggaagggactacaacagtgagctgaactccttggacaacggacctcagtcaccctcagagagcagcagtagcattacttcagagaatgtccatcctgctggagaagctggactatcgatgatgcaaactttgatccacttgttgaaatgcaacattggcacagggctcctggggcttcccctggccataaagaatgccggcttgttggtcggtcctgtcagccttctggccatcggggtcctcaccgtgcactgcatggtcatcctgttgaactgtgctcaacacctcagccagagactgcagaagacttttgtgaactatggagaggccacgatgtacggccttgaaacctgcccgaacacctggctgagggcccatgcagtgtggggaaggtacactgtcagcttcttattagtcatcacccagctgggcttctgcagtgtttattttatgtttatggcagacaatttacaacagatggtggaaaaagcccacgtgacctccaacatctgccagcccagggagattctgacgctgacccccatcctggacattcgtttctacatgctgataatcctgcccttcctgatcctgttggtgtttatccagaacctcaaggtgctgtccgtcttctcgacattggccaacatcaccacccttgggagcatggctctgatctttgagtatatcatggaggggattccatatcccagcaacctacccttgatggcaaactggaagaccttcttgctgttctttggtacagccatcttcacatttgaaggcgtcggtatggttctgcctctcaaaaaccagatgaagcatccacagcagttttcttttgttctgtacttggggatgtccattgtcatcatcctctatatcttactggggacactgggctacatgaagtttgggtcagacacccaggccagcatcaccctcaacttgcccaattgctggttgtaccagtcagtcaagctgatgtactctatcggcatcttcttcacctatgccctccagttccacgtcccagctgagatcatcatcccgtttgccatctcccaagtgtcagagagctgggcactgtttgtagacctgtctgtccgctcagccttggtctgtctaacctgtgtctcagccatcctcatcccccgcctggacttggtcatctccctggtaggctccgtgagcagcagcgccctggctctcatcatcccagccctcctggagatcgtcatcttttactctgaggacatgagctgtgtcaccattgccaaggacatcatgattagcatcgtgggccttttagggtgtatatttgggacataccaagccctctatgagttgccccaacccatcagccattccatggccaactccacaggtgtccatgcataattatctgtttttattctaatagctctcccttcctcccatccccagtttgacttccatgtggatgttatataccttcatcaaatcccaacatctctatattaattagtggcgtctttatctttccaagagaaatgcagatgagaaaagttagcactgatgtctctcaggctacacctcttttggttttatattttttggatggccttttgtacctctgaaccaaaattagattcaactattcatattatcagcctcattttatggaaaagggatgccacttaccccaatagcccttgaaacagagaccaagcataaatacaaaagtaactgttttctctacactgcagtagctgcccttaaagcatcagatttagaaaagtgtatgttgggcgaagggagttttctatttagatattctaagtagaagagtcatagacagaacaaaaacagaactcagcagtaattttgtccaaccactggctccgccactgatttcctactggccctcaggcaagttcctccccatctctcagtctatgaagtgaacagttggactaactgattattaaggactctgtcaactctgatattctgaaagtgaataaaagaaattaacttatccaccaaccac

SEQ ID NO: 29065 - DNA, 1720 bp, Homo sapiens
  source 1..1720: mol_type = unassigned DNA
ggcttcagccagcagcacgcatccttggggttaggagccagcatctcaggtcagcagccatggtttctctggagaaagacccatcagaggctcattcagagccttaaccctgagcctctgccacctacccaccgtgttgaagatgtcattgcttggaagggactacaacagtgagctgaactccttggacaacggacctcagtcaccctcagagagcagcagtagcattacttcagagaatgtccatcctgctggagaagctggactatcgatgatgcaaactttgatccacttgttgaaatgcaacattggcacagggctcctggggcttcccctggccataaagaatgccggcttgttggtcggtcctgtcagccttctggccatcggggtcctcaccgtgcactgcatggtcatcctgttgaactgtgctcaacacctcagccagagactgcagaagacttttgtgaactatggagaggccacgatgtacggccttgaaacctgcccgaacacctggctgagggcccatgcagtgtggggaagatggaatttggctctgtcacccaggctggagtgcagtggcaagatctcagctcactgcaacccccaccttcagggttcaagcaattctcctgcccaagcctcccgagtagctgggatttacaggtacactgtcagcttcttattagtcatcacccagctgggcttctgcagtgtttattttatgtttatggcagacaatttacaacagatggtggaaaaagcccacgtgacctccaacatctgccagcccagggagattctgacgctgacccccatcctggacattcgtttctacatgctgataatcctgcccttcctgatcctgttggtgtttatccagaacctcaaggtgctgtccgtcttctcgacattggccaacatcaccacccttgggagcatggctctgatctttgagtatatcatggaggggattccatatcccagcaacctacccttgatggcaaactggaagaccttcttgctgttctttggtacagccatcttcacatttgaaggcgtcggtatggttctgcctctcaaaaaccagatgaagcatccacagcagttttcttttgttctgtacttggggatgtccattgtcatcatcctctatatcttactggggacactgggctacatgaagtttgggtcagacacccaggccagcatcaccctcaacttgcccaattgctggttgtaccagtcagtcaagctgatgtactctatcggcatcttcttcacctatgccctccagttccacgtcccagctgagatcatcatcccgtttgccatctcccaagtgtcagagagctgggcactgtttgtagacctgtctgtccgctcagccttggtctgtctaacctgtgtctcagccatcctcatcccccgcctggacttggtcatctccctggtaggctccgtgagcagcagcgccctggctctcatcatcccagccctcctggagatcgtcatcttttactctgaggacatgagctgtgtcaccattgccaaggacatcatgattagcatcgtgggccttttagggtgtatatttgggacataccaagccctctatgagttgccccaacccatcagccattccatggccaactccacaggtgtccatgcataattatctgtttttattctaatagctctcccttcctcccatccc

SEQ ID NO: 29066 - DNA, 3042 bp, Homo sapiens
  source 1..3042: mol_type = unassigned DNA
cgccggggcagggaggcgggcaccaggcgcgggtccctccgggcaggggaggtaggcctgggcctgacgccggccacgcagcggcgggagagtgagcactcgggcggcggcgtcctggagacccgcgagagatggaagcggcggcgacgccggcggctgccggggcggcgaggcgcgaggagctagatatggatgtaatgaggcccttgataaatgagcagaattttgatgggacatcagatgaagaacatgagcaagagcttctgcctgttcagaagcattaccaacttgatgatcaagagggcatttcatttgtacaaactcttatgcaccttcttaaaggaaatattggaactggccttttaggacttccattggcaataaaaaatgcaggcatagtgcttggaccaatcagccttgtgtttataggaattatttctgttcactgtatgcacatattggtacgttgcagtcactttctatgtctgaggtttaaaaagtcaacattaggttatagtgacactgtgagctttgctatggaagtgagtccttggagttgtcttcagaagcaagcagcatgggggcggagtgtggttgacttttttctggtgataacacagctgggattctgtagtgtttatattgtcttcttagctgaaaatgtgaaacaagttcatgaaggattcctggagagtaaagtgtttatttcaaatagtaccaattcatcaaacccttgtgagagaagaagtgttgacctaaggatatatatgctttgctttcttccatttataattcttttggtcttcattcgtgaactaaagaatctatttgtactttcattccttgccaacgtttccatggctgtcagtcttgtgataatttaccagtatgttgtcaggaacatgccagatccccacaaccttccaatagtggctggttggaagaaatacccactcttttttggtactgctgtatttgcttttgaaggcataggagtggtccttccactggaaaaccaaatgaaagaatcaaagcgtttccctcaagcgttgaatattggcatggggattgttacaactttgtatgtaacattagctactttaggatatatgtgtttccatgatgaaatcaaaggcagcataactttaaatcttccccaagatgtatggttatatcaatcagtgaaaattctatattcctttggcatttttgtgacatattcaattcagttctatgttccagcagagatcattatccctgggatcacatccaaatttcatactaaatggaagcaaatctgtgaatttgggataagatccttcttggttagtattacttgtgccggagcaattcttattcctcgtttagacattgtgatttccttcgttggagctgtgagcagcagcacattggccctaatcctgccacctttggttgaaattcttacattttcgaaggaacattataatatatggatggtcctgaaaaatatttctatagcattcactggagttgttggcttcttattaggtacatatataactgttgaagaaattatttatcctactcccaaagttgtagctggcactccacagagtccttttctaaatttgaattcaacatgcttaacatctggtttgaaatagtaaaagcagaatcatgagtcttctatttttgtcccatttctgaaaattatcaagataactagtaaaatacattgctatatacataaaaatggtaacaaactctgttttctttggcacgatattaatattttggaagtaatcataactctttaccagtagtggtaaacctatgaaaaatccttgcttttaagtgttagcaatagttcaaaaaattaagttctgaaaattgaaaaaattaaaatgtaaaaaaattaaagaataaaaatacttctattattcttttatctcagtaagaaataccttaaccaagttatctctcttttatgctactcttttgccactcacttgagaacagaataggatttcaacaataagagaataaaataagaacatgtataacaaaaagctctctccagatcatccctgtgaatgccaaagtaaactttatgtacagtgtaaaaaaaaaaaatctcagttatgtttttattagccaaattctaatgattggctcctggaagtatagaaaactcccattaacataatataagcatcagaaaattgcaaacactagaattaattttacactctaatggtagttgatcttcatagtcaagaggcactgttcaagatcatgacttagtgtttcaatgaaatttgaaaagggactttaaaacttatccagtgcaactcccttgtttttcgtcagaggaaaaggaggcctagaaaggttaagtaacttggtcgagaccactcagccttgagatcaagaaaacctaatcttctgactcccaggccaggatgttttatttctcacatcatgtccaagaaaaagaataaattatgttcagcttaattttagtgttgaatctatttgattatattttaatactttgaaaatgaatgtgtgatttttaatagtatatgtgacctgagcagaaaatcagggaactccaagaagcctacactgtggccatataaacctcagcaagagaaagaagctatgttcttttaaaacagaatagagaccgcttgctggtgaaactcctggctagtaagatgtgtgtctagctatactatttgtggcttgagcttttttaattattaccttcctttcctgagttttgtaggcaccacattcctgaatggcagaaaatagacacctcagaaaacggaggatttgtggactctttccagccctgtggcttttcttatcacagccttttatttattatgagcagaataaaagaatcagctaggtgtggtggtctgtgcttataatcccagctactctggaggataagttgggaggatcacttgagaggccaggagcttgagaccagcctgggcagcatagtgagacctcgactctataaaacataaaaatttaaaaaaaaat

SEQ ID NO: 29067 - DNA, 3664 bp, Homo sapiens
  source 1..3664: mol_type = unassigned DNA
cggcggcgcaggtgaggcgcggggccggggccggaccgggaggcggggaccccccgcccccccgcccgcacctgcggggcagccggcgctcaggcgccgcagccgctcagcacctgcggcgccctcagggagccgggcgcggggccctgcgcactcggagctcggctcctctccttccttttcttttttttcggggggaggtgggggctggtttggatgttttccgagagccggggacggtctcaagctattttcgcggagggaagtctttgaaatacgacatctagaagagtggccctcggcgacaatgccgggcgttcccggaccggggcaacgctgggattccggggaagtggaggcagagggagcgggcacggggccggcagccgctccacggagtccccggcaggggcgagcttagctgtccagccgggtcccctgcccaccccggcccgggccgcggtgacagctgagggtccagagagccggcaggaggggaccctgcgcattgtctgccgcgatggggacgtgggcgtgcccgcggaattcacctcctccggggaccagccgcccagggaggagccggcacagaacgctggctcggagcgccggcaccctgggcctttgcgttgtttgtcggctgagcagctggttcccggagcccgtgggcctcctggccaatgcgagtgacagcgaccttctgggtttataataaagggcttgacgcgccggaaagtcccctcgccgctggccaccagccttccagcccttacggcccacgccgtaatcctggtgaccgagaagagagcagagccactgccagaaggaaggggacaagacccagcaggacaccttctttccacgctttccagcctgtgggagcggcaggggcaacagagagaggatctggagccaggattaatgactcatttatgaagcatcttattctgcgaccgaggctcagtggtcagtggcgacgtaaatggctcgactccccgctggcattcgcttcatcatctcattctccagggatcagtggtacagagccttcatttttattttgacatttctgctgtatgcaagttttcacttatctcgaaagcctatcagcatagttaagggtgagctccacaagtactgcactgcttgggatgaagctgacgtcaggttcagcagccagaacaggaagtctgggtccgctgccccccaccagctccctgacaatgagaccgactgtggctgggcaccgtttgataagaacaactatcagcagctgcttggggccctggactactccttcctgtgcgcctatgccgtggggatgtacctcagtggcatcattggggagcgcctgccgattaggtattacctaactttcgggatgctcgccagcggagccttcaccgccctgttcggcttagggtatttctacaacatccacagtttcggattctacgtggtaactcaggtcatcaacgggctggtgcagaccaccggctggcccagcgtcgtcacctgcctcggcaactggtttggaaaaggaaggagaggtttgattatgggggtctggaactcccacacctccgtgggcaacatcttggggtcattgatcgctggctactgggtgtccacatgctggggcctgtccttcgtcgtgcctggagccatcgtggcagccatggggatagtgtgctttctcttcctcattgaacatccgaacgacgtcaggtgctcctccaccctggtgacgcactcaaaaggctatgagaatggtacaaacagattgagactccagaagcaaatcttgaagagcgaaaagaacaagcctctggacccagagatgcagtgcctgctgctctcagatgggaagggctccatccacccgaaccacgtcgtcattctccccggggacggtgggagtggcacggccgccatcagcttcacaggggccttgaaaattccaggcgtgatagagttctcactgtgtctgctgtttgccaagctggtcagctatactttcctcttctggctgcccctgtacatcacgaatgtggatcaccttgatgccaaaaaggcgggggagctctccaccctgtttgacgtgggcggaatctttggtgggatcctggcaggtgtgatctcagaccgactggagaaaagggcctccacctgcggcctgatgctgctgctcgcggcccccacgctctacatcttctccaccgtcagcaagatggggcttgaggccaccatcgccatgctgctgctcagcggagccctggtcagtgggccctacacactcatcaccaccgccgtctccgccgacctggggactcataaaagtctgaaaggcaacgcgcacgccctctccaccgtgacggccatcattgacgggacgggctctgtaggagcagccctgggccccctgctggctgggctcctctccccgtccggctggagcaatgtgttttacatgctgatgtttgcagatgcctgtgccttactgttcctgatccgcctcatacacaaggagctgagctgcccagggtcagctacgggggaccaagttccatttaaggaacagtgacaccccaccccagtcccgtggagggggtctgggcccacccttcacaactgcctttcaaggacagttcagacaaagggccctgcatggaaagagtgacctccctttgccttttgcacacgcacctggaaaagacacagaagccaacctgagaacccctggtgctattttaaaggagacatattgctgaacagcagtgagaaaagtctgcaggaactgctgcctgagccaagccagagaaccgaagacccggccggccctggcctcacaggcgtgtgcccatgcagccacccaaatgcacgcgtgacaacaaggccgggagggtggggggggtgcacaggtagccccgaccctctcaggcattccagccacagaacatcaaagtgagcgagtactgcgctggctgtggcttcagagaacctgtatgtgccacatggaaaaacaggacaccagagcccaccagacagtgccggccagcagagaagcagagagccagcgccacacaacatcaagaaggccgacaaccaggttggaaaccaagacggagctcagacccaccacatcgccccagaggcttttccagcacccatgatgtttcggactgacctaaaaactaattgtcgagaagccaagggtgaggaggcaggaagcacctccggttggaggcacccaggcttgccagccacagagcgccccaaagtcaccgtcatcccagcccctggccttcctgctgccctccggggccatggcactgctgttcagctcaggcacaggggcacagcagaggtttgggaagcggtctccccaccggcactgggattggcgggtccaagcccagcaaccggcttcgctccacaacacacaccacacctgggactgtttttaatacatagcaacagactgggttatttatttaagatgtgtattgtgtcatatgaagtttaagagacataaatggcattttgttatttattaagacaaactccaattgttctctggctgtttttttcagttgtgtctagcaaaatacttatctgccctttgaaataaaatgtttttgtttaaaaaatctcagaacactca

SEQ ID NO: 29068 - DNA, 3094 bp, Homo sapiens
  source 1..3094: mol_type = unassigned DNA
tgggaagttcgcgcaagtgcggctctgcagggaggagggagggccgaggggaaggccctcgagagagtggagggcaacagtggccacggttcctctgtacttcgtttcttccctttatagaattgagagattgctgagcctaaatacatgttgctgcattgcctccgagaatggccggacctatccccactctcaccaaaacagagtgtgggactcactgctccctcgcctactagagcagagccactgccagaaggaaggggacaagacccagcaggacaccttctttccacgctttccagcctgtgggagcggcaggggcaacagagagaggatctggagccaggattaatgactcatttatgaagcatcttattctgcgaccgaggctcagtggtcagtggcgacgtaaatggctcgactccccgctggcattcgcttcatcatctcattctccagggatcagtggtacagagccttcatttttattttgacatttctgctgtatgcaagttttcacttatctcgaaagcctatcagcatagttaagggtgagctccacaagtactgcactgcttgggatgaagctgacgtcaggttcagcagccagaacaggaagtctgggtccgctgccccccaccagctccctgacaatgagaccgactgtggctgggcaccgtttgataagaacaactatcagcagctgcttggggccctggactactccttcctgtgcgcctatgccgtggggatgtacctcagtggcatcattggggagcgcctgccgattaggtattacctaactttcgggatgctcgccagcggagccttcaccgccctgttcggcttagggtatttctacaacatccacagtttcggattctacgtggtaactcaggtcatcaacgggctggtgcagaccaccggctggcccagcgtcgtcacctgcctcggcaactggtttggaaaaggaaggagaggtttgattatgggggtctggaactcccacacctccgtgggcaacatcttggggtcattgatcgctggctactgggtgtccacatgctggggcctgtccttcgtcgtgcctggagccatcgtggcagccatggggatagtgtgctttctcttcctcattgaacatccgaacgacgtcaggtgctcctccaccctggtgacgcactcaaaaggctatgagaatggtacaaacagattgagactccagaagcaaatcttgaagagcgaaaagaacaagcctctggacccagagatgcagtgcctgctgctctcagatgggaagggctccatccacccgaaccacgtcgtcattctccccggggacggtgggagtggcacggccgccatcagcttcacaggggccttgaaaattccaggcgtgatagagttctcactgtgtctgctgtttgccaagctggtcagctatactttcctcttctggctgcccctgtacatcacgaatgtggatcaccttgatgccaaaaaggcgggggagctctccaccctgtttgacgtgggcggaatctttggtgggatcctggcaggtgtgatctcagaccgactggagaaaagggcctccacctgcggcctgatgctgctgctcgcggcccccacgctctacatcttctccaccgtcagcaagatggggcttgaggccaccatcgccatgctgctgctcagcggagccctggtcagtgggccctacacactcatcaccaccgccgtctccgccgacctggggactcataaaagtctgaaaggcaacgcgcacgccctctccaccgtgacggccatcattgacgggacgggctctgtaggagcagccctgggccccctgctggctgggctcctctccccgtccggctggagcaatgtgttttacatgctgatgtttgcagatgcctgtgccttactgttcctgatccgcctcatacacaaggagctgagctgcccagggtcagctacgggggaccaagttccatttaaggaacagtgacaccccaccccagtcccgtggagggggtctgggcccacccttcacaactgcctttcaaggacagttcagacaaagggccctgcatggaaagagtgacctccctttgccttttgcacacgcacctggaaaagacacagaagccaacctgagaacccctggtgctattttaaaggagacatattgctgaacagcagtgagaaaagtctgcaggaactgctgcctgagccaagccagagaaccgaagacccggccggccctggcctcacaggcgtgtgcccatgcagccacccaaatgcacgcgtgacaacaaggccgggagggtggggggggtgcacaggtagccccgaccctctcaggcattccagccacagaacatcaaagtgagcgagtactgcgctggctgtggcttcagagaacctgtatgtgccacatggaaaaacaggacaccagagcccaccagacagtgccggccagcagagaagcagagagccagcgccacacaacatcaagaaggccgacaaccaggttggaaaccaagacggagctcagacccaccacatcgccccagaggcttttccagcacccatgatgtttcggactgacctaaaaactaattgtcgagaagccaagggtgaggaggcaggaagcacctccggttggaggcacccaggcttgccagccacagagcgccccaaagtcaccgtcatcccagcccctggccttcctgctgccctccggggccatggcactgctgttcagctcaggcacaggggcacagcagaggtttgggaagcggtctccccaccggcactgggattggcgggtccaagcccagcaaccggcttcgctccacaacacacaccacacctgggactgtttttaatacatagcaacagactgggttatttatttaagatgtgtattgtgtcatatgaagtttaagagacataaatggcattttgttatttattaagacaaactccaattgttctctggctgtttttttcagttgtgtctagcaaaatacttatctgccctttgaaataaaatgtttttgtttaaaaaatctcagaacactca

SEQ ID NO: 29069 - DNA, 494 bp, Homo sapiens
  source 1..494: mol_type = unassigned DNA
ggcaccctgggcctttgcgttgtttgtcggctgagcagctggttcccggagcccgtgggcctcctggccaatgcgagtgacagcgaccttctgggtttataataaagggcttgacgcgccggaaagtcccctcgccgctggccaccagccttccagcccttacggcccacgccgtaatcctggtgaccgagaagctctttgcctggaaggtgcctgcctgcctgcctgccggcccttgaacttaaatcgtctgaagttgtagagcagagccactgccagaaggaaggggacaagacccagcaggacaccttctttccacgctttccagcctgtgggagcggcaggggcaacagagagaggatctggagccaggattaatgactcatttatgaagcatcttattctgcgaccgaggctcagtggtcagtggcgacgtaaatggctcgactccccgctggcattcgcttcatcatctcattctccagggatcagtg

SEQ ID NO: 29070 - DNA, 568 bp, Homo sapiens
  source 1..568: mol_type = unassigned DNA
ggggagctgtggctcagacctctggtttctgcgcctcctcactctccaaacccaacctcgaggttcccccgccgctgcgcaccctgggaagccctttctcaccaggagctctcaccccaatatcattctctccctcctcctccaactcctccgagcccaggtccgacatggtctcgccccagcctggatcacagccgcagcgcctctagcagctttatagaattgagagattgctgagcctaaatacatgttgctgcattgcctccgagaatggccggacctatccccactctcaccaaaacagagtgtgggactcactgctccctcgcctactagagcagagccactgccagaaggaaggggacaagacccagcaggacaccttctttccacgctttccagcctgtgggagcggcaggggcaacagagagaggatctggagccaggattaatgactcatttatgaagcatcttattctgcgaccgaggctcagtggtcagtggcgacgtaaatggctcgactccccgctggcattcgcttcatcatctcattctccagggatcagtg

SEQ ID NO: 29071 - DNA, 3327 bp, Homo sapiens
  source 1..3327: mol_type = unassigned DNA
gcacaggaggggaggagaccgcgcgcgggacggggaggaatggcctgtccgcgttaaaccatcacaagccatggttgcggaagggccacgcgtcccccagtaggagaatgactccgattcgtgaccctcagcgccggtgcatgtcgatgtaagtgcgaggccggcgagcagagtgtgagtgggggttggtggtgaggggagattctgatgcaatcggcccggaaaggaggagagccaggcgagcgcggactggggcggccacgccactccgccagaaggtcgccaggagcctccgcccttcaccttcctccgaaatccgccaggccacgccaagctccctgcccaacccttactgacgggggccacattttcccggcctccgcagccagaccttgacacaaaggacatcaaactgccgagggtaaaaaccccggaagggcggacacctccacatcgccttttgccacctttccctttatttccggagatatttattgagtgtctactgtgtgccaggcactatatctatgtgcatagaaaaaccctggaaggccatacaacaatatatatagagtgatcgtctctgcttgctgagctaacaggggtgtcaagcttccattttggtatctacttctaaatacactcagaacaggagaaatttggactaattttcaaactacagacactttctaatcatgatgcatttcaaaagtggactcgaattaactgagttgcaaaacatgacagtgcccgaggatgataacattagcaatgactccaatgatttcaccgaagtagaaaatggtcagataaatagcaagtttatttctgatcgtgaaagtagaagaagtctcacaaacagccatttggaaaaaaagaagtgtgatgagtatattccaggtacaacctccttaggcatgtctgtttttaacctaagcaacgccattatgggcagtgggattttgggactcgcctttgccctggcaaacactggaatcctactttttctggtacttttgacttcagtgacattgctgtctatatattcaataaacctcctattgatctgttcaaaagaaacaggctgcatggtgtatgaaaagctgggggaacaagtctttggcaccacagggaagttcgtaatctttggagccacctctctacagaacactggagcaatgctgagctacctcttcatcgtaaaaaatgaactaccctctgccataaagtttctaatgggaaaggaagagacattttcagcctggtacgtggatggccgcgttctggtggtgatagttacctttggcataattctccctctgtgtctcttgaagaacttagggtatcttggctatactagtggattttccttgagctgtatggtttttttcctaattgtggttatttacaagaaatttcaaattccctgcattgttccagagctaaattcaacaataagtgctaattcaacaaatgctgacacgtgtacgccaaaatatgttaccttcaattcaaagaccgtgtatgctttacccaccattgcatttgcatttgtttgccacccgtcagtcctgccaatttacagtgagcttaaagaccgatcacagaaaaaaatgcagatggtttcaaacatctcctttttcgccatgtttgttatgtacttcttgactgccatttttggctacttgacattctatgacaacgtgcagtccgacctccttcacaaatatcagagtaaagatgacattctcatcctgacagtgcggctggctgtcattgttgctgtgatcctcacagtgccggtgttatttttcacggttcgttcatctttatttgaactggctaagaaaacaaagtttaatttatgtcgtcataccgtggttacctgcatactcttggttgttatcaacttgttggtgatcttcataccctccatgaaggatatttttggagtcgtaggagttacatctgctaacatgcttattttcattcttccttcatctctttatttaaaaatcacagaccaggatggagataaaggaactcaaagaatttgggctgcccttttcttgggcctgggggtgttgttctccttggtcagcattcccttggtcatctatgactgggcctgctcatcgagtagtgacgaaggccactgaaacccgccgagaaaaagaaacatccctgttgtctgctcagtcaagtccccacacatcagcaatctctcaccacttcttttgcaagtttacagaagcaaacagaaatgtacaggatacttaaaatggaataactttttggttgcaaaacagagacatggttctataatgcttcatgtccctccaagatttgagatcaatttagggattgtgaaatttttttttcaaatttcatacaatcatatttcccagtacttttcacaatcattttttacccatctaactctatgttttgtggcttcccggtctcttagaactttgaaaacatgatatacaataatgtttatttattatacatccagattctgaaataattttcctactgatgttcagctcacactatctgtacctttttagaagagaaaagaatcttgaattgtatatatttattttgctttacagaaaaaaatggtttcgtaaataatttgcctattttggttaacatagcacatggagataatcatctgaaagttatagggcactgccactgctgaatcagagcatgcccaatatttgaggtggctctgatttcctggcagctgaactcgggtagtccagtggcctagctggtaccacatctattcccatccagagacattctctggcaagtgttctcagctgaaaagtggttggggatgattcttaccttggtaattaaatgaagctacacatttgggtaatctagcaaatgaagtattttttccctcttggcaacttgtgtcagagttactctggtctgagtcaactttcgctggggaaaacctatggaacctactgcaaaaagattgtccaaaatgcctaagaaaatactcctctgatgcatttagccttcaaccctacctgtcttgctgaagggagaaaaatgttttagtacattataggcccagcagcttttattcatgtccaccagctagttgcacagagaatcatgtgtacctaactaaggatgatctaggataagtaactcctgttttatattgagtattttagggaagtctttaaaagacttgttttatatctataaatctaggttattacaaatacaagaattttgtaccttaaataagcctcatttctatttcttcttcattaattctccatctagtcttgt

SEQ ID NO: 29072 - DNA, 3436 bp, Homo sapiens
  source 1..3436: mol_type = unassigned DNA
agaccgcgcgcgggacggggaggaatggcctgtccgcgttaaaccatcacaagccatggttgcggaagggccacgcgtcccccagtaggagaatgactccgattcgtgaccctcagcgccggtgcatgtcgatgtaagtgcgaggccggcgagcagagtgtgagtgggggttggtggtgaggggagattctgatgcaatcggcccggaaaggaggagagccaggcgagcgcggactggggcggccacgccactccgccagaaggtcgccaggagcctccgcccttcaccttcctccgaaatccgccaggccacgccaagctccctgcccaacccttactgacgggggccacattttcccggcctccgcagccagaccttgacacaaaggacatcaaactgccgagggtaaaaaccccggaagggcggacacctccacatcgccttttgccacctttccctttatttccggagagtcaaggaaacttttgagctatttacagcttgtagcaattatgtaaagtatactcctctgaacaaaatttggagcatgtttgtttctctctacctgatttccccagaatctggaaactatctatatttattgagtgtctactgtgtgccaggcactatatctatgtgcatagaaaaaccctggaaggccatacaacaatatatatagagtgatcgtctctgcttgctgagctaacaggggtgtcaagcttccattttggtatctacttctaaatacactcagaacaggagaaatttggactaattttcaaactacagacactttctaatcatgatgcatttcaaaagtggactcgaattaactgagttgcaaaacatgacagtgcccgaggatgataacattagcaatgactccaatgatttcaccgaagtagaaaatggtcagataaatagcaagtttatttctgatcgtgaaagtagaagaagtctcacaaacagccatttggaaaaaaagaagtgtgatgagtatattccaggtacaacctccttaggcatgtctgtttttaacctaagcaacgccattatgggcagtgggattttgggactcgcctttgccctggcaaacactggaatcctactttttctggtacttttgacttcagtgacattgctgtctatatattcaataaacctcctattgatctgttcaaaagaaacaggctgcatggtgtatgaaaagctgggggaacaagtctttggcaccacagggaagttcgtaatctttggagccacctctctacagaacactggagcaatgctgagctacctcttcatcgtaaaaaatgaactaccctctgccataaagtttctaatgggaaaggaagagacattttcagcctggtacgtggatggccgcgttctggtggtgatagttacctttggcataattctccctctgtgtctcttgaagaacttagggtatcttggctatactagtggattttccttgagctgtatggtttttttcctaattgtggttatttacaagaaatttcaaattccctgcattgttccagagctaaattcaacaataagtgctaattcaacaaatgctgacacgtgtacgccaaaatatgttaccttcaattcaaagaccgtgtatgctttacccaccattgcatttgcatttgtttgccacccgtcagtcctgccaatttacagtgagcttaaagaccgatcacagaaaaaaatgcagatggtttcaaacatctcctttttcgccatgtttgttatgtacttcttgactgccatttttggctacttgacattctatgacaacgtgcagtccgacctccttcacaaatatcagagtaaagatgacattctcatcctgacagtgcggctggctgtcattgttgctgtgatcctcacagtgccggtgttatttttcacggttcgttcatctttatttgaactggctaagaaaacaaagtttaatttatgtcgtcataccgtggttacctgcatactcttggttgttatcaacttgttggtgatcttcataccctccatgaaggatatttttggagtcgtaggagttacatctgctaacatgcttattttcattcttccttcatctctttatttaaaaatcacagaccaggatggagataaaggaactcaaagaatttgggctgcccttttcttgggcctgggggtgttgttctccttggtcagcattcccttggtcatctatgactgggcctgctcatcgagtagtgacgaaggccactgaaacccgccgagaaaaagaaacatccctgttgtctgctcagtcaagtccccacacatcagcaatctctcaccacttcttttgcaagtttacagaagcaaacagaaatgtacaggatacttaaaatggaataactttttggttgcaaaacagagacatggttctataatgcttcatgtccctccaagatttgagatcaatttagggattgtgaaatttttttttcaaatttcatacaatcatatttcccagtacttttcacaatcattttttacccatctaactctatgttttgtggcttcccggtctcttagaactttgaaaacatgatatacaataatgtttatttattatacatccagattctgaaataattttcctactgatgttcagctcacactatctgtacctttttagaagagaaaagaatcttgaattgtatatatttattttgctttacagaaaaaaatggtttcgtaaataatttgcctattttggttaacatagcacatggagataatcatctgaaagttatagggcactgccactgctgaatcagagcatgcccaatatttgaggtggctctgatttcctggcagctgaactcgggtagtccagtggcctagctggtaccacatctattcccatccagagacattctctggcaagtgttctcagctgaaaagtggttggggatgattcttaccttggtaattaaatgaagctacacatttgggtaatctagcaaatgaagtattttttccctcttggcaacttgtgtcagagttactctggtctgagtcaactttcgctggggaaaacctatggaacctactgcaaaaagattgtccaaaatgcctaagaaaatactcctctgatgcatttagccttcaaccctacctgtcttgctgaagggagaaaaatgttttagtacattataggcccagcagcttttattcatgtccaccagctagttgcacagagaatcatgtgtacctaactaaggatgatctaggataagtaactcctgttttatattgagtattttagggaagtctttaaaagacttgttttatatctataaatctaggttattacaaatacaagaattttgtaccttaaataagcctcatttctatttcttcttcattaattctccatctagtcttgtg

SEQ ID NO: 29073 - DNA, 2332 bp, Homo sapiens
  source 1..2332: mol_type = unassigned DNA
gcatcgtcagagagctgcaagagggaggcagcaaggtgcggccgccagcagtgacaccatgtgaccggcacggctcactgacacgcagctttggttaaagagcgggcgcacaggaggggaggagaccgcgcgcgggacggggaggaatggcctgtccgcgttaaaccatcacaagccatggttgcggaagggccacgcgtcccccagtaggagaatgactccgattcgtgaccctcagcgccggtgcatgtcgatatatttattgagtgtctactgtgtgccaggcactatatctatgtgcatagaaaaaccctggaaggccatacaacaatatatatagagtgatcgtctctgcttgctgagctaacaggggtgtcaagcttccattttggtatctacttctaaatacactcagaacaggagaaatttggactaattttcaaactacagacactttctaatcatgatgcatttcaaaagtggactcgaattaactgagttgcaaaacatgacagtgcccgaggatgataacattagcaatgactccaatgatttcaccgaagtagaaaatggtcagataaatagcaagtttatttctgatcgtgaaagtagaagaagtctcacaaacagccatttggaaaaaaagaagtgtgatgagtatattccaggtacaacctccttaggcatgtctgtttttaacctaagcaacgccattatgggcagtgggattttgggactcgcctttgccctggcaaacactggaatcctactttttctggtacttttgacttcagtgacattgctgtctatatattcaataaacctcctattgatctgttcaaaagaaacaggctgcatggtgtatgaaaagctgggggaacaagtctttggcaccacagggaagttcgtaatctttggagccacctctctacagaacactggagcaatgctgagctacctcttcatcgtaaaaaatgaactaccctctgccataaagtttctaatgggaaaggaagagacattttcagcctggtacgtggatggccgcgttctggtggtgatagttacctttggcataattctccctctgtgtctcttgaagaacttagggtatcttggctatactagtggattttccttgagctgtatggtttttttcctaattgtggttatttacaagaaatttcaaattccctgcattgttccagagctaaattcaacaataagtgctaattcaacaaatgctgacacgtgtacgccaaaatatgttaccttcaattcaaagaccgtgtatgctttacccaccattgcatttgcatttgtttgccacccgtcagtcctgccaatttacagtgagcttaaagaccgatcacagaaaaaaatgcagatggtttcaaacatctcctttttcgccatgtttgttatgtacttcttgactgccatttttggctacttgacattctatgacaacgtgcagtccgacctccttcacaaatatcagagtaaagatgacattctcatcctgacagtgcggctggctgtcattgttgctgtgatcctcacagtgccggtgttatttttcacggttcgttcatctttatttgaactggctaagaaaacaaagtttaatttatgtcgtcataccgtggttacctgcatactcttggttgttatcaacttgttggtgatcttcataccctccatgaaggatatttttggagtcgtaggagttacatctgctaacatgcttattttcattcttccttcatctctttatttaaaaatcacagaccaggatggagataaaggaactcaaagaatttgggctgcccttttcttgggcctgggggtgttgttctccttggtcagcattcccttggtcatctatgactgggcctgctcatcgagtagtgacgaaggccactgaaacccgccgagaaaaagaaacatccctgttgtctgctcagtcaagtccccacacatcagcaatctctcaccacttcttttgcaagtttacagaagcaaacagaaatgtacaggatacttaaaatggaataactttttggttgcaaaacagagacatggttctataatgcttcatgtccctccaagatttgagatcaatttagggattgtgaaatttttttttcaaatttcatacaatcatatttcccagtacttttcacaatcattttttacccatctaactctatgttttgtggcttcccggtctcttagaactttgaaaacatgatatacaataatgtttatttattatacatccagattctgaaataattttcctactgatgttcagctcacactatctgta

SEQ ID NO: 29074 - DNA, 3196 bp, Homo sapiens
  source 1..3196: mol_type = unassigned DNA
accgcgcgcgggacggggaggaatggcctgtccgcgttaaaccatcacaagccatggttgcggaagggccacgcgtcccccagtaggagaatgactccgattcgtgaccctcagcgccggtgcatgtcgatgtaagtgcgaggccggcgagcagagtgtgagtgggggttggtggtgaggggagattctgatgcaatcggcccggaaaggaggagagccaggcgagcgcggactggggcggccacgccactccgccagaaggtcgccaggagcctccgcccttcaccttcctccgaaatccgccaggccacgccaagctccctgcccaacccttactgacgggggccacattttcccggcctccgcagccagaccttgacacaaaggacatcaaactgccgagggtaaaaaccccggaagggcggacacctccacatcgccttttgccacctttccctttatttccggaggggtgtcaagcttccattttggtatctacttctaaatacactcagaacaggagaaatttggactaattttcaaactacagacactttctaatcatgatgcatttcaaaagtggactcgaattaactgagttgcaaaacatgacagtgcccgaggatgataacattagcaatgactccaatgatttcaccgaagtagaaaatggtcagataaatagcaagtttatttctgatcgtgaaagtagaagaagtctcacaaacagccatttggaaaaaaagaagtgtgatgagtatattccaggtacaacctccttaggcatgtctgtttttaacctaagcaacgccattatgggcagtgggattttgggactcgcctttgccctggcaaacactggaatcctactttttctggtacttttgacttcagtgacattgctgtctatatattcaataaacctcctattgatctgttcaaaagaaacaggctgcatggtgtatgaaaagctgggggaacaagtctttggcaccacagggaagttcgtaatctttggagccacctctctacagaacactggagcaatgctgagctacctcttcatcgtaaaaaatgaactaccctctgccataaagtttctaatgggaaaggaagagacattttcagcctggtacgtggatggccgcgttctggtggtgatagttacctttggcataattctccctctgtgtctcttgaagaacttagggtatcttggctatactagtggattttccttgagctgtatggtttttttcctaattgtggttatttacaagaaatttcaaattccctgcattgttccagagctaaattcaacaataagtgctaattcaacaaatgctgacacgtgtacgccaaaatatgttaccttcaattcaaagaccgtgtatgctttacccaccattgcatttgcatttgtttgccacccgtcagtcctgccaatttacagtgagcttaaagaccgatcacagaaaaaaatgcagatggtttcaaacatctcctttttcgccatgtttgttatgtacttcttgactgccatttttggctacttgacattctatgacaacgtgcagtccgacctccttcacaaatatcagagtaaagatgacattctcatcctgacagtgcggctggctgtcattgttgctgtgatcctcacagtgccggtgttatttttcacggttcgttcatctttatttgaactggctaagaaaacaaagtttaatttatgtcgtcataccgtggttacctgcatactcttggttgttatcaacttgttggtgatcttcataccctccatgaaggatatttttggagtcgtaggagttacatctgctaacatgcttattttcattcttccttcatctctttatttaaaaatcacagaccaggatggagataaaggaactcaaagaatttgggctgcccttttcttgggcctgggggtgttgttctccttggtcagcattcccttggtcatctatgactgggcctgctcatcgagtagtgacgaaggccactgaaacccgccgagaaaaagaaacatccctgttgtctgctcagtcaagtccccacacatcagcaatctctcaccacttcttttgcaagtttacagaagcaaacagaaatgtacaggatacttaaaatggaataactttttggttgcaaaacagagacatggttctataatgcttcatgtccctccaagatttgagatcaatttagggattgtgaaatttttttttcaaatttcatacaatcatatttcccagtacttttcacaatcattttttacccatctaactctatgttttgtggcttcccggtctcttagaactttgaaaacatgatatacaataatgtttatttattatacatccagattctgaaataattttcctactgatgttcagctcacactatctgtacctttttagaagagaaaagaatcttgaattgtatatatttattttgctttacagaaaaaaatggtttcgtaaataatttgcctattttggttaacatagcacatggagataatcatctgaaagttatagggcactgccactgctgaatcagagcatgcccaatatttgaggtggctctgatttcctggcagctgaactcgggtagtccagtggcctagctggtaccacatctattcccatccagagacattctctggcaagtgttctcagctgaaaagtggttggggatgattcttaccttggtaattaaatgaagctacacatttgggtaatctagcaaatgaagtattttttccctcttggcaacttgtgtcagagttactctggtctgagtcaactttcgctggggaaaacctatggaacctactgcaaaaagattgtccaaaatgcctaagaaaatactcctctgatgcatttagccttcaaccctacctgtcttgctgaagggagaaaaatgttttagtacattataggcccagcagcttttattcatgtccaccagctagttgcacagagaatcatgtgtacctaactaaggatgatctaggataagtaactcctgttttatattgagtattttagggaagtctttaaaagacttgttttatatctataaatctaggttattacaaatacaagaattttgtaccttaaataagcctcatttctatttcttcttcattaattctccatctagtcttgtg

SEQ ID NO: 29075 - DNA, 4888 bp, Homo sapiens
  source 1..4888: mol_type = unassigned DNA
gatacacaaagagaaggcgcccgggcggccgcggtcccgcccactgacgcgtccccggggtgccgctataacccgccgctcgcagggctgctccacagccgcgcgacgccgccgccttagaacgcctttccagtactgctagcagcagcccgaccacgcgttaccgcacgctcgcgcctttcccttgacacggcggacgccggaggattggggcggcaatttgtcttttccttttttattaaaattatttttcctgcctgttgttggatttggggaaattttttgtttgttttttatgatttgtatttgactgagagaaacccactgaagacgtctgcgtgagaatagagaccaccgaggccgactcgcgggccgctgcacccaccgccaaggacaaaaggagcccagcgctactagctgcacccgattcctcccagtgcttagcatgaagaaggccgaaatgggacgattcagtatttccccggatgaagacagcagcagctacagttccaacagcgacttcaactactcctaccccaccaagcaagctgctctgaaaagccattatgcagatgtagatcctgaaaaccagaactttttacttgaatcgaatttggggaagaagaagtatgaaacagaatttcatccaggtactacttcctttggaatgtcagtatttaatctgagcaatgcgattgtgggcagtggaatccttgggctttcttatgccatggctaatactggaattgctctttttataattctcttgacatttgtgtcaatattttccctgtattctgttcatctccttttgaagactgccaatgaaggagggtctttattatatgaacaattgggatataaggcatttggattagttggaaagcttgcagcatctggatcaattacaatgcagaacattggagctatgtcaagctacctcttcatagtgaaatatgagttgcctttggtgatccaggcattaacgaacattgaagataaaactggattgtggtatctgaacgggaactatttggttctgttggtgtcattggtggtcattcttcctttgtcgctgtttagaaatttaggatatttgggatataccagtggcctttccttgttgtgtatggtgttctttctgattgtggtcatttgcaagaaatttcaggttccgtgtcctgtggaagctgctttgataattaacgaaacaataaacaccaccttaacacagccaacagctcttgtacctgctttgtcacataacgtgactgaaaatgactcttgcagacctcactattttattttcaactcacagactgtctatgctgtgccaattctgatcttttcatttgtctgtcatcctgctgttcttcccatctatgaagaactgaaagaccgcagccgtagaagaatgatgaatgtgtccaagatttcattttttgctatgtttctcatgtatctgcttgccgccctctttggatacctaacattttacgaacatgttgagtcagaattgcttcatacctactcttctatcttgggaactgatattcttcttctcattgtccgtctggctgtgttaatggctgtgaccctgacagtaccagtagttattttcccaatccggagttctgtaactcacttgttgtgtgcatcaaaagatttcagttggtggcgtcatagtctcattacagtgtctatcttggcatttaccaatttacttgtcatctttgtcccaactattagggatatctttggttttattggtgcatctgcagcttctatgttgatttttattcttccttctgccttctatatcaagttggtgaagaaagaacctatgaaatctgtacaaaagattggggctttgttcttcctgttaagtggtgtactggtgatgaccggaagcatggccttgattgttttggattgggtacacaatgcacctggaggtggccattaattggcaccactcaaactcaaactcagtccatctgatgccagtgttgagtaaactcaactactatgaaatttcacctaatgttttcagtttcacttccttttgaagtgcagattcctcgctggttcttctgagtgcagaataagtgaacttttttgttttgttttgtttttttaagaaacttatctgtatgttagaaatggatatgaacaacaaaaccacgagtctcgggttaagggaagtgacaattttattccattccagagaatggacaaactcttaacttttatcaagccacatgcttggctgtgtcattgtttaacttggatattttatgattttacttgaatgtgcctaatggaaccatttgatgtgagaaacaattctttttaatttacagcaaaatattgaataaccattgacaaaaacactattattttttgtaccaaaaatacttaaagacctcagaagcactcttttacttttaagaaattgcttttttgaactttattcagaagcagttatcaataaattccataaaataatgtcattggtatttaaaaatgaatattaatataatgaaatggtttgcctttttgtaggcataataagccaaatacttttttacccaaaataatttttagagaaaatgatgtaatgaaaaattgtaccatgaattaggagcatagttttttccatttaaacgtcaccattacttaaaagatgattgattattgctataccaaatcagatgaactctgttcatcacttttcttctctgtccccaaacaatttggttcattcagactgaaatgtttgtgtcttcaacttattagaatggaagataatgcagatatttctgtgggaaataaaataactaattttgaggtaccaaatagtgcaattgggtaaaacagggtttattcagttgcatctgtctccagtgttgtattgacagctctgggtctttttttgggccagcccttttttgacattgcttccagcagtggaaaatgggcatttgatggcaataggccaaaattattgtgtccagagagtacactttttcaaaatgctcacctactggaagtgtgaattacttgacaatgtatggcttagttgtgttcatgttttgtctacagtagaggtctaatccacaggttacacctatgtttgatatgatataagttctctttgcgtaggccactgggtttctcatgcagtaagctttataaaaactcatttgcactggactgtcatctcattcttgtacaacgtagaattacttgtttacatccaacaaatggttagctagggaaaacagtgcaaactgagtgttagtagtcattttggtccaactgcatgtcaacccttccatttcaatcccagttagaaatgaaaataattactttgaaacttggctttaagagcacatttatcgtacgtcacagtgtatggtgaatatattattaaataatgtggtacttcgctcatcaggcataatgtctaaaatctaatatacataattccattaagtggttgaaggaagcaaataatggaattgtcaattggtcatctggctgtaaggtttgcccttgaactaaaaatgttgtttggggcaagggccagaaatgtggagacatggtttttgttacgcattcttgtattatatgtgactaaatttacaaacaagatacatgtgtaattaaagacccttatggaactggaagacgtcttgtagtgctacattgggtgaaaccgttggtccatttttgtctgtttctatgaagataaaataattgggggccatctagaaatagaaaggcagtgggaagacagattctacggcactgctttcatttaattgggctttaggcactccattcgaatgcagaacctcacctctagttgagaccaagaattggcaaatttgcatgagctcctggaaagagttgctgactttgtatctaagacctgccagggaataccaagagttgtttctacagacttttttttttttttttgtatgggagaagatactgtggcaaccaggaaggaatggaaaaaaaattcttttctctacagcaaattaatgtgaggaagctcctccaatcctctggctatttaaggttcaaaatcaagtgcctagggaaaattccaatggatgattttctgggagctatcttgtctaccttgaggttcctgaacaatgaattcccattaatgagcagtcttcagtattaaaaccactgtcttgtcacctcattttgcattactgtcttccgtggatgtttcagttacaactgtaatgttatttatagaacaacattaatccattaaagctaacctatttttcaatatttatgataatctatgtacatatattgtctgtccatatgtatttgtaaataggttgtatataatgtcaggtttgggtcttgggttcaagtgtatatattcctgtaagtttcttaactgcattttgatgaattcacattatgtaactataagaattgtcccaaaagtacctgtacagaaaattgaatattgaaaaattgacaaattgtgtacaaacactaaaaaaaacttgtttaaattgtatttgcaataaacaacatcaaattttttcatgaaatcttggtacaaattcagatctcttatttaaaatttaaataaggaatacattttcaaaatgcagtaatcaaaatgtgatctagtgtaatgaaataaaatgtgatctagtgtaatggaagacctttgagaacctgggtgtattaactttgtgtatatagtgtaaatatccccactgtactgttagaggccaacaattctagtatggcttgttggcaaagagtgctacaccgtttcaatgaaacaatgtatgtttgttttaactgaactaaaataaatacatgcttaatcctg

SEQ ID NO: 29076 - DNA, 2728 bp, Homo sapiens
  source 1..2728: mol_type = unassigned DNA
actggggtgtgcgcagcgcctggagcatgagccgggtggtggcgtgcacggaggatcgcgggaggctgccgcctcgggacaccccactcacacagagctgacgcaagttggacagaaggaggtgttggggtgaggtggtggtgttgattggcttgtctcgttcactcccactggtctttaaatcaatgtctagatctctaaagtttcatataaatcaaagctgttacacgggtctgccattccaaacaagtcaggaaagcctgcacaggactggataaataattaagaacagagtgttctgaacatcaacacaaagtggaagaaccttaagctgaaggtacagtatattatttacactgaaggggcttgtgtgtggacaagaaagcgctgacagctcaaatggatcccatggaactgagaaatgtcaacatcgaaccagatgatgagagcagcagtggagaaagtgctccagatagctacatcgggataggaaattcagaaaaggcagcaatgagcagtcaatttgctaatgaagacactgaaagtcagaaattcctgacaaatggatttttggggaaaaagaagctggcagattatgctgatgaacaccatcccggaaccacttcctttggaatgtcttcatttaacctgagtaatgccatcatgggcagtgggatcctgggcttgtcctatgccatggccaacacagggatcatactttttataatcatgctgcttgctgtggcaatattatcactgtattcagttcaccttttattaaaaacagccaaggaaggagggtctttgatttatgaaaaattaggagaaaaggcatttggatggccgggaaaaattggagcttttgtttccattacaatgcagaacattggagcaatgtcaagctacctctttatcattaaatatgaactacctgaagtaatcagagcattcatgggacttgaagaaaatactggagaatggtacctcaatggcaactacctcatcatatttgtgtctgttggaattattcttccactttcgctccttaaaaatttaggttatcttggctataccagtggattttctcttacctgcatggtgttttttgttagtgtggtgatttacaagaaattccaaataccctgccctctacctgttttggatcacagtgttggaaatctgtcattcaacaacacgcttccaatgcatgtggtaatgttacccaacaactctgagagttctgatgtgaacttcatgatggattacacccaccgcaatcctgcagggctggatgagaaccaggccaagggctctcttcatgacagtggagtagaatatgaagctcatagtgatgacaagtgtgaacccaaatactttgtattcaactcccggacggcctatgcaattcctatcctagtatttgcttttgtatgccaccctgaggtccttcccatctacagtgaacttaaagatcggtcccggagaaaaatgcaaacggtgtcaaatatttccatcacggggatgcttgtcatgtacctgcttgccgccctctttggttacctaaccttctatggagaagttgaagatgaattacttcatgcctacagcaaagtgtatacattagacatcccccttctcatggttcgcctggcagtccttgtggcagtaacactaactgtgcccattgtcctcttcccaattcgtacatcagtgatcacactgttatttcccaaacgacccttcagctggatacgacatttcctgattgcagctgtgcttattgcacttaataatgttctggtcatccttgtgccaactataaaatacatcttcggattcataggggcttcttctgccactatgctgatttttattcttccagcagttttttatcttaaacttgtcaagaaagaaacttttaggtcaccccaaaaggtcggggctttaattttccttgtggttggaatattcttcatgattggaagcatggcactcattataattgactggatttatgatcctccaaattccaagcatcactaacacaaggaaaaatactttctttttctattggaaatggttacaagttatactccaaaagatatttgaattatcttgattggaatgttattcataggaaataacaggaagattccaaagacgtttaccagtaatatcaccaggcacctgcagaagaggaaaatcactgtttttgtcaaggatggttgtgtatgtgtttaaaataaaacctgtggtgcacatttctacccaggttttgctagagcagtgtgagatgatgaaggtgtatttttgctgctttacgagcagaataagggtaactgcatgtaacaatcatcagatagtactctttcccctgccgtctcctcatcctgcaccccctaaaaaagtaccaaacatttgcattctcagaacatcaaacaaaaatgccctggtggcaaagctatcaccatttaatgtcttctctcagtcttgcaccaaagtctctggtctgtttactaacagaggcaaaaggcatgtcttaggaactgtttctgtttctgtaaggtacatgaatggtcaaacaccagtctagagcatcttattgtcaacagcaaaataatattttgcccaccctgtttgtgacattgagttgtgacttctatattcaatagatttttgtaaatgttaaaacatctatatttaaatgttaaaacactaaatatagaga

SEQ ID NO: 29077 - DNA, 1729 bp, Homo sapiens
  source 1..1729: mol_type = unassigned DNA
gcagcgcctggagcatgagccgggtggtggcgtgcacggaggatcgcgggaggctgccgcctcgggacaccccactcacacagggcaaaaggatgtatacactccatcttcatttaaaacactggaggattggaaaggagaaaaggaacaggacagaaaaaaaaacagagtgttctgaacatcaacacaaagtggaagaaccttaagctgaaggtacagtatattatttacactgaaggggcttgtgtgtggacaagaaagcgctgacagctcaaatggatcccatggaactgagaaatgtcaacatcgaaccagatgatgagagcagcagtggagaaagtgctccagatagctacatcgggataggaaattcagaaaaggcagcaatgagcagtcaatttgctaatgaagacactgaaagtcagaaattcctgacaaatggatttttggggaaaaagaagctggcagattatgctgatgaacaccatcccggaaccacttcctttggaatgtcttcatttaacctgagtaatgccatcatgggcagtgggatcctgggcttgtcctatgccatggccaacacagggatcatactttttataatcatgctgcttgctgtggcaatattatcactgtattcagttcaccttttattaaaaacagccaaggaaggagggtctttgatttatgaaaaattaggagaaaaggcatttggatggccgggaaaaattggagcttttgtttccattacaatgcagaacattggagcaatgtcaagctacctctttatcattaaatatgaactacctgaagtaatcagagcattcatgggacttgaagaaaatactggagaatggtacctcaatggcaactacctcatcatatttgtgtctgttggaattattcttccactttcgctccttaaaaatttaggttatcttggctataccagtggattttctcttacctgcatggtgttttttgttagtgtgatgatctacaagaaaataagtttctttttgcaaatttttatcatactaaagttgttcttttaatttagcatatctaaaataggatttagttcagtttagctcacacaggtgtttgctgacattcattggccatttaatacagtgttgagtggttctctgtaaaagtataagtgctaacactacgaagaaatgcacacgatcattcttgctcacttctataacaaacttacataaaatggatttaaaaattcctactcacagcctaaaacttctggagttcactacctttttttcaaatcatagtaagatcacttgtgtattttatattttagtaaagccaattatgaagtacaagtatcatacacgtacttttgagctactattatttgaaaaaaatctgccaaatagcatctttaggatatatttacattttcactcatctaaaaagtatacaaaaataaaaagtggaaaaaggtatcttctgaatgttcaagagcatcctatagtgccaaataataaagcaccatttttttcttcataaccaggattaaaattcatatatactgcagggcagacatacatatgatagcttgtgctgattaatttaaccccatttgtaaacagatgaaaattttattttcttatttcatttataagatggctcaatgtattgggaggcttcttttttattacagaaagtgtatattggtatataataaatgaacttttcaaatgac

SEQ ID NO: 29078 - DNA, 3789 bp, Homo sapiens
  source 1..3789: mol_type = unassigned DNA
actggggtgtgcgcagcgcctggagcatgagccgggtggtggcgtgcacggaggatcgcgggaggctgccgcctcgggacaccccactcacacagaacagagtgttctgaacatcaacacaaagtggaagaaccttaagctgaaggtacagtatattatttacactgaaggggcttgtgtgtggacaagaaagcgctgacagctcaaatggatcccatggaactgagaaatgtcaacatcgaaccagatgatgagagcagcagtggagaaagtgctccagatagctacatcgggataggaaattcagaaaaggcagcaatgagcagtcaatttgctaatgaagacactgaaagtcagaaattcctgacaaatggatttttggggaaaaagaagctggcagattatgctgatgaacaccatcccggaaccacttcctttggaatgtcttcatttaacctgagtaatgccatcatgggcagtgggatcctgggcttgtcctatgccatggccaacacagggatcatactttttataatcatgctgcttgctgtggcaatattatcactgtattcagttcaccttttattaaaaacagccaaggaaggagggtctttgatttatgaaaaattaggagaaaaggcatttggatggccgggaaaaattggagcttttgtttccattacaatgcagaacattggagcaatgtcaagctacctctttatcattaaatatgaactacctgaagtaatcagagcattcatgggacttgaagaaaatactggagaatggtacctcaatggcaactacctcatcatatttgtgtctgttggaattattcttccactttcgctccttaaaaatttaggttatcttggctataccagtggattttctcttacctgcatggtgttttttgttagtgtggtgatttacaagaaattccaaataccctgccctctacctgttttggatcacagtgttggaaatctgtcattcaacaacacgcttccaatgcatgtggtaatgttacccaacaactctgagagttctgatgtgaacttcatgatggattacacccaccgcaatcctgcagggctggatgagaaccaggccaagggctctcttcatgacagtggagtagaatatgaagctcatagtgatgacaagtgtgaacccaaatactttgtattcaactcccggacggcctatgcaattcctatcctagtatttgcttttgtatgccaccctgaggtccttcccatctacagtgaacttaaagatcggtcccggagaaaaatgcaaacggtgtcaaatatttccatcacggggatgcttgtcatgtacctgcttgccgccctctttggttacctaaccttctatggagaagttgaagatgaattacttcatgcctacagcaaagtgtatacattagacatcccccttctcatggttcgcctggcagtccttgtggcagtaacactaactgtgcccattgtcctcttcccaattcgtacatcagtgatcacactgttatttcccaaacgacccttcagctggatacgacatttcctgattgcagctgtgcttattgcacttaataatgttctggtcatccttgtgccaactataaaatacatcttcggattcataggggcttcttctgccactatgctgatttttattcttccagcagttttttatcttaaacttgtcaagaaagaaacttttaggtcaccccaaaaggtcggggctttaattttccttgtggttggaatattcttcatgattggaagcatggcactcattataattgactggatttatgatcctccaaattccaagcatcactaacacaaggaaaaatactttctttttctattggaaatggttacaagttatactccaaaagatatttgaattatcttgattggaatgttattcataggaaataacaggaagattccaaagacgtttaccagtaatatcaccaggcacctgcagaagaggaaaatcactgtttttgtcaaggatggttgtgtatgtgtttaaaataaaacctgtggtgcacatttctacccaggttttgctagagcagtgtgagatgatgaaggtgtatttttgctgctttacgagcagaataagggtaactgcatgtaacaatcatcagatagtactctttcccctgccgtctcctcatcctgcaccccctaaaaaagtaccaaacatttgcattctcagaacatcaaacaaaaatgccctggtggcaaagctatcaccatttaatgtcttctctcagtcttgcaccaaagtctctggtctgtttactaacagaggcaaaaggcatgtcttaggaactgtttctgtttctgtaaggtacatgaatggtcaaacaccagtctagagcatcttattgtcaacagcaaaataatattttgcccaccctgtttgtgacattgagttgtgacttctatattcaatagatttttgtaaatgttaaaacatctatatttaaatgttaaaacactaaatatagagaggggctttatttcaatcatagagcaacaacaaaaataatgcttatagctaaactgcctgttctagaaagcatctgctttttcatgttattcctaaatcctcttgtcatacttttgtcattgaacaatgctctccctctcgtcttccatcctcattcagaatttttagaagaccacaatcgtggagatacactacccagtattgtttgatacatttttatttgataaacattcagtgcaggaaactgtgatttgctatatgtttatgtatataatcttattctgtagtcatcagaatgttaatgtaaggtacatttgatttttattttttacatgtgtagttttctttcttcacagtcaaagcatttatattattgggggtgggggcagggaattaagttggtgggctcgaaaatccattcatatgtatctgtctacaaatgtctggggataatttaaatttgaaacctaagttatatatagtttggcaatgctcttcttcaatatttacaataataggatgatctacaagaaaataagtttctttttgcaaatttttatcatactaaagttgttcttttaatttagcatatctaaaataggatttagttcagtttagctcacacaggtgtttgctgacattcattggccatttaatacagtgttgagtggttctctgtaaaagtataagtgctaacactacgaagaaatgcacacgatcattcttgctcacttctataacaaacttacataaaatggatttaaaaattcctactcacagcctaaaacttctggagttcactacctttttttcaaatcatagtaagatcacttgtgtattttatattttagtaaagccaattatgaagtacaagtatcatacacgtacttttgagctactattatttgaaaaaaatctgccaaatagcatctttaggatatatttacattttcactcatctaaaaagtatacaaaaataaaaagtggaaaaaggtatcttctgaatgttcaagagcatcctatagtgccaaataataaagcaccatttttttcttcataaccaggattaaaattcatatatactgcagggcagacatacatatgatagcttgtgctgattaatttaaccccatttgtaaacagatgaaaattttattttcttatttcatttataagatggctcaatgtattgggaggcttcttttttattacagaaagtgtatattggtatataataaatgaacttttcaaatg

SEQ ID NO: 29079 - DNA, 764 bp, Homo sapiens
  source 1..764: mol_type = unassigned DNA
aaaagaaagaagggtctctccatccatccctttctgatactttccctgaatcccagtctggaaagggtagtaaaagaggcggagtgttctgaacatcaacacaaagtggaagaaccttaagctgaaggtacagtatattatttacactgaaggggcttgtgtgtggacaagaaagcgctgacagctcaaatggatcccatggaactgagaaatgtcaacatcgaaccagatgatgagagcagcagtggagaaagtgctccagatagctacatcgggataggaaattcagaaaaggcagcaatgagcagtcaatttgctaatgaagacactgaaagtcagaaattcctgacaaatggatttttggggaaaaagaagctggcagattatgctgatgaacaccatcccggaaccacttcctttggaatgtcttcatttaacctgagtaatgccatcatgggcagtgggatcctgggcttgtcctatgccatggccaacacagggatcatactttttataatcatgctgcttgctgtggcaatattatcactgtattcagttcaccttttattaaaaacagccaaggaaggagggtctttgatttatgaaaaattaggagaaaaggcatttggatggccgggaaaaattggagcttttgtttccattacaatgcagaacattggagcaatgtcaagctacctctttatcattaaatatgaactacctgaagtaatcagagcattcatgggacttgaagaaaatactgg

SEQ ID NO: 29080 - DNA, 933 bp, Homo sapiens
  source 1..933: mol_type = unassigned DNA
gcagcgcctggagcatgagccgggtggtggcgtgcacggaggatcgcgggaggctgccgcctcgggacaccccactcacacagggcaaaaggatgtatacactccatcttcatttaaaacactggaggattggaaaggagaaaaggaacaggacagaaaaaaaaacagagtgttctgaacatcaacacaaagtggaagaaccttaagctgaaggtacagtatattatttacactgaaggggcttgtgtgtggacaagaaagcgctgacagctcaaatggatcccatggaactgagaaatgtcaacatcgaaccagatgatgagagcagcagtggagaaagtgctccagatagctacatcgggataggaaattcagaaaaggcagcaatgagcagtcaatttgctaatgaagacactgaaagtcagaaattcctgacaaatggatttttggggaaaaagaagctggcagattatgctgatgaacaccatcccggaaccacttcctttggaatgtcttcatttaacctgagtaatgccatcatgggcagtgggatcctgggcttgtcctatgccatggccaacacagggatcatactttttataatcatgctgcttgctgtggcaatattatcactgtattcagttcaccttttattaaaaacagccaaggaaggagggtctttgatttatgaaaaattaggagaaaaggcatttggatggccgggaaaaattggagcttttgtttccattacaatgcagaacattggagcaatgtcaagctacctctttatcattaaatatgaactacctgaagtaatcagagcattcatgggacttgaagaaaatactggagaatggtacctcaatggcaactacctcatcatatttgtgtctgttggaattattcttccactttcgctccttaaaaatttag

SEQ ID NO: 29081 - DNA, 1988 bp, Homo sapiens
  source 1..1988: mol_type = unassigned DNA
acaaatgccctccctgcctccctctgggggcccccaagatctagggtcctctcgtgcctaggctgtctgcctgaggaaaaaaaaaaaagtaccgctccagagcaggagcctaggcagccgagagggtgcccgaacctgagtctgagttgcggccacttcaggagctgagaggagcaggatggaactgcaggatccaaagatgaatggagccctcccttcggatgctgtgggctacaggcaagaacgtgagggcttcctgcccagtcgtggtcctgctcctgggagcaagccggtccagttcatggatttcgaggggaagacatcgtttggaatgtcagtgttcaacctcagcaacgccatcatgggcagcggcatcctggggctggcctatgccatggcccacacgggggtcatcttcttcctggccctgctgctgtgcattgcgcttctgtcgtcctactccatccacctcctgctgacctgtgctggtattgcaggcatccgagcctatgagcagctgggacagagggcattcgggcctgcggggaaggtagtggtggccacagtcatctgtctgcacaatgttggggccatgtccagttacctgttcatcatcaaatctgagctccccctggttatcggcaccttcctgtacatggaccccgagggggactggttcttgaagggaaacctcctcatcatcatcgtcagtgtgttaatcatcctgcccctcgccctcatgaaacacttgggctacctggggtacaccagtggtctctctctgacctgcatgctgtttttccttgtttcggtcatctacaagaagttccaacttggctgtgctataggccacaatgaaacagcaatggagagtgaagctctcgtgggactccccagccaaggactcaacagcagctgtgaggcccagatgttcacagttgactcacagatgtcctacacagtgcccattatggcttttgcttttgtctgccaccctgaggtgctgcccatctatacggagctctgccggccctccaagcgcaggatgcaggccgtggccaacgtgtccattggggccatgttctgcatgtatgggctcacagcaacctttggatacctcaccttctacagcagtgtgaaggcggagatgctgcacatgtacagccagaaggacccgctcatcctctgtgtgcgcctggccgtgctgctcgcggtgaccctcactgtgccagtcgtgctgttccctatccgccgggccctgcagcagctgcttttcccaggcaaggccttcagctggccacgacatgtggccatagctctgatcctgcttgttttggtcaatgtccttgtcatctgtgtgccaaccatccgggatatctttggagttatcgggtccacctcagcccccagcctcatcttcatcctccccagcatcttctacctccgcattgtaccctctgaggtggagcctttcttatcctggcccaagatccaggccctgtgctttggagtcctgggagtcctcttcatggccgtcagtctaggctttatgtttgccaactgggccacaggccagagccgcatgtctggacactgatcaggccctgctggcccaggtccctgtgcgcatgcacatggaggggtcagggccgctccctagggtccctcctgcccaacatgtggaggtggctggttcccatgaacgtggttgtcagaggcgggggacagcagaggctgcagactggcccacttccctcctccccagggatgccaagcttggatcatggccctaatcccaaccccaaccccatgggaggaggaggaggaggaagaagaggaggaggaggaggaggaggaggaggaggaggaggaggccaggtcctggtggagcctttgcccagcccagtcctctctgcctcctcctggctgaagctgtttgtcaggattaccctcgggctaaagaggaaaaataaagatgttgagctacc

SEQ ID NO: 29082 - DNA, 2103 bp, Homo sapiens
  source 1..2103: mol_type = unassigned DNA
ccgctcttcggcccagtgactgccctccctggctgctcccctcccggcctgcctttctcctccagctgttcttcctcctccagcactccccatcctcagcctatccccacccgcagcgtctcccctccccagctgttttacctctggtggctgcttcaccctcccccggtcctctccacttccagctgctccctccaaagtttgtcctagtttcccccttcccagctctccccattcgcagcctcttccatcttcaactcttcttccctgctagcctcttccctcctccgatggtctctccttggcttctctccaccccgcttgcttcttctctagtctttccctggccctggcattagtctccttaccctgtgccctgtcccaatgtgtgcccgggctttgctccttgcgtgcagttcgaggggaagacatcgtttggaatgtcagtgttcaacctcagcaacgccatcatgggcagcggcatcctggggctggcctatgccatggcccacacgggggtcatcttcttcctggccctgctgctgtgcattgcgcttctgtcgtcctactccatccacctcctgctgacctgtgctggtattgcaggcatccgagcctatgagcagctgggacagagggcattcgggcctgcggggaaggtagtggtggccacagtcatctgtctgcacaatgttggggccatgtccagttacctgttcatcatcaaatctgagctccccctggttatcggcaccttcctgtacatggaccccgagggggactggttcttgaagggaaacctcctcatcatcatcgtcagtgtgttaatcatcctgcccctcgccctcatgaaacacttgggctacctggggtacaccagtggtctctctctgacctgcatgctgtttttccttgtttcggtcatctacaagaagttccaacttggctgtgctataggccacaatgaaacagcaatggagagtgaagctctcgtgggactccccagccaaggactcaacagcagctgtgaggcccagatgttcacagttgactcacagatgtcctacacagtgcccattatggcttttgcttttgtctgccaccctgaggtgctgcccatctatacggagctctgccggccctccaagcgcaggatgcaggccgtggccaacgtgtccattggggccatgttctgcatgtatgggctcacagcaacctttggatacctcaccttctacagcagtgtgaaggcggagatgctgcacatgtacagccagaaggacccgctcatcctctgtgtgcgcctggccgtgctgctcgcggtgaccctcactgtgccagtcgtgctgttccctatccgccgggccctgcagcagctgcttttcccaggcaaggccttcagctggccacgacatgtggccatagctctgatcctgcttgttttggtcaatgtccttgtcatctgtgtgccaaccatccgggatatctttggagttatcgggtccacctcagcccccagcctcatcttcatcctccccagcatcttctacctccgcattgtaccctctgaggtggagcctttcttatcctggcccaagatccaggccctgtgctttggagtcctgggagtcctcttcatggccgtcagtctaggctttatgtttgccaactgggccacaggccagagccgcatgtctggacactgatcaggccctgctggcccaggtccctgtgcgcatgcacatggaggggtcagggccgctccctagggtccctcctgcccaacatgtggaggtggctggttcccatgaacgtggttgtcagaggcgggggacagcagaggctgcagactggcccacttccctcctccccagggatgccaagcttggatcatggccctaatcccaaccccaaccccatgggaggaggaggaggaggaagaagaggaggaggaggaggaggaggaggaggaggaggaggaggccaggtcctggtggagcctttgcccagcccagtcctctctgcctcctcctggctgaagctgtttgtcaggattaccctcgggctaaagaggaaaaataaagatgttgagctaccactctg

SEQ ID NO: 29083 - DNA, 2662 bp, Homo sapiens
  source 1..2662: mol_type = unassigned DNA
gcctggaatagcctggctactacccctgcacctgttcccctgctgtccccaggcctctctgcctgaatctgcctctctctgcctcttttctcctgtccctccaggagtctctctgcctcaaccactctctctgccccttcatctctctgagctggtgtgtctggtcctaccctctgtttggggagctgtctggctctgtcccccacctcttggccagcctgtgtctcctgtctatgactgagcccaattgcctgttgcctttctgcaggtgtttccacgagcctatccctacccacctgtttgtttctgagtctgcctgtgtgtccctttctccctgtctctgcctgtcttccaagctcccctagcatcccctcctcccgcccatctgtctttctgtcccttctgtggtctgtctgttcctgtgctgtttctcatgcctgctttctttgtaacttcagttctcctactctctctctgtctcctctctgcacctttttctgccatccatcccatcctgctgtccgtctgctctgtgagtccatcccctctgtctgcctgtcactctctctagctgtgggtctacaccctcaatctttcaggccatttcccccaccatcaacacacaaacaaaccgctgtctccctccaagtgggtccagatagggggcgccccttctccacctcttcccccgcccagggccagaaggagggaaacgaaattaaaattaacatttcttctcaggaaaaaaaaaaaagtaccgctccagagcaggagcctaggcagccgagagggtgcccgaacctgagtctgagttgcggccacttcaggagctgagaggagcaggatggaactgcaggatccaaagatgaatggagccctcccttcggatgctgtgggctacaggcaagaacgtgagggcttcctgcccagtcgtggtcctgctcctgggagcaagccggtccagttcatggatttcgaggggaagacatcgtttggaatgtcagtgttcaacctcagcaacgccatcatgggcagcggcatcctggggctggcctatgccatggcccacacgggggtcatcttcttcctggccctgctgctgtgcattgcgcttctgtcgtcctactccatccacctcctgctgacctgtgctggtattgcaggcatccgagcctatgagcagctgggacagagggcattcgggcctgcggggaaggtagtggtggccacagtcatctgtctgcacaatgttggggccatgtccagttacctgttcatcatcaaatctgagctccccctggttatcggcaccttcctgtacatggaccccgagggggactggttcttgaagggaaacctcctcatcatcatcgtcagtgtgttaatcatcctgcccctcgccctcatgaaacacttgggctacctggggtacaccagtggtctctctctgacctgcatgctgtttttccttgtttcggtcatctacaagaagttccaacttggctgtgctataggccacaatgaaacagcaatggagagtgaagctctcgtgggactccccagccaaggactcaacagcagctgtgaggcccagatgttcacagttgactcacagatgtcctacacagtgcccattatggcttttgcttttgtctgccaccctgaggtgctgcccatctatacggagctctgccggccctccaagcgcaggatgcaggccgtggccaacgtgtccattggggccatgttctgcatgtatgggctcacagcaacctttggatacctcaccttctacagcagtgtgaaggcggagatgctgcacatgtacagccagaaggacccgctcatcctctgtgtgcgcctggccgtgctgctcgcggtgaccctcactgtgccagtcgtgctgttccctatccgccgggccctgcagcagctgcttttcccaggcaaggccttcagctggccacgacatgtggccatagctctgatcctgcttgttttggtcaatgtccttgtcatctgtgtgccaaccatccgggatatctttggagttatcgggtccacctcagcccccagcctcatcttcatcctccccagcatcttctacctccgcattgtaccctctgaggtggagcctttcttatcctggcccaagatccaggccctgtgctttggagtcctgggagtcctcttcatggccgtcagtctaggctttatgtttgccaactgggccacaggccagagccgcatgtctggacactgatcaggccctgctggcccaggtccctgtgcgcatgcacatggaggggtcagggccgctccctagggtccctcctgcccaacatgtggaggtggctggttcccatgaacgtggttgtcagaggcgggggacagcagaggctgcagactggcccacttccctcctccccagggatgccaagcttggatcatggccctaatcccaaccccaaccccatgggaggaggaggaggaggaagaagaggaggaggaggaggaggaggaggaggaggaggaggaggccaggtcctggtggagcctttgcccagcccagtcctctctgcctcctcctggctgaagctgtttgtcaggattaccctcgggctaaagaggaaaaataaagatgttgagctaccactctgga

SEQ ID NO: 29084 - DNA, 741 bp, Homo sapiens
  source 1..741: mol_type = unassigned DNA
ggccacgcggtgagggtggagggaaggagagggggtggcgcgggggaccggggaatgaaagacacagatggcaagagagacagcgatggaactgcaggatccaaagatgaatggagccctcccttcggatgctgtgggctacaggcaagaacgtgagggcttcctgcccagtcgtggtcctgctcctgggagcaagccggtccagttcatggatttcgaggggaagacatcgtttggaatgtcagtgttcaacctcagcaacgccatcatgggcagcggcatcctggggctggcctatgccatggcccacacgggggtcatcttcttcctggccctgctgctgtgcattgcgcttctgtcgtcctactccatccacctcctgctgacctgtgctggtattgcaggcatccgagcctatgagcagctgggacagagggcattcgggcctgcggggaaggtagtggtggccacagtcatctgtctgcacaatgttggggccatgtccagttacctgttcatcatcaaatctgagctccccctggttatcggcaccttcctgtacatggaccccgagggggactggttcttgaagggaaacctcctcatcatcatcgtcagtgtgttaatcatcctgcccctcgccctcatgaaacacttgggctacctggggtacaccagtggtctctctctgacctgcatgctgtttttccttgtttcggtcatctacaagaagttccaact

SEQ ID NO: 29085 - DNA, 708 bp, Homo sapiens
  source 1..708: mol_type = unassigned DNA
tttctgagatacctccttcccaaggagtaagcgcgggagggagctggggtttcttcagagacgctgtacctacaagacaggggctccaggctcgggtggggattgcagagacacccccaccccaggaaactcggatggaactgcaggatccaaagatgaatggagccctcccttcggatgctgtgggctacaggcaagaacgtgagggcttcctgcccagtcgtggtcctgctcctgggagcaagccggtccagttcatggatttcgaggggaagacatcgtttggaatgtcagtgttcaacctcagcaacgccatcatgggcagcggcatcctggggctggcctatgccatggcccacacgggggtcatcttcttcctggccctgctgctgtgcattgcgcttctgtcgtcctactccatccacctcctgctgacctgtgctggtattgcaggcatccgagcctatgagcagctgggacagagggcattcgggcctgcggggaaggtagtggtggccacagtcatctgtctgcacaatgttggggccatgtccagttacctgttcatcatcaaatctgagctccccctggttatcggcaccttcctgtacatggaccccgagggggactggttcttgaagggaaacctcctcatcatcatcgtcagtgtgttaatcatcctgcccctcgccctcatgaaacacttgg

SEQ ID NO: 29086 - DNA, 656 bp, Homo sapiens
  source 1..656: mol_type = unassigned DNA
ctgcctccctctgggggcccccaagatctagggtcctctcgtgcctaggctgtctgcctgaggaaaaaaaaaaaagtaccgctccagagcaggagcctaggcagccgagagggtgcccgaacctgagtctgagttgcggccacttcaggagctgagaggagcaggatggaactgcaggatccaaagatgaatggagccctcccttcggatgctgtgggctacaggcaagaacgtgagggcttcctgcccagtcgtggtcctgctcctgggagcaagccggtccagttcatggatttcgaggggaagacatcgtttggaatgtcagtgttcaacctcagcaacgccatcatgggcagcggcatcctggggctggcctatgccatggcccacacgggggtcatcttcttcctggccctgctgctgtgcattgcgcttctgtcgtcctactccatccacctcctgctgacctgtgctggtattgcaggcatccgagcctatgagcagctgggacagagggcattcgggcctgcggggaaggtagtggtggccacagtcatctgtctgcacaatgttggggccatgtccagttacctgttcatcatcaaatctgagctccccctggttatcggcaccttcctgtacatggaccccgaggg

SEQ ID NO: 29087 - DNA, 910 bp, Homo sapiens
  source 1..910: mol_type = unassigned DNA
agacagcgtgagtctggggtctgggaggagaggctatcccttctccacgtggtcggctcatctgcgctggggatggaactgcaggatccaaagatgaatggagccctcccttcggatgctgtgggctacaggcaagaacgtgagggcttcctgcccagtcgtggtcctgctcctgggagcaagccggtccagttcatggatttcgaggggaagacatcgtttggaatgtcagtgttcaacctcagcaacgccatcatgggcagcggcatcctggggctggcctatgccatggcccacacgggggtcatcttcttcctggccctgctgctgtgcattgcgcttctgtcgtcctactccatccacctcctgctgacctgtgctggtattgcaggcatccgagcctatgagcagctgggacagagggcattcgggcctgcggggaaggtagtggtggccacagtcatctgtctgcacaatgttggggccatgtccagttacctgttcatcatcaaatctgagctccccctggttatcggcaccttcctgtacatggaccccgagggggactggttcttgaagggaaacctcctcatcatcatcgtcagtgtgttaatcatcctgcccctcgccctcatgaaacacttgggctacctggggtacaccagtggtctctctctgacctgcatgctgtttttccttgtttcggtcatctacaagaagttccaacttggctgtgctataggccacaatgaaacagcaatggagagtgaagctctcgtgggactccccagccaaggactcaacagcagctgtgaggcccagatgttcacagttgactcacagatgtcctacacagtgcccattatggcttttgcttttgtctgccaccctgaggtgctgcccatctata

SEQ ID NO: 29088 - DNA, 871 bp, Homo sapiens
  source 1..871: mol_type = unassigned DNA
cgtctggggcaggggtctccgagtctgtccccaaccctcagctcactcaacaggatggaactgcaggatccaaagatgaatggagccctcccttcggatgctgtgggctacaggcaagaacgtgagggcttcctgcccagtcgtggtcctgctcctgggagcaagccggtccagttcatggatttcgaggggaagacatcgtttggaatgtcagtgttcaacctcagcaacgccatcatgggcagcggcatcctggggctggcctatgccatggcccacacgggggtcatcttcttcctggccctgctgctgtgcattgcgcttctgtcgtcctactccatccacctcctgctgacctgtgctggtattgcaggcatccgagcctatgagcagctgggacagagggcattcgggcctgcggggaaggtagtggtggccacagtcatctgtctgcacaatgttggggccatgtccagttacctgttcatcatcaaatctgagctccccctggttatcggcaccttcctgtacatggaccccgagggggactggttcttgaagggaaacctcctcatcatcatcgtcagtgtgttaatcatcctgcccctcgccctcatgaaacacttgggctacctggggtacaccagtggtctctctctgacctgcatgctgtttttccttgtttcggtcatctacaagaagttccaacttggctgtgctataggccacaatgaaacagcaatggagagtgaagctctcgtgggactccccagccaaggactcaacagcagctgtgaggcccagatgttcacagttgactcacagatgtcctacacagtgcccattatggcttttgcttttgtctgccacc

SEQ ID NO: 29089 - DNA, 4058 bp, Homo sapiens
  source 1..4058: mol_type = unassigned DNA
atgtgatgcatgctcacgtgtctccgcagccggctcgggaaagaatcccccaagctccatttcatgagtaagcgtgagagccgctcagtttcctccagctctgctgaagccagcacagaagtagcccaaactcttccctctgctgacagcaaattttaggcaaagtcttgagaaagaagaaattgggtccagaaagggaagtgaggagaatcagatcccagacctttggggagaaggagcaaccgcctctggcacagcccatcagggagaaagagcaggttgagaagagtcctaagctaacagccccaaacaggtgggtgttgctcagctccctgaggcatgtggttgtaaggcagaacccacagaccttgcaggaagaaggctctcggggccatggcccaggtcagcatcaacaatgactacagcgagtgggacttgagcacggatgccggggagcgggctcggctgctgcagagtccctgtgtggacacagcccccaagagtgagtgggaagcctctcctgggggtctggacagaggcaccacttccacacttggggccatcttcatcgtcgtcaacgcgtgcctgggtgcagggttactcaacttcccagcagccttcagcactgcggggggcgtggcagcaggcatcgcactgcagatgggtatgctggttttcatcatcagtggccttgtcatcctggcctactgctcccaggccagcaatgagaggacctaccaggaggtggtatgggctgtgtgtggcaagctgacaggtgtgctatgtgaggtggccatcgctgtctacacctttggcacctgcattgccttcctaatcatcattggcgaccagcaggacaagattatagctgtgatggcgaaagagccggagggggccagcggcccttggtacacagaccgcaagttcaccatcagcctcactgccttcctcttcatcctgcccctctccatccccagggagattggtttccagaaatatgccagcttcctgagcgtcgtgggtacctggtacgtcacagccatcgttatcatcaagtacatctggccagataaagagatgaccccagggaacatcctgaccaggccggcttcctggatggctgtgttcaatgccatgcccaccatctgcttcggatttcagtgccacgtcagcagtgtgcccgtcttcaacagcatgcagcagcctgaagtgaagacctggggtggagtggtgacagctgccatggtcatagccctcgctgtctacatggggacaggcatctgtggcttcctgacctttggagctgctgtggatcctgacgtgctcctgtcctatccctcggaggacatggccgtggccgttgcccgagccttcatcatcctgagcgtgctcacctcctaccctatcctgcacttctgtgggcgggcggtggtggaaggcctgtggctgcgctaccagggggtgccagtggaggaggacgtggggcgggagcggcggcggcgagtgctgcagacgctggtctggttcctgctcaccctgctgctggcgctcttcatccctgacatcggcaaggtgatctcagtcattggaggcctggccgcctgcttcatcttcgtcttcccagggctgtgcctcattcaagccaaactctctgagatggaagaggtcaaaccagccagctggtgggtgctggtcagctacggagtcctcttggtcaccctgggagccttcatcttcggccagaccacagccaacgccatctttgtggatctcttggcataaccactgcctcccagggaacacaaggcctttgccattggtcgcaggaacccatctcttagagctatggggccattcttagtccacgatcattccaactggtgggatgacatccggacatcctcttccagggactggggcaaactcaggccccacacctctggacagctcaaatccagtccccttcctgctccccagtcctggcagtgccgtggatggcggcaggaagtctcacatcatagaggacccctcctcctctcccagttctcaacttctccatgcctggaatccacgggtgaagagagtcggtagatctcataagaaagaatccagtctgacttccctctggagaatgactatggacagaaggccaccatcctccacagagcaccctgtcctgagtaggggttgtgctcattaccccaggccagtggtagcttcctcaggagcctggccacttccaacggtagcactgaagtcatgcaaatgcatagtcaggtagattcagaccttgtccacaccttcctgggcaacccccaccatgaacctgtcagcctctttcccatagctaatagacatttcccaggccttgaggggccccaccctgtctctttcatcaaacctgatggtccaggctgggcatccctctcctcctccatccccagacatcaccaggtctaatgtttacaaacggtgccagcccggctctgaagccaagggccgtcccgtgccacggtgctgtgagtattcctccgttagctttccccataaggttgggagtatctgcttttgtgtctgagatgggcccctcttttcagaggccgcagggtgggtgatggagaaggctgagaacctttcagaccctctgtgtgggctgggctggtcagaatcagggtgtacctccccgacaccttctttttcagtgatgttttctcttcttcctgcctttcctctgcctcctcccctgccagccctagcgtgactacccagagacaaaaaaaaaaaaaaaaaaaaaaggcagggctgggcgcagtggctcacgcctgtaatcccagcactttgggaggccaaggcgggcagatgacttgaggtcaggagttcgagaccagcctggccaacacggcaaaaccccatctctactaaaaatacaaaaaattaaccgggcatggtggcgggcacctgtaatcccagctacttgggaggctgaggcagcagagccgcttaaacccaggaggcagagactgcaatgagctgagatcgtgccattgcactccagcttgggcaacaagagtgaaacttcatctcaaaaaaacagaaacaaacaaaaaggcagctgggttgtcactgatgggcagcatttgagcctgccacactggcctggaagtttcccttccagtctggattttgtctgctccttccttccccctcaccccgttacctcttcacctcccatctcacttcactgtgtagctcagtctctcccacgcacataattggggacagtgggggctctcttaccagcctcctcagcaacgcacgtccatcaggcctggcctcagtggccagccacattgatgtcacactggaattgttaccccagagagggcgaagagataggctatctccccacctcccaccctactccccactatattcccgttttgaccacctcagcccctcagctgccccctctcactttggccaatcccaggcaccaatcagacttcctcctccacctggagcccctagcatttccttgtcccctcttccccaaaacctctgtaaagggtacgagagggaccccctgccgagccgcccgccactcagggcagtccgatctaagaagcagaagctggttggaggctggctgggcctctgtccagtccccagatggataaactgccttttctcacatcccctcttggtgcctgatcttctctgcccccggggccagacccactgtgctgttttctgtcagtctgtggcacagcaccaagctctgccagcaccagtccctgacagggctaggaggacagcctggtcagcagggctgcagtcccccagtgccgtgtttcgggggtcaagggatgtaagtggagtcattgcacagagacagaccagtcaggagaaggagctggaatctggcctcttgtcctaacctcaggagccccctcccatcctctccccaccctccctatcggggtacttcactgtttcttttctacttgtgtatactcgagaaagggaagatggttaataaaagggatttgtgctgctga

SEQ ID NO: 29090 - DNA, 2427 bp, Homo sapiens
  source 1..2427: mol_type = unassigned DNA
aggagagtcaggccaatggggccgcagttctttcttttttttttctttattcttatttttggagacagggtctcgctctgttgcccaggctggagtgcggtggtgcgatcacggttccatgcagcccccgacctcccgggctcaggtgattctcccgcctcagcaccgcgagcagctaggaccacaggcgcgagccactgcgtccggccggcgggacttatttgtcaggcggggattgggttccgccagcctaaagggaggggtaagcgccagaatatgaatcgccgggaagctgggagaaagctccgggaaaccctgagcagccaggtcgcctgctccgcccgctcccgctcccgatctctgattgctcctaactgacgtcactcccggtctgtccccgcccactcggtgctgccattggcagtcggtcgtgggtctgagagtcactggagctaccagaagcatcatggggccctggggagagccagagctcctggtgtggcgccccgaggcggtagcttcagagcctccagtgcctgtggggctggaggtgaagttgggggccctggtgctgctgctggtgctcaccctcctctgcagcctggtgcccatctgtgtgctgcgccggccaggagctaaccatgaaggctcagcttcccgccagaaagccctgagcctagtaagctgtttcgcggggggcgtctttttggccacttgtctcctggacctgctgcctgactacctggctgccatagatgaggccctggcagccttgcacgtgacgctccagttcccactgcaagagttcatcctggccatgggcttcttcctggtcctggtgatggagcagatcacactggcttacaaggagcagtcagggccgtcacctctggaggaaacaagggctctgctgggaacagtgaatggtgggccgcagcattggcatgatgggccaggggtcccacaggcgagtggagccccagcaaccccctcagccttgcgtgcctgtgtactggtgttctccctggccctccactccgtgttcgaggggctggcggtagggctgcagcgagaccgggctcgggccatggagctgtgcctggctttgctgctccacaagggcatcctggctgtcagcctgtccctgcggctgttgcagagccaccttagggcacaggtggtggctggctgtgggatcctcttctcatgcatgacacctctaggcatcgggctgggtgcagctctggcagagtcggcaggacctctgcaccagctggcccagtctgtgctagagggcatggcagctggcacctttctctatatcacctttctggaaatcctgccccaggagctggccagttctgagcaaaggatcctcaaggtcattctgctcctagcaggctttgccctgctcactggcctgctcttcatccaaatctagggggcttcaagagaggggcaggggagattgatgatcaggtgcccctgttctcccttccctcccccagttgtggggaataggaaggaaaggggaagggaaatactgaggaccaaaaagttctctgggagctaaagatagagcctttggggctatctgactaatgagagggaagtgggcagacaagaggctggccccagtcccaaggaacaagagatggtcaagtcgctagagacatatcaggggacattaggattggggaagacacttgactgctagaatcagaggttggacactatacataaggacaggctcacatgggaggctggaggtgggtacccagctgctgtggaacgggtatggacaggtcataaacctagagtcagtgtcctgttggtcctagcccatttcagcaccctgccacttggagtggacccctcctactcttcttagcgcctaccctcatacctatctccctcctcccatctcctaggggactggcgccaaatggtctctccctgccaattttggtatcttctctggcctctccagtcctgcttactcctctatttttaaagtgccaaacaaatccccttcctctttctcaaagcacagtaatgtggcactgagccctacccagcacctcagtgaagggggcctgcttgctctttattttggtcccggatcctggggtggggcagaaatattttctgggctggggtaggaggaaggttgttgcagccatctactgctgctgtaccctaggaatatggggacatggacatggtgtcccatgcccagatgataaacactgagctgccaaaacatttttttaaatacacccgaggagcccaagggggaagggcaatgcctacccccagcgttatttttggggagggagggctgtgcatagggacatattctttagaatctattttattaactgacctgttttgggacctgttacccaaataaaagatgtttctaga

SEQ ID NO: 29091 - DNA, 2084 bp, Homo sapiens
  source 1..2084: mol_type = unassigned DNA
gggagctatgggagggggcgggaattcccgactctaggccggaagcgcgcggagaccatgtagtgagaccctcgcgaggtctgagagtcactggagctaccagaagcatcatggggccctggggagagccagagctcctggtgtggcgccccgaggcggtagcttcagagcctccagtgcctgtggggctggaggtgaagttgggggccctggtgctgctgctggtgctcaccctcctctgcagcctggtgcccatctgtgtgctgcgccggccaggagctaaccatgaaggctcagcttcccgccagaaagccctgagcctagtaagctgtttcgcggggggcgtctttttggccacttgtctcctggacctgctgcctgactacctggctgccatagatgaggccctggcagccttgcacgtgacgctccagttcccactgcaagagttcatcctggccatgggcttcttcctggtcctggtgatggagcagatcacactggcttacaaggagcagtcagggccgtcacctctggaggaaacaagggctctgctgggaacagtgaatggtgggccgcagcattggcatgatgggccaggggtcccacaggcgagtggagccccagcaaccccctcagccttgcgtgcctgtgtactggtgttctccctggccctccactccgtgttcgaggggctggcggtagggctgcagcgagaccgggctcgggccatggagctgtgcctggctttgctgctccacaagggcatcctggctgtcagcctgtccctgcggctgttgcagagccaccttagggcacaggtggtggctggctgtgggatcctcttctcatgcatgacacctctaggcatcgggctgggtgcagctctggcagagtcggcaggacctctgcaccagctggcccagtctgtgctagagggcatggcagctggcacctttctctatatcacctttctggaaatcctgccccaggagctggccagttctgagcaaaggatcctcaaggtcattctgctcctagcaggctttgccctgctcactggcctgctcttcatccaaatctagggggcttcaagagaggggcaggggagattgatgatcaggtgcccctgttctcccttccctcccccagttgtggggaataggaaggaaaggggaagggaaatactgaggaccaaaaagttctctgggagctaaagatagagcctttggggctatctgactaatgagagggaagtgggcagacaagaggctggccccagtcccaaggaacaagagatggtcaagtcgctagagacatatcaggggacattaggattggggaagacacttgactgctagaatcagaggttggacactatacataaggacaggctcacatgggaggctggaggtgggtacccagctgctgtggaacgggtatggacaggtcataaacctagagtcagtgtcctgttggtcctagcccatttcagcaccctgccacttggagtggacccctcctactcttcttagcgcctaccctcatacctatctccctcctcccatctcctaggggactggcgccaaatggtctctccctgccaattttggtatcttctctggcctctccagtcctgcttactcctctatttttaaagtgccaaacaaatccccttcctctttctcaaagcacagtaatgtggcactgagccctacccagcacctcagtgaagggggcctgcttgctctttattttggtcccggatcctggggtggggcagaaatattttctgggctggggtaggaggaaggttgttgcagccatctactgctgctgtaccctaggaatatggggacatggacatggtgtcccatgcccagatgataaacactgagctgccaaaacatttttttaaatacacccgaggagcccaagggggaagggcaatgcctacccccagcgttatttttggggagggagggctgtgcatagggacatattctttagaatctattttattaactgacctgttttgggacctgttacccaaataaaagatgtttctagacatctgtacagta

SEQ ID NO: 29092 - DNA, 2398 bp, Homo sapiens
  source 1..2398: mol_type = unassigned DNA
gtcggctgcccaggcctccccgggcccgggaacaggagtcccagctcacgcattcttcatctgcttcccgcgacgcttggcggcctcgcaccccgcctcctggagcccggactttcaggcaccgccctcagtgtcgcctcagtccgtcccgggaccgcagactcttagggcccctctctttggccatctgcctctaggtcccatcctggggcctgaagcgcttgttctctgcgctgggaaaaggggaacgatggagcgatccagcacccaaacttaccctgtccaggtggcccacgaagctacccaagacatctctgcacagccctagcctttttggcttcacccactccgttcgggagttggggacccggcctctacattccttaggggaactccagctccaggtctgagagtcactggagctaccagaagcatcatggggccctggggagagccagagctcctggtgtggcgccccgaggcggtagcttcagagcctccagtgcctgtggggctggaggtgaagttgggggccctggtgctgctgctggtgctcaccctcctctgcagcctggtgcccatctgtgtgctgcgccggccaggagctaaccatgaaggctcagcttcccgccagaaagccctgagcctagtaagctgtttcgcggggggcgtctttttggccacttgtctcctggacctgctgcctgactacctggctgccatagatgaggccctggcagccttgcacgtgacgctccagttcccactgcaagagttcatcctggccatgggcttcttcctggtcctggtgatggagcagatcacactggcttacaaggagcagtcagggccgtcacctctggaggaaacaagggctctgctgggaacagtgaatggtgggccgcagcattggcatgatgggccaggggtcccacaggcgagtggagccccagcaaccccctcagccttgcgtgcctgtgtactggtgttctccctggccctccactccgtgttcgaggggctggcggtagggctgcagcgagaccgggctcgggccatggagctgtgcctggctttgctgctccacaagggcatcctggctgtcagcctgtccctgcggctgttgcagagccaccttagggcacaggtggtggctggctgtgggatcctcttctcatgcatgacacctctaggcatcgggctgggtgcagctctggcagagtcggcaggacctctgcaccagctggcccagtctgtgctagagggcatggcagctggcacctttctctatatcacctttctggaaatcctgccccaggagctggccagttctgagcaaaggatcctcaaggtcattctgctcctagcaggctttgccctgctcactggcctgctcttcatccaaatctagggggcttcaagagaggggcaggggagattgatgatcaggtgcccctgttctcccttccctcccccagttgtggggaataggaaggaaaggggaagggaaatactgaggaccaaaaagttctctgggagctaaagatagagcctttggggctatctgactaatgagagggaagtgggcagacaagaggctggccccagtcccaaggaacaagagatggtcaagtcgctagagacatatcaggggacattaggattggggaagacacttgactgctagaatcagaggttggacactatacataaggacaggctcacatgggaggctggaggtgggtacccagctgctgtggaacgggtatggacaggtcataaacctagagtcagtgtcctgttggtcctagcccatttcagcaccctgccacttggagtggacccctcctactcttcttagcgcctaccctcatacctatctccctcctcccatctcctaggggactggcgccaaatggtctctccctgccaattttggtatcttctctggcctctccagtcctgcttactcctctatttttaaagtgccaaacaaatccccttcctctttctcaaagcacagtaatgtggcactgagccctacccagcacctcagtgaagggggcctgcttgctctttattttggtcccggatcctggggtggggcagaaatattttctgggctggggtaggaggaaggttgttgcagccatctactgctgctgtaccctaggaatatggggacatggacatggtgtcccatgcccagatgataaacactgagctgccaaaacatttttttaaatacacccgaggagcccaagggggaagggcaatgcctacccccagcgttatttttggggagggagggctgtgcatagggacatattctttagaatctattttattaactgacctgttttgggacctgttacccaaataaaagatgtttctagac

SEQ ID NO: 29093 - DNA, 2723 bp, Homo sapiens
  source 1..2723: mol_type = unassigned DNA
cagcggggtccatgtcggctgcccaggcctccccgggcccgggaacaggagtcccagctcacgcattcttcatctgcttcccgcgacgcttggcggcctcgcaccccgcctcctggagcccggactttcaggcaccgccctcagtgtcgcctcagtccgtcccgggaccgcagactcttagggcccctctctttggccatctgcctctaggtcccatcctggggcctgaagcgcttgttctctgcgctgggaaaaggggaacgatggagcgatccagcacccaaacttaccctgtccaggtggcccacgaagctacccaagacatctctgcacagccctagcctttttggcttcacccactccgttcgggagttggggacccggcctctacattccttaggggaactccagctccaggtcctatttggaggcggctcctagtttcctagttttctgggggcaccaggtgaaagggtgatgagatatccatacagcctttctcatgcctcggtttcccccgtgcagtctccctgaataagtcacttgggaaagaaagtgtgagaagagaggaatgttcctggtacaggagtagatgagtcaccctgggtaggggaaggtcacaaagtggctggggccagggagctgcactctgctgaccaagcttccccattccttgccccatcttcctttgcatgatttttcccaaccactctggtctgtcttcctaggtctgagagtcactggagctaccagaagcatcatggggccctggggagagccagagctcctggtgtggcgccccgaggcggtagcttcagagcctccagtgcctgtggggctggaggtgaagttgggggccctggtgctgctgctggtgctcaccctcctctgcagcctggtgcccatctgtgtgctgcgccggccaggagctaaccatgaaggctcagcttcccgccagaaagccctgagcctagtaagctgtttcgcggggggcgtctttttggccacttgtctcctggacctgctgcctgactacctggctgccatagatgaggccctggcagccttgcacgtgacgctccagttcccactgcaagagttcatcctggccatgggcttcttcctggtcctggtgatggagcagatcacactggcttacaaggagcagtcagggccgtcacctctggaggaaacaagggctctgctgggaacagtgaatggtgggccgcagcattggcatgatgggccaggggtcccacaggcgagtggagccccagcaaccccctcagccttgcgtgcctgtgtactggtgttctccctggccctccactccgtgttcgaggggctggcggtagggctgcagcgagaccgggctcgggccatggagctgtgcctggctttgctgctccacaagggcatcctggctgtcagcctgtccctgcggctgttgcagagccaccttagggcacaggtggtggctggctgtgggatcctcttctcatgcatgacacctctaggcatcgggctgggtgcagctctggcagagtcggcaggacctctgcaccagctggcccagtctgtgctagagggcatggcagctggcacctttctctatatcacctttctggaaatcctgccccaggagctggccagttctgagcaaaggatcctcaaggtcattctgctcctagcaggctttgccctgctcactggcctgctcttcatccaaatctagggggcttcaagagaggggcaggggagattgatgatcaggtgcccctgttctcccttccctcccccagttgtggggaataggaaggaaaggggaagggaaatactgaggaccaaaaagttctctgggagctaaagatagagcctttggggctatctgactaatgagagggaagtgggcagacaagaggctggccccagtcccaaggaacaagagatggtcaagtcgctagagacatatcaggggacattaggattggggaagacacttgactgctagaatcagaggttggacactatacataaggacaggctcacatgggaggctggaggtgggtacccagctgctgtggaacgggtatggacaggtcataaacctagagtcagtgtcctgttggtcctagcccatttcagcaccctgccacttggagtggacccctcctactcttcttagcgcctaccctcatacctatctccctcctcccatctcctaggggactggcgccaaatggtctctccctgccaattttggtatcttctctggcctctccagtcctgcttactcctctatttttaaagtgccaaacaaatccccttcctctttctcaaagcacagtaatgtggcactgagccctacccagcacctcagtgaagggggcctgcttgctctttattttggtcccggatcctggggtggggcagaaatattttctgggctggggtaggaggaaggttgttgcagccatctactgctgctgtaccctaggaatatggggacatggacatggtgtcccatgcccagatgataaacactgagctgccaaaacatttttttaaatacacccgaggagcccaagggggaagggcaatgcctacccccagcgttatttttggggagggagggctgtgcatagggacatattctttagaatctattttattaactgacctgttttgggacctgttacccaaataaaagatgtttctagaca

SEQ ID NO: 29094 - DNA, 1030 bp, Homo sapiens
  source 1..1030: mol_type = unassigned DNA
ggagtgcggtggtgcgatcacggttccatgcagcccccgacctcccgggctcaggtgattctcccgcctcagcaccgcgagcagctaggaccacaggcgcgagccactgcgtccggccggcgggacttatttgtcaggcggggattgggttccgccagcctaaagggaggggtcgcctgctccgcccgctcccgctcccgatctctgattgctcctaactgacgtcactcccggtctgtccccgcccactcggtgctgccattggcagtcggtcgtgggtctgagagtcactggagctaccagaagcatcatggggccctggggagagccagagctcctggtgtggcgccccgaggcggtagcttcagagcctccagtgcctgtggggctggaggtgaagttgggggccctggtgctgctgctggtgctcaccctcctctgcagcctggtgcccatctgtgtgctgcgccggccaggagctaaccatgaaggctcagcttcccgccagaaagccctgagcctagtaagctgtttcgcggggggcgtctttttggccacttgtctcctggacctgctgcctgactacctggctgccatagatgaggccctggcagccttgcacgtgacgctccagttcccactgcaagagttcatcctggccatgggcttcttcctggtcctggtgatggagcagatcacactggcttacaaggagcagtcagggccgtcacctctggaggaaacaagggctctgctgggaacagtgaatggtgggccgcagcattggcatgatgggccaggggtcccacaggcgagtggagccccagcaaccccctcagccttgcgtgcctgtgtactggtgttctccctggccctccactccgtgttcgaggggctggcggtagggctgcagcgagaccgggctcgggccatggagctgtgcctggctttgctgctccacaagggcatcctggctgtcagcctgtccctgcggctgttgcagagccaccttagggcacaggtggtggct

SEQ ID NO: 29095 - DNA, 912 bp, Homo sapiens
  source 1..912: mol_type = unassigned DNA
ccatcctggggcctgaagcgcttgttctctgcgctgggaaaaggggaacgatggagcgatccagcacccaaacttaccctgtccaggtggcccacgaagctacccaagacatctctgcacagccctagcctttttggcttcacccactccgttcgggagttggggacccggcctctacattccttaggggaactccagctccaggtcctatttggaggcggctcctagtttcctagttttctgggggcaccaggtgaaagggtctgagagtcactggagctaccagaagcatcatggggccctggggagagccagagctcctggtgtggcgccccgaggcggtagcttcagagcctccagtgcctgtggggctggaggtgaagttgggggccctggtgctgctgctggtgctcaccctcctctgcagcctggtgcccatctgtgtgctgcgccggccaggagctaaccatgaaggctcagcttcccgccagaaagccctgagcctagtaagctgtttcgcggggggcgtctttttggccacttgtctcctggacctgctgcctgactacctggctgccatagatgaggccctggcagccttgcacgtgacgctccagttcccactgcaagagttcatcctggccatgggcttcttcctggtcctggtgatggagcagatcacactggcttacaaggagcagtcagggccgtcacctctggaggaaacaagggctctgctgggaacagtgaatggtgggccgcagcattggcatgatgggccaggggtcccacaggcgagtggagccccagcaaccccctcagccttgcgtgcctgtgtactggtgttctccctggccctccactccgtgttcgaggggctggcggtagggctgcagcgagaccgggctcggg

SEQ ID NO: 29096 - DNA, 1141 bp, Homo sapiens
  source 1..1141: mol_type = unassigned DNA
agtccgtcccgggaccgcagactcttagggcccctctctttggccatctgcctctaggtcccatcctggggcctgaagcgcttgttctctgcgctgggaaaaggggaacgatggagcgatccagcacccaaacttaccctgtccaggtctgagagtcactggagctaccagaagcatcatggggccctggggagagccagagctcctggtgtggcgccccgaggcggtagcttcagagcctccagtgcctgtggggctggaggtgaagttgggggccctggtgctgctgctggtgctcaccctcctctgcagcctggtgcccatctgtgtgctgcgccggccaggagctaaccatgaaggctcagcttcccgccagaaagccctgagcctagtaagctgtttcgcggggggcgtctttttggccacttgtctcctggacctgctgcctgactacctggctgccatagatgaggccctggcagccttgcacgtgacgctccagttcccactgcaagagttcatcctggccatgggcttcttcctggtcctggtgatggagcagatcacactggcttacaaggagcagtcagggccgtcacctctggaggaaacaagggctctgctgggaacagtgaatggtgggccgcagcattggcatgatgggccaggggtcccacaggcgagtggagccccagcaaccccctcagccttgcgtgcctgtgtactggtgttctccctggccctccactccgtgttcgaggggctggcggtagggctgcagcgagaccgggctcgggccatggagctgtgcctggctttgctgctccacaagggcatcctggctgtcagcctgtccctgcggctgttgcagagccaccttagggcacaggtggtggctggctgtgggatcctcttctcatgcatgacacctctaggcatcgggctgggtgcagctctggcagagtcggcaggacctctgcaccagctggcccagtctgtgctagagggcatggcagctggcacctttctctatatcacctttctggaaatcctgccccaggagctggccagttctgagcaaaggatcctcaaggtcattctgctcctagcaggctttgccctgctcactggcctgctcttc

SEQ ID NO: 29097 - DNA, 1409 bp, Homo sapiens
  source 1..1409: mol_type = unassigned DNA
attcccgactctaggccggaagcgcgcggagaccatgtagtgagaccctcgcgaggtctgagagtcactggagctaccagaagcatcatggggccctggggagagccagagctcctggtgtggcgccccgaggcggtagcttcagagcctccagtgcctgtggggctggaggtgaagttgggggccctggtgctgctgctggtgctcaccctcctctgcagcctggtgcccatctgtgtgctgcgccggccaggagctaaccatgaaggctcagctccagttcccactgcaagagttcatcctggccatgggcttcttcctggtcctggtgatggagcagatcacactggcttacaaggagcagtcagggccgtcacctctggaggaaacaagggctctgctgggaacagtgaatggtgggccgcagcattggcatgatgggccaggggtcccacaggcgagtggagccccagcaaccccctcagccttgcgtgcctgtgtactggtgttctccctggccctccactccgtgttcgaggggctggcggtagggctgcagcgagaccgggctcgggccatggagctgtgcctggctttgctgctccacaagggcatcctggctgtcagcctgtccctgcggctgttgcagagccaccttagggcacaggtggtggctggctgtgggatcctcttctcatgcatgacacctctaggcatcgggctgggtgcagctctggcagagtcggcaggacctctgcaccagctggcccagtctgtgctagagggcatggcagctggcacctttctctatatcacctttctggaaatcctgccccaggagctggccagttctgagcaaaggatcctcaaggtcattctgctcctagcaggctttgccctgctcactggcctgctcttcatccaaatctagggggcttcaagagaggggcaggggagattgatgatcaggtgcccctgttctcccttccctcccccagttgtggggaataggaaggaaaggggaagggaaatactgaggaccaaaaagttctctgggagctaaagatagagcctttggggctatctgactaatgagagggaagtgggcagacaagaggctggccccagtcccaaggaacaagagatggtcaagtcgctagagacatatcaggggacattaggattggggaagacacttgactgctagaatcagaggttggacactatacataaggacaggctcacatgggaggctggaggtgggtacccagctgctgtggaacgggtatggacaggtcataaacctagagtcagtgtcctgttggtcctagcccatttcagcaccctgccacttggagtggacccctcctactcttcttagcgcctaccctcatacctatctccctcct

SEQ ID NO: 29098 - DNA, 1268 bp, Homo sapiens
  source 1..1268: mol_type = unassigned DNA
attcccgactctaggccggaagcgcgcggagaccatgtagtgagaccctcgcgaggtctgagagtcactggagctaccagaagcatcatggggccctggggagagccagagctcctggtgtggcgccccgaggcggtagcttcagagcctccagtgcctgtggggctggtgctcaccctcctctgcagcctggtgcccatctgtgtgctgcgccggccaggagctaaccatgaaggctcagcttcccgccagaaagccctgagcctagtaagctgtttcgcggggggcgtctttttggccacttgtctcctggacctgctgcctgactacctggctgccatagatgaggccctggcagccttgcacgtgacgctccagttcccactgcaagagttcatcctggccatgggcttcttcctggtcctggtgatggagcagatcacactggcttacaaggagcagtcagggccgtcacctctggaggaaacaagggctctgctgggaacagtgaatggtgggccgcagcattggcatgatgggccaggggtcccacaggcgagtggagccccagcaaccccctcagccttgcgtgcctgtgtactggtgttctccctggccctccactccgtgttcgaggggctggcggtagggctgcagcgagaccgggctcgggccatggagctgtgcctggctttgctgctccacaagggcatcctggctgtcagcctgtccctgcggctgttgcagagccaccttagggcacaggtggtggctggctgtgggatcctcttctcatgcatgacacctctaggcatcgggctgggtgcagctctggcagagtcggcaggacctctgcaccagctggcccagtctgtgctagagggcatggcagctggcacctttctctatatcacctttctggaaatcctgccccaggagctggccagttctgagcaaaggatcctcaaggtcattctgctcctagcaggctttgccctgctcactggcctgctcttcatccaaatctagggggcttcaagagaggggcaggggagattgatgatcaggtgcccctgttctcccttccctcccccagttgtggggaataggaaggaaaggggaagggaaatactgaggaccaaaaagttctctgggagctaaagatagagcctttggggctatctgactaatgagagggaagtgggcagacaagaggctggccccagtcccaaggaacaagagatggtcaagtcgctagagacatatca

SEQ ID NO: 29099 - DNA, 2289 bp, Homo sapiens
  source 1..2289: mol_type = unassigned DNA
gccgcccggatcgccgccgccgccgccgcacggtggccttttgtgtttttcagtacgtggcatgcctggatgtccctgccctggctgtggcatggcgggcccaaggctcctcttcctcactgcccttgccctggagctcttggaaagggctgggggttcccagccggccctccggagccgggggactgcgacggcctgtcgcctggacaacaaggaaagcgagtcctggggggctctgctgagcggagagcggctggacacctggatctgctccctcctgggttccctcatggtggggctcagtggggtcttcccgttgcttgtcattcccctagagatggggaccatgctgcgctcagaagctggggcctggcgcctgaagcagctgctcagcttcgccctggggggactcttgggcaatgtgtttctgcatctgctgcccgaagcctgggcctacacgtgcagcgccagccctggtggtgaggggcagagcctgcagcagcagcaacagctggggctgtgggtcattgctggcatcctgaccttcctggcgttggagaagatgttcctggacagcaaggaggaggggaccagccaggcccccaacaaagaccccactgctgctgccgccgcgctcaatggaggccactgtctggcccagccggctgcagagcccggcctcggtgccgtggtccggagcatcaaagtcagcggctacctcaacctgctggccaacaccatcgataacttcacccacgggctggctgtggctgccagcttccttgtgagcaagaagatcgggctcctgacaaccatggccatcctcctgcatgagatcccccatgaggtgggcgactttgccatcctgctccgggccggctttgaccgatggagcgcagccaagctgcaactctcaacagcgctggggggcctactgggcgctggcttcgccatctgtacccagtcccccaagggagtagaggagacggcagcctgggtcctgcccttcacctctggcggctttctctacatcgccttggtgaacgtgctccctgacctcttggaagaagaggacccgtggcgctccctgcagcagctgcttctgctctgtgcgggcatcgtggtaatggtgctgttctcgctcttcgtggattaactttccctgatgccgacgcccctgccccctgcagcaataagatgctcggattcactctgtgaccgcatatgtgagaggcagagagggcgagtggctgcgagagagaatgagcctcccgccagacaggagggaggtgcgtgtggatgtatgtggtgtgcacatgtggccagaggtgtgtgcgcgagaccgacactgtgatccctgtgctgggtccggggcccagtgtagcgcctgtccccagccatgctgtggttacctctccttgccgccctgtcaccttcacctcccggagtaagcagcgaggaagagcagcactggtcccaagcagaggccttgccctgctgggaccccgggagtgagagcagcccaaggatccagggtgcagggaactccagagctgcccacctcccactgccccctcagcacacacacagtccccaggcggcctaggggccaaggctggggcggctttggtcccttttcctggcccttccttccccacttctaagccaaagaaaggagaggcaggtgctcctgtaccccagccccactcagcactgacagtccccagctcctagtagtgagctgggaggcgcttcctaagaccctttcctcagggctgccctgggagctcattcctggccaacacgccctggcagcaccagcagctcttgccacctccagctgccaaacagcagcctgccgggcagggagcagccccaggccagagaggcctcccggtccagctcagggatgctcctgccagcacaggggccagggactcctggagcaggcacatagtgagcccgggcagccctgcccagctcaggcccctttccttccccattgaggttggggtaggtgggggcggtgagggctccacgttgtcagcgctcaggaatgtgctccggcagagtgctgaagccataatccccaaccatttcccttggctgacgcccaggtactcagctggcccactccacagccaggcctggccctgcccttcaccgtggatgttttcagaagtggccatcgagaggtctggatggttttatagcaactttgctgtgattccgtttgtatctgtaaatatttgttctatagataagatacaaataaatattatccacata

SEQ ID NO: 29100 - DNA, 2291 bp, Homo sapiens
  source 1..2291: mol_type = unassigned DNA
gggccgcccggatcgccgccgccgccgccgcacgtacgtggcatgcctggatgtccctgccctggctgtggcatggcgggcccaaggctcctcttcctcactgcccttgccctggagctcttggaaagggctgggggttcccagccggccctccggagccgggggactgcgacggcctgtcgcctggacaacaaggaaagcgagtcctggggggctctgctgagcggagagcggctggacacctggatctgctccctcctgggttccctcatggtggggctcagtggggtcttcccgttgcttgtcattcccctagagatggggaccatgctgcgctcagaagctggggcctggcgcctgaagcagctgctcagcttcgccctggggggactcttgggcaatgtgtttctgcatctgctgcccgaagcctgggcctacacgtgcagcgccagccctggtggtgaggggcagagcctgcagcagcagcaacagctggggctgtgggtcattgctggcatcctgaccttcctggcgttggagaagatgttcctggacagcaaggaggaggggaccagccaggcccccaacaaagaccccactgctgctgccgccgcgctcaatggaggccactgtctggcccagccggctgcagagcccggcctcggtgccgtggtccggagcatcaaagtcagcggctacctcaacctgctggccaacaccatcgataacttcacccacgggctggctgtggctgccagcttccttgtgagcaagaagatcgggctcctgacaaccatggccatcctcctgcatgagatcccccatgaggtgggcgactttgccatcctgctccgggccggctttgaccgatggagcgcagccaagctgcaactctcaacagcgctggggggcctactgggcgctggcttcgccatctgtacccagtcccccaagggagtagttgggtgttctcccgctgcagaggagacggcagcctgggtcctgcccttcacctctggcggctttctctacatcgccttggtgaacgtgctccctgacctcttggaagaagaggacccgtggcgctccctgcagcagctgcttctgctctgtgcgggcatcgtggtaatggtgctgttctcgctcttcgtggattaactttccctgatgccgacgcccctgccccctgcagcaataagatgctcggattcactctgtgaccgcatatgtgagaggcagagagggcgagtggctgcgagagagaatgagcctcccgccagacaggagggaggtgcgtgtggatgtatgtggtgtgcacatgtggccagaggtgtgtgcgcgagaccgacactgtgatccctgtgctgggtccggggcccagtgtagcgcctgtccccagccatgctgtggttacctctccttgccgccctgtcaccttcacctcccggagtaagcagcgaggaagagcagcactggtcccaagcagaggccttgccctgctgggaccccgggagtgagagcagcccaaggatccagggtgcagggaactccagagctgcccacctcccactgccccctcagcacacacacagtccccaggcggcctaggggccaaggctggggcggctttggtcccttttcctggcccttccttccccacttctaagccaaagaaaggagaggcaggtgctcctgtaccccagccccactcagcactgacagtccccagctcctagtagtgagctgggaggcgcttcctaagaccctttcctcagggctgccctgggagctcattcctggccaacacgccctggcagcaccagcagctcttgccacctccagctgccaaacagcagcctgccgggcagggagcagccccaggccagagaggcctcccggtccagctcagggatgctcctgccagcacaggggccagggactcctggagcaggcacatagtgagcccgggcagccctgcccagctcaggcccctttccttccccattgaggttggggtaggtgggggcggtgagggctccacgttgtcagcgctcaggaatgtgctccggcagagtgctgaagccataatccccaaccatttcccttggctgacgcccaggtactcagctggcccactccacagccaggcctggccctgcccttcaccgtggatgttttcagaagtggccatcgagaggtctggatggttttatagcaactttgctgtgattccgtttgtatctgtaaatatttgttctatagataagatacaaataaatattatccacata

SEQ ID NO: 29101 - DNA, 1379 bp, Homo sapiens
  source 1..1379: mol_type = unassigned DNA
tgcagaagcagaagcaacacagaaagaagataccaacagcctcctgaaactcacgagagtggacactccagtgttgaccacctaagataccactcctgctccaaagattacagctcccttgtcattctgactcctgggcttaccctacaccccagagatggagcaactactaggaataaaacttggctgcctgtttgccctgttggctctcactctgggctgtggccttactcccatctgcttcaaatggttccagattgatgcagccagaggtcatcaccggctagtcctcagactcctgggctgtatttctgctggtgttttcctgggagcagggttcatgcatatgactgctgaagccctggaggaaattgaatcacagattcagaagttcatggtgcagaacagatcagcaagtgagagaaattcttctggtgatgctgattcagctcatatggagtatccctatggagagctcatcatctccctgggcttcttttttgtcttctttttggagtcgctggcattgcagtgctgtcctggggctgctggaggatcgacagtgcaggacgaagaatggggtggggctcatatcttcgaactccacagccatggacatttaccctcaccctcaaagggtcccctccgagcccttgtcctcttgctgtcactctcctttcactcagtgtttgaagggctagctgtggggctgcagccgacagtagcagctaccgtgcagctctgccttgctgtcctggctcataaggggcttgtggtgtttggtgtaggaatgcggctagtgcatttaggtaccagctcacgatgggcagtgttctccatactattattagctctcatgtcccccctgggcctagccgtagggctggctgtgactggaggggactctgaaggagggcggggcttagcccaggctgtgttagagggtgtggcagctggtaccttcctgtatgtcaccttcctagaaattcttccacgggagctagctagtcctgaggcccctctagctaagtggagctgtgtagccgctggttttgccttcatggcctttattgccttgtgggcctgagagattcctggcttttctgatggacctatttaggacaacctctctatccccagggagacctcccaaatggctttgaccctcagacatttctttactcagactaaatagcattcagtaggactggactggaccccaggtttcctttacatgagatcccatttctcaccctggactaagacaaagatatttaggttgagcagctattaattggagaattggtacagagacgctccagattttattcttatcccatttatgctactgtgtgtaataaaatgcccattttaccctc

SEQ ID NO: 29102 - DNA, 1423 bp, Homo sapiens
  source 1..1423: mol_type = unassigned DNA
gggcaggggcgtgggcggggcgtggaccagccgcgccgagcggggcctctccgggccgcgtctgtggggtcgagactgcgcggccgttgggcgtgcagcggcgccagtcggcggacgaggggcccccgggagttgctggactgagacatgagcctccaactgtgtggttgggctcggtagcacatcgtgggacttgggtgtgcgcccacagatggtttggccctgcagtgaccagagcagcccaagccgccaccatggtgaaattgctagtggccaaaatcctgtgcatggtgggcgtgttcttcttcatgctgctcggctccctgctccccgtgaagatcatcgagacagattttgagaaggcccatcgctcgaaaaagatcctctctctctgcaacacctttggaggaggggtgtttctggccacgtgcttcaacgctctgctgcccgctgtgagggaaaagctccagaaggtcctgagcctcggccacatcagcaccgactacccgctggccgaaaccatcctcctgctgggcttcttcatgaccgtcttcctggagcagctgatcctgaccttccgcaaggagaagccgtccttcatcgacctggagaccttcaacgccggatcggacgtgggcagcgactcggagtatgagagccccttcatggggggcgcgcggggccacgcgctgtacgtggagccccacggccacggccccagcctgagcgtgcagggcctctcgcgcgccagccccgtgcgcctgctcagcctggccttcgcgctgtcggcccactcggtctttgagggcctggccctgggcctgcaggaggagggggagaaagtggtgagcctgttcgtgggggtggccgtccacgagacactggtggccgtggccctgggcatcagcatggcccggagtgccatgcccctgcgggacgcggccaagctggcggtcaccgtaagcgccatgatccccctgggcatcggcctgggcctgggcattgagagcgcccagggcgtgccgggcagcgtggcgtccgtgctgctgcagggcctggcgggcggcaccttcctcttcatcaccttcctggagatcctggccaaggagctggaggagaagagtgaccgtctgctcaaggtcctcttcctggtgctgggctacaccgtcctggccgggatggtcttcctcaagtggtgagcggcctcgccattgtccctgccgccggagcccgccgggagccccgggccggacacaggccgcgtcccccggccgcgcgtcccccaagagcgagcactgtggccctgggccaccacctgtgcacaaggggcctcccgggaccaggctgtgcccccgatcctacaccctgagcctcagagcactgctactttttaaaatacttctttctcttaaaagtctttacc

SEQ ID NO: 29103 - DNA, 2983 bp, Homo sapiens
  source 1..2983: mol_type = unassigned DNA
gggcaggggcgtgggcggggcgtggaccagccgcgccgagcggggcctctccgggccgcgtctgtggggtcgagactgcgcggccgttgggcgtgcagcggcgccagtcggcggacgaggggcccccgggagttgctggactgagacatgagcctccaactgtgtggttgggctcggtagcacatcgtgggacttgggtgtgcgcccacagatggtttggccctgcagtgaccagagcagcccaagccgccaccatggtgaaattgctagtggccaaaatcctgtgcatggtgggcgtgttcttcttcatgctgctcggctccctgctccccgtgaagatcatcgagacagattttgagaaggcccatcgctcgaaaaagatcctctctctctgcaacacctttggaggaggggtgtttctggccacgtgcttcaacgctctgctgcccgctgtgagggaaaaggtaagggctccctgggcactagcagcagcccttggcaccttatggccaagggactctgatgcattttcaacactgatgccaagttcagtgaaggccttgatgctgtaagggtgacggaaagtaggaagtgaatttgctgtgtgattgtgaactggttactttctgtctctgtgctctaccggccaaacaaggggtttggaccagacctgggattcccaacaggtggacttgtcggttgtcacctgataatcagaccagactacccacctaggtagggcacactctgtcctgaagctggaaagcatggcctctcttcggttcctatatcagtcagctactgttgcgtaacaaattatagcaaactgagcaccttaggactacagacgtttatcatctcacagtttctgtgagtcaggggtctgggcactgcttcaggagctcacaaggcagcagtcacagtgtctcctgggctgtggtctcatctcaacgttcaaccggggatgggtcggcctctaagctcatgtggttgtaagccaggttcagttcctcattggttgtcagaccgaaggtgtctgtttgtcagtgtctgttggctggggcagccctcagagcctggccacgtggacctccccagcatgatcagttccttcatcagcaaatggagaagatggccatgactctgtgtaagacagagggcacagtcccatgtcatgcagaggtgacagggtatcccttcccctctgccccagtgtcctgctggttagaagcaagttcaagtccttcccatactcaagtggccaggacctcacagggtatggctgtcaagaggcaggggcttctggggccatcttggagtctgtccaccccaactcctgacagcatcatcctctgctgacctgttccttgagctcccccatatcagcagcccagagtgtgggtcccctgtcaggccacagtgtgaccagccctggccatgcttgctgggtgaccctgggtgagtggcttcctctctctgggccagtgccagatgtgacattgaatttgtgttggttacatacttggtggagatatgaggaccccctgttcttcctcccaacgaaagcatggaagccctaagcttatcccccaacccctggccctgcttttcctcgtgcctagtgtccagaaaggaggagaagggctgttgtctgggattaaatcatctgagcctgttagtgtggcagagtagagttccagggtggctccctgagcttccagcccctgctccgcacgccccatgctcttccctcccctcgagtgtgggtagggctgggactgccgtgcgtgtcactcctgccattatgtcagaatcccagcagaggggatgttgcagctgtgatgaccgccccagatcggttagcgctgagttcatcaaaagggagggggtgggcctggcctaatcaggtgagccactcaccctcctgctggccttggagaagcaaaaagccagggtgtgccaggagaagggcatgaagcgaggacccgagggcagcctctcggtgccaagagccatccccgccaacagccagccaggacacggggcctcagtccacagccaccaggaggtggactcttccgacctccagtgagcttggaagaggaccctgggtgtcagtgagatctcagccctgatgacaccctgcgagacctggagcgtagggcccagctagcccgcacctggatttccaccgttcagagccgagacaccgcattcctgctgttccgcgtggctgagtctgcattcgttcgttacgcggtgtgtgaagactgacatctgcactgcgaggatggagatcttggtcatctctgacatctcctgcatcgcagaggccactgccagccccccttttcccccatggtcatggtgtcacccccgtcaccctctgactgcaggcctgggcgactgcggggagcttgctcttccctccccctcatcacagtggccttctcatggcacccaaacctttcccgccgttctcctgtcctcgggctggtcaggcggatgaggtccctactcccgagcccccagcctcacccactgcagggccaggctctcagtcacccctggaaaatggtgcctggttcacagctcccgtgcatctgcctcatctctcctgatcaacgtctgtctcttgggagtagctagagttcctcatgagcttgtcctcaagcgaggcatgcatgaggcctccagccggtggtcagtgagggagttaagtggcttctccgtggaaacacagccttctgctgcagcagaggctcacccagcgtgaactgcccccagggaacactgggcgatgcctggggacattgtggttgtcacgatggggggtgctcctggcctggagtgggtggaggccagagacactgctcagcagcaccctgcagtgcccaggacggccccgtcccagagaacaatccagccccgaatgtcagcaccttccccctacccgagttgtgaaaataaaaaatgtttccag

SEQ ID NO: 29104 - DNA, 1219 bp, Homo sapiens
  source 1..1219: mol_type = unassigned DNA
gtctgtggggtcgagactgcgcggccgttgggcgtgcagcggcgccagtcggcggacgaggggcccccgggagttgctggactgagacatgagcctccaactgtgtggttgggctcggtagcacatcgtgggacttgggtgtgcgcccacagatggtttggccctgcagtgaccagagcagcccaagccgccaccatggtgaaattgctagtggccaaaatcctgtgcatggtgggcgtgttcttcttcatgctgctcggctccctgctccccgtgaagatcatcgagacagattttgagaaggcccatcgctcgaaaaagatcctctctctctgcaacacctttggaggaggggtgtttctggccacgtgcttcaacgctctgctgcccgctgtgagggaaaagctccagaaggtcctgagcctcggccacatcagcaccgactacccgctggccgaaaccatcctcctgctgggcttcttcatgaccgtcttcctggagcagctgatcctgaccttccgcaaggagaagccgtccttcatcgacctggagaccttcaacgccggatcggacgtgggcagcgactcggagtatgagagccccttcatggggggcgcgcggggccacgcgctgtacgtggagccccacggccacggccccagcctgagcgtgcagggcctctcgcgcgccagccccgtgcgcctgctcagcctggccttcgcgctgtcggcccactcggtctttgagggcctggccctgggcctgcaggaggagggggagaaagtggtgagcctgttcgtgggggtggccgtccacgagacactggtggccgtggccctgggcatcagcatggcccggagtgccatgcccctgcgggacgcggccaagctggcggtcaccgtaagcgccatgatccccctgggcatcggcctgggcctgggcattgagagcgcccagggcgtgccgggcagcgtggcgtccgtgctgctgcagggcctggcgggcggcaccttcctcttcatcaccttcctggagatcctggccaaggagctggaggagaagagtgaccgtctgctcaaggtcctcttcctggtgctgggctacaccgtcctggccgggatggtcttcctcaagtggatctcgccgcccgagccccgagtgtcttgaggcttattagaggttggagtcactgcgatgggacagccgggctccgtccctc

SEQ ID NO: 29105 - DNA, 2297 bp, Homo sapiens
  source 1..2297: mol_type = unassigned DNA
aaactccaggaggcggaggaggctagtggcagtacctgggcaccctgaccctccccacaggccagagcccaccctcctgctcatgagggcagacaggcctttccagggacacagtccctcttctccccaggaccccagggccaactccccctgccggccctctgccatcaaattggcagtggctccaggggagtcccctggggatgggggaccactgttggggacccctctgcgtgcacccctgtagttggggaagcaggacaggggcctggggagacggaagggcgccaggggttgagagaggatggtggacgttgttggacttgaaagggaaacaggccctcggggaagcccctggccaggcctgcctctcccctccctggtgggcccagcgcccctgctcacttgtctctgcccacagtgcctgtctgtggaggacgccctgggcctgggcgagcctgaggggtcagggctgcccccgggcccggtcctggaggccaggtacgtcgcccgcctcagtgccgccgccgtcctgtacctcagcaaccccgagggcacctgtgaggacgctcgggctggcctctgggcctctcatgcagaccacctcctggccctgctcgagagccccaaggccctgaccccgggcctgagctggctgctgcagaggatgcaggcccgggctgccggccagacccccaagacggcctgcgtagatatccctcagctgctggaggaggcggtgggggcgggggctccgggcagtgctggcggcgtcctggctgccctgctggaccatgtcaggagcgggtcttgcttccacgccttgccgagccctcagtacttcgtggactttgtgttccagcagcacagcagcgaggtccctatgacgctggccgagctgtcagccttgatgcagcgcctgggggtgggcagggaggcccacagtgaccacagtcatcggcacaggggagccagcagctgggaccctgtgcccctcatcagctccagcaacagctccagtgtgtgggacacggtatgcctgagtgccagggacgtgatggctgcatatggactgtcggaacaggctggggtgaccccggaggcctgggcccaactgagccctgccctgctccaacagcagctgagtggagcctgcacctcccagtccaggccccccgtccaggaccagctcagccagtcagagaggtatctgtacggctccctggccacgctgctcatctgcctctgcgcggtctttggcctcctgctgctgacctgcactggctgcaggggggtcacccactacatcctgcagaccttcctgagcctggcagtgggtgcactcactggggacgctgtcctgcatctgacgcccaaggtgctggggctgcatacacacagcgaagagggcctcagcccacagcccacctggcgcctcctggctatgctggccgggctctacgccttcttcctgtttgagaacctcttcaatctcctgctgcccagggacccggaggacctggaggacgggccctgcggccacagcagccatagccacgggggccacagccacggtgtgtccctgcagctggcacccagcgagctccggcagcccaagcccccccacgagggctcccgcgcagacctggtggcggaggagagcccggagctgctgaaccctgagcccaggagactgagcccagagttgaggctactgccctatatgatcactctgggcgacgccgtgcacaacttcgccgacgggctggccgtgggcgccgccttcgcgtcctcctggaagaccgggctggccacctcgctggccgtgttctgccacgagttgccacacgagctgggggacttcgccgccttgctgcacgcggggctgtccgtgcgccaagcactgctgctgaacctggcctccgcgctcacggccttcgctggtctctacgtggcactcgcggttggagtcagcgaggagagcgaggcctggatcctggcagtggccaccggcctgttcctctacgtagcactctgcgacatgctcccggcgatgttgaaagtacgggacccgcggccctggctcctcttcctgctgcacaacgtgggcctgctgggcggctggaccgtcctgctgctgctgtccctgtacgaggatgacatcaccttctgataccctgccctagtcccccacctttgacttaagatcccacacctcacaaacctacagcccagaaaccagaagcccctatagaggccccagtcccaactccagtaaagacactcttgtccttgga

SEQ ID NO: 29106 - DNA, 2174 bp, Homo sapiens
  source 1..2174: mol_type = unassigned DNA
agccccagtctggccctggacaaccccagcaaagccgccctcagccagcccagaagcactgggccttggccacagcaacacccactgagcacgctgggagctgagtatggcgtccctggtctcgctggagctggggctgcttctggctgtgctggtggtgacggcgacggcgtccccgcctgctggtctgctgagcctgctcacctctggccagggcgctctggatcaagaggctctgggcggcctgttaaatacgctggcggaccgtgtgcactgcgccaacgggccgtgtggaaagtgcctgtctgtggaggacgccctgggcctgggcgagcctgaggggtcagggctgcccccgggcccggtcctggaggccaggtacgtcgcccgcctcagtgccgccgccgtcctgtacctcagcaaccccgagggcacctgtgaggacgctcgggctggcctctgggcctctcatgcagaccacctcctggccctgctcgagagccccaaggccctgaccccgggcctgagctggctgctgcagaggatgcaggcccgggctgccggccagacccccaagacggcctgcgtagatatccctcagctgctggaggaggcggtgggggcgggggctccgggcagtgctggcggcgtcctggctgccctgctggaccatgtcaggagcgggtcttgcttccacgccttgccgagccctcagtacttcgtggactttgtgttccagcagcacagcagcgaggtccctatgacgctggccgagctgtcagccttgatgcagcgcctgggggtgggcagggaggcccacagtgaccacagtcatcggcacaggggagccagcagctgggaccctgtgcccctcatcagctccagcaacagctccagtgtgtgggacacggtatgcctgagtgccagggacgtgatggctgcatatggactgtcggaacaggctggggtgaccccggaggcctgggcccaactgagccctgccctgctccaacagcagctgagtggagcctgcacctcccagtccaggccccccgtccaggaccagctcagccagtcagagaggtatctgtacggctccctggccacgctgctcatctgcctctgcgcggtctttggcctcctgctgctgacctgcactggctgcaggggggtcacccactacatcctgcagaccttcctgagcctggcagtgggtgcactcactggggacgctgtcctgcatctgacgcccaaggtgctggggctgcatacacacagcgaagagggcctcagcccacagcccacctggcgcctcctggctatgctggccgggctctacgccttcttcctgtttgagaacctcttcaatctcctgctgcccagggacccggaggacctggaggacgggccctgcggccacagcagccatagccacgggggccacagccacggtgtgtccctgcagctggcacccagcgagctccggcagcccaagcccccccacgagggctcccgcgcagacctggtggcggaggagagcccggagctgctgaaccctgagcccaggagactgagcccagagttgaggctactgccctatatgatcactctgggcgacgccgtgcacaacttcgccgacgggctggccgtgggcgccgccttcgcgtcctcctggaagaccgggctggccacctcgctggccgtgttctgccacgagttgccacacgagctgggggacttcgccgccttgctgcacgcggggctgtccgtgcgccaagcactgctgctgaacctggcctccgcgctcacggccttcgctggtctctacgtggcactcgcggttggagtcagcgaggagagcgaggcctggatcctggcagtggccaccggcctgttcctctacgtagcactctgcgacatgctcccggcgatgttgaaagtacgggacccgcggccctggctcctcttcctgctgcacaacgtgggcctgctgggcggctggaccgtcctgctgctgctgtccctgtacgaggatgacatcaccttctgataccctgccctagtcccccacctttgacttaagatcccacacctcacaaacctacagcccagaaaccagaagcccctatagaggccccagtcccaactccagtaaagacactcttgtccttgga

SEQ ID NO: 29107 - DNA, 2153 bp, Homo sapiens
  source 1..2153: mol_type = unassigned DNA
atattggtaaaggcattagggcgaaggtggaacggaacttcctgttctcgcgggatctaaaggcgggactgccacgtccaagcaaaccgggaaaggagaggatcccggagccgcgtgatggccagaggcctgggggccccccactgggtggccgtgggactgctgacctgggcgaccttggggcttctggtggctggactcgggggtcatgacgacctgcacgacgatctgcaagaggacttccatggccacagccacaggcactcacatgaagatttccaccatggccacagccatgcccatggccatggccacactcacgagagcatctggcatggacatacccacgatcacgaccatggacattcacatgaggatttacaccatggccatagccatggctactcccatgagagcctctaccacagaggacatggacatgaccatgagcatagccatggaggctatggggagtctggggctccaggcatcaagcaggacctggatgctgtcactctctgggcttatgcactgggggccacagtgctgatctcagcagctccattttttgtcctcttccttatccccgtggagtcgaactctccccggcatcgctctctacttcagatcttgctcagttttgcttccggtgggctcctgggagatgctttcctgcacctcattcctcatgctcttgaacctcattctcaccacactctggagcaacccggacatggacactcccacagtggccagggccccattctgtctgtgggactgtgggttctcagtggaattgttgcctttcttgtcgtggagaaatttgtgagacatgtgaaaggaggacatggtcacagtcatggacatggacacgctcacagtcatacacgtggaagtcatggacatggaagacaagagcgttctaccaaggagaagcagagctcagaggaagaagaaaaggaaacaagaggggttcagaagaggcgaggagggagcacagtacccaaagatgggccagtgagacctcagaacgctgaagaagaaaaaagaggcttagacctgcgtgtgtcggggtacctgaatctggctgctgacttggcacacaacttcactgatggtctggccattggggcttcctttcgagggggccggggactagggatcctgaccacaatgactgtcctgctacatgaagtgccccacgaggtcggagactttgccatcttggtccagtctggctgcagcaaaaagcaggcgatgcgtctgcaactactgacagcagtaggggcactggcaggcacagcctgtgcccttctcactgaaggaggagcagtgggcagtgaaattgcaggtggtgcaggtcctggctgggtcctgccatttactgcaggtggctttatctacgtagcaacagtgtctgtgttgcccgagctgctgagggaggcatcaccattgcaatcacttctggaggtgctggggctgctggggggagttatcatgatggtgctgattgcccaccttgagtgaggggtggataaactacccctgccccaaacctctacccctaactccaggtcaggggtgcgtagaggttgggggccctggccagggacatctgccaaaggaaggaactgtagcctgggagaatggttactttggcattagggccttcaagggctggcagtcttacagaggctggagcggtgagaatgagaggccagagggaccatagtgttgggcactgtctgaccatgttgcatttggaaggctaaatggggccatgaagaaggctggaagggacagggggtgatggcagcctacctggtgtcccctaccccacctgttctcggagaaccaagttgctacacaggaagttctccaaggtccagtttcctttctcccaccagttggtggaggcttcagggaagaccagagtcctggacagagagggtaacaggaggagtcggggataaacatcaaacatcaatcgtgtgtcctgatttgggagtgattggggggatggggtgggagagggttagttggtattctcatggcctgattttttttgtttctattccttttatatcactgtgtttgaatcgagggggaggggtggtaaccggaaataaagacctccgatcttccgccccaca

SEQ ID NO: 29108 - DNA, 2409 bp, Homo sapiens
  source 1..2409: mol_type = unassigned DNA
tcgcgggatctaaaggcgggactgccacgtccaagcaaaccgggaaaggagaggatcccggagccggtgagaattctctgttttttctctaccatcctttccaggccttttcctcacctaatgagtcgtagagacgagggcccagagagtctgtaaagtggctggtgaaagattagtgtcccagggccctacatccgggaggtggttcgggataaagagaactagtcttgggaacaatgtaggtgggaacttaagggaatgggagagcggcccatagaggtggacggagggcgcgattggagtaaagcggaccctgtgtaggtatagagttgagtcaagtggagtcactgcctctgtccctctggtcagcgtgatggccagaggcctgggggccccccactgggtggccgtgggactgctgacctgggcgaccttggggcttctggtggctggactcgggggtcatgacgacctgcacgacgatctgcaagaggacttccatggccacagccacaggcactcacatgaagatttccaccatggccacagccatgcccatggccatggccacactcacgagagcatctggcatggacatacccacgatcacgaccatggacattcacatgaggatttacaccatggccatagccatggctactcccatgagagcctctaccacagaggacatggacatgaccatgagcatagccatggaggctatggggagtctggggctccaggcatcaagcaggacctggatgctgtcactctctgggcttatgcactgggggccacagtgctgatctcagcagctccattttttgtcctcttccttatccccgtggagtcgaactctccccggcatcgctctctacttcagatcttgctcagttttgcttccggtgggctcctgggagatgctttcctgcacctcattcctcatgctcttgaacctcattctcaccacactctggagcaacccggacatggacactcccacagtggccagggccccattctgtctgtgggactgtgggttctcagtggaattgttgcctttcttgtcgtggagaaatttgtgagacatgtgaaaggaggacatggtcacagtcatggacatggacacgctcacagtcatacacgtggaagtcatggacatggaagacaagagcgttctaccaaggagaagcagagctcagaggaagaagaaaaggaaacaagaggggttcagaagaggcgaggagggagcacagtacccaaagatgggccagtgagacctcagaacgctgaagaagaaaaaagaggcttagacctgcgtgtgtcggggtacctgaatctggctgctgacttggcacacaacttcactgatggtctggccattggggcttcctttcgagggggccggggactagggatcctgaccacaatgactgtcctgctacatgaagtgccccacgaggtcggagactttgccatcttggtccagtctggctgcagcaaaaagcaggcgatgcgtctgcaactactgacagcagtaggggcactggcaggcacagcctgtgcccttctcactgaaggaggagcagtgggcagtgaaattgcaggtggtgcaggtcctggctgggtcctgccatttactgcaggtggctttatctacgtagcaacagtgtctgtgttgcccgagctgctgagggaggcatcaccattgcaatcacttctggaggtgctggggctgctggggggagttatcatgatggtgctgattgcccaccttgagtgaggggtggataaactacccctgccccaaacctctacccctaactccaggtcaggggtgcgtagaggttgggggccctggccagggacatctgccaaaggaaggaactgtagcctgggagaatggttactttggcattagggccttcaagggctggcagtcttacagaggctggagcggtgagaatgagaggccagagggaccatagtgttgggcactgtctgaccatgttgcatttggaaggctaaatggggccatgaagaaggctggaagggacagggggtgatggcagcctacctggtgtcccctaccccacctgttctcggagaaccaagttgctacacaggaagttctccaaggtccagtttcctttctcccaccagttggtggaggcttcagggaagaccagagtcctggacagagagggtaacaggaggagtcggggataaacatcaaacatcaatcgtgtgtcctgatttgggagtgattggggggatggggtgggagagggttagttggtattctcatggcctgattttttttgtttctattccttttatatcactgtgtttgaatcgagggggaggggtggtaaccggaaataaagacctccgatcttccgccccaca

SEQ ID NO: 29109 - DNA, 2409 bp, Homo sapiens; identical to SEQ ID NO: 29108
  source 1..2409: mol_type = unassigned DNA

SEQ ID NO: 29110 - DNA, 2153 bp, Homo sapiens; identical to SEQ ID NO: 29107
  source 1..2153: mol_type = unassigned DNA

SEQ ID NO: 29111 - DNA, 1015 bp, Homo sapiens
  source 1..1015: mol_type = unassigned DNA
gggaggaagggcgggcgagcggcccaagacatgatccctggctgagagtagggataccgaagaggtcccagggattcccaaggattgatcggaggattagctgagcacgaggaagcccctgagagaaagactctggcctggattgggtcgaattaagcccgtcgctctgctcagtaccaaaatgacagcgccaatgtggcagccatctttgtacagacgggaagtctcggcgcgagttcccgccccctcgtctagttggaaaccgaggaggcggtctcctccggcctgttagcccgcctcgcccaccctcccctcaaatcacctccacactcgcgcatgcgtgtcagtgcaggatggattcgtcgctaccggagtgccgccatattggtaaaggcattagggcgaaggtggaacggaacttcctgttctcgcgggatctaaaggcgggactgccacgtccaagcaaaccgggaaaggagaggatcccggagccggcactgggggccacagtgctgatctcagcagctccattttttgtcctcttccttatccccgtggagtcgaactctccccggcatcgctctctacttcagatcttgctcagttttgcttccggtgggctcctgggagatgctttcctgcacctcattcctcatgctcttgaacctcattctcaccacactctggagcaacccggacatggacactcccacagtggccagggccccattctgtctgtgggactgtgggttctcagtggaattgttgcctttcttgtcgtggagaaatttgtgagacatgtgaaaggaggacatggtcacagtcatggacatggacacgctcacagtcatacacgtggaagtcatggacatggaagacaagagcgttctaccaaggagaagcagagctcagaggaagaagaaaaggaaacaagaggggttcagaagaggcgaggagggagcacagtacccaaagatgggccagtgagacctcagaacgctgaagaagaaaaaag

SEQ ID NO: 29112 - DNA, 1015 bp, Homo sapiens; identical to SEQ ID NO: 29111
  source 1..1015: mol_type = unassigned DNA

SEQ ID NO: 29113 - DNA, 2153 bp, Homo sapiens; identical to SEQ ID NO: 29107
  source 1..2153: mol_type = unassigned DNA

SEQ ID NO: 29114 - DNA, 2409 bp, Homo sapiens; identical to SEQ ID NO: 29108
  source 1..2409: mol_type = unassigned DNA

SEQ ID NO: 29115 - DNA, 2153 bp, Homo sapiens; identical to SEQ ID NO: 29107
  source 1..2153: mol_type = unassigned DNA

SEQ ID NO: 29116 - DNA, 1015 bp, Homo sapiens; identical to SEQ ID NO: 29111
  source 1..1015: mol_type = unassigned DNA

SEQ ID NO: 29117 - DNA, 1015 bp, Homo sapiens; identical to SEQ ID NO: 29111
  source 1..1015: mol_type = unassigned DNA

SEQ ID NO: 29118 - DNA, 2409 bp, Homo sapiens; identical to SEQ ID NO: 29108
  source 1..2409: mol_type = unassigned DNA

SEQ ID NO: 29119 - DNA, 2409 bp, Homo sapiens; identical to SEQ ID NO: 29108
  source 1..2409: mol_type = unassigned DNA

SEQ ID NO: 29120 - DNA, 2153 bp, Homo sapiens; identical to SEQ ID NO: 29107
  source 1..2153: mol_type = unassigned DNA

SEQ ID NO: 29121 - DNA, 2153 bp, Homo sapiens; identical to SEQ ID NO: 29107
  source 1..2153: mol_type = unassigned DNA

SEQ ID NO: 29122 - DNA, 1015 bp, Homo sapiens; identical to SEQ ID NO: 29111
  source 1..1015: mol_type = unassigned DNA

SEQ ID NO: 29123 - DNA, 1314 bp, Homo sapiens
  source 1..1314: mol_type = unassigned DNA
ctgttctcgcgggatctaaaggcgggactgccacgtccaagcaaaccgggaaaggagaggatcccggagccgcgtgatggccagaggcctgggggccccccactgggtggccgtgggactgctgacctgggcgaccttggggcttctggtggctggactcgggggtcatgacgacctgcacgacgatctgcaagaggacttccatggccacagccacagtgctgatctcagcagctccattttttgtcctcttccttatccccgtggagtcgaactctccccggcatcgctctctacttcagatcttgctcagttttgcttccggtgggctcctgggagatgcttcctgcacctcattcctcatgctcttgaacctcattctcaccacactctggagcaacccggacatggacactcccacagtggccagggccccattctgtctgtgggactgtgggttctcagtggaattgttgcctttcttgtcgtggagaaatttgtgagacatgtgaaaggaggacatggtcacagtcatggacatggacacgctcacagtcatacacgtggaagtcatggacatggaagacaagagcgttctaccaaggagaagcagagctcagaggaagaagaaaaggaaacaagaggggttcagaagaggcgaggagggagcacagtacccaaagatgggccagtgagacctcagaacgctgaagaagaaaaaagaggcttagacctgcgtgtgtcggggtacctgaatctggctgctgacttggcacacaacttcactgatggtctggccattggggcttcctttcgagggggccggggactagggatcctgaccacaatgactgtcctgctacatgaagtgccccacgaggtcggagactttgccatcttggtccagtctggctgcagcaaaaagcaggcgatgcgtctgcaactactgacagcagtaggggcactggcaggcacagcctgtgcccttctcactgaaggaggagcagtgggcagtgaaattgcaggtggtgcaggtcctggctgggtcctgccatttactgcaggtggctttatctacgtagcaacagtgtctgtgttgcccgagctgctgagggaggcatcaccattgcaatcacttctggaggtgctggggctgctggggggagttatcatgatggtgctgattgcccaccttgagtgaggggtggataaactacccctgccccaaacctctacccctaactccaggtcaggggtgcgtagaggttgggggccctggccagggacatctgccaaaggaaggaactgtagcct

SEQ ID NO: 29124 - DNA, 1842 bp, Homo sapiens
  source 1..1842: mol_type = unassigned DNA
ctgttctcgcgggatctaaaggcgggactgccacgtccaagcaaaccgggaaaggagaggatcccggagccgcgtgatggccagaggcctgggggccccccactgggtggccgtgggactgctgacctgggcgaccttggggcttctggtggctggactcgggggtcatgacgacctgcacgacgatctgcaagaggacttccatggccatggccacactcacgagagcatctggcatggacatacccacgatcacgaccatggacattcacatgaggatttacaccatggccatagccatggctactcccatgagagcctctaccacagaggacatggacatgaccatgagcatagccatggaggctatggggagtctggggctccaggcatcaagcaggacctggatgctgtcactctctgggcttatgcactgggggccacagtgctgatctcagcagctccattttttgtcctcttccttatccccgtggagtcgaactctccccggcatcgctctctacttcagatcttgctcagttttgcttccggtgggctcctgggagatgctttcctgcacctcattcctcatgctcttgaacctcattctcaccacactctggagcaacccggacatggacactcccacagtggccagggccccattctgtctgtgggactgtgggttctcagtggaattgttgcctttcttgtcgtggagaaatttgtgagacatgtgaaaggaggacatggtcacagtcatggacatggacacgctcacagtcatacacgtggaagtcatggacatggaagacaagagcgttctaccaaggagaagcagagctcagaggaagaagaaaaggaaacaagaggggttcagaagaggcgaggagggagcacagtacccaaagatgggccagtgagacctcagaacgctgaagaagaaaaaagaggcttagacctgcgtgtgtcggggtacctgaatctggctgctgacttggcacacaacttcactgatggtctggccattggggcttcctttcgagggggccggggactagggatcctgaccacaatgactgtcctgctacatgaagtgccccacgaggtcggagactttgccatcttggtccagtctggctgcagcaaaaagcaggcgatgcgtctgcaactactgacagcagtaggggcactggcaggcacagcctgtgcccttctcactgaaggaggagcagtgggcagtgaaattgcaggtggtgcaggtcctggctgggtcctgccatttactgcaggtggctttatctacgtagcaacagtgtctgtgttgcccgagctgctgagggaggcatcaccattgcaatcacttctggaggtgctggggctgctggggggagttatcatgatggtgctgattgcccaccttgagtgaggggtggataaactacccctgccccaaacctctacccctaactccaggtcaggggtgcgtagaggttgggggccctggccagggacatctgccaaaggaaggaactgtagcctgggagaatggttactttggcattagggccttcaagggctggcagtcttacagaggctggagcggtgagaatgagaggccagagggaccatagtgttgggcactgtctgaccatgttgcatttggaaggctaaatggggccatgaagaaggctggaagggacagggggtgatggcagcctacctggtgtcccctaccccacctgttctcggagaaccaagttgctacacaggaagttctccaaggtccagtttcctttctcccaccagttggtggaggcttcagggaagaccagagtcctg

SEQ ID NO: 29125 - DNA, 1015 bp, Homo sapiens; identical to SEQ ID NO: 29111
  source 1..1015: mol_type = unassigned DNA

SEQ ID NO: 29126 - DNA, 2409 bp, Homo sapiens; identical to SEQ ID NO: 29108
  source 1..2409: mol_type = unassigned DNA

SEQ ID NO: 29127 - DNA, 1314 bp, Homo sapiens; identical to SEQ ID NO: 29123
  source 1..1314: mol_type = unassigned DNA

SEQ ID NO: 29128 - DNA, 1842 bp, Homo sapiens; identical to SEQ ID NO: 29124
  source 1..1842: mol_type = unassigned DNA

SEQ ID NO: 29129 - DNA, 1314 bp, Homo sapiens; identical to SEQ ID NO: 29123
  source 1..1314: mol_type = unassigned DNA

SEQ ID NO: 29130 - DNA, 1314 bp, Homo sapiens; identical to SEQ ID NO: 29123
  source 1..1314: mol_type = unassigned DNA

SEQ ID NO: 29131 - DNA, 1842 bp, Homo sapiens; identical to SEQ ID NO: 29124
  source 1..1842: mol_type = unassigned DNA

SEQ ID NO: 29132 - DNA, 1842 bp, Homo sapiens; identical to SEQ ID NO: 29124
  source 1..1842: mol_type = unassigned DNA

SEQ ID NO: 29133 - DNA, 1314 bp, Homo sapiens; identical to SEQ ID NO: 29123
  source 1..1314: mol_type = unassigned DNA

SEQ ID NO: 29134 - DNA, 1842 bp, Homo sapiens; identical to SEQ ID NO: 29124
  source 1..1842: mol_type = unassigned DNA

SEQ ID NO: 29135 - DNA, 1842 bp, Homo sapiens; identical to SEQ ID NO: 29124
  source 1..1842: mol_type = unassigned DNA

SEQ ID NO: 29136 - DNA, 1314 bp, Homo sapiens; identical to SEQ ID NO: 29123
  source 1..1314: mol_type = unassigned DNA

SEQ ID NO: 29137 - DNA, 2959 bp, Homo sapiens
  source 1..2959: mol_type = unassigned DNA
aggtctggacctgaaccgagacaaggaggtaccacactattcactgctgcgtcgcagagcgggctgggcggctgtctggacctcgagaggcctgaggcaaggatcgcgtcagaccccgaaagctggtttgttgattagtgatctaagaccgccggaagcgcttcttctcaatcaagctatgcaacaggaagtcattacgatcccgttgtaacctctaaatatgtccccgttctgcacagcatcccgataaccgttttgtttttctcatattatgaccttctcatgttagcaccacttcgcaacgctccaggtcgtgaaggagcaacttcaccatcgccgcctacagacgccactgggagcttgggagagtgggacgtggacaggaacgtaaagaccgaagggtgggtttcgaaggagcggatttcgaagttgcaccggttgaggatggctgacattctctctcagtcagagaccctggcgtcgcaagacctcagtggggacttcaagaagccagctctgccggtgtccccagcggcgcggagtaaggccccggccagcagttcttcaaaccctgaggaggtacagaaggaagggcccactgcgttgcaggactccaattctggggagcccgacatccctcctcctcagccggactgcggtgattttaggagtctacaggaggagcagtcgcgccccccgacagcggtttcttcccctggcggtccagcccgggctcccccctaccaagagcctccatggggtggccctgccacagccccctacagcttagagaccctgaagggcggcactatccttggcacccgtagcttgaaagggacgagttactgccttttcgggaggctgtctggctgcgacgtgtgcctggagcacccttcggtgtctcggtaccacgcagtgctgcagcacagggcgtccggccctgacggagaatgcgacagcaacgggccgggcttctacctctacgatctgggaagcacccatggcacttttctcaacaaaactcgcatcccacctcgcacctactgtcgagtccacgttgggcatgttgttcgctttggaggcagcacccggctctttatcctgcagggaccagaggaagaccgagaggcagaatccgagttaacagtaacacagttgaaggaattgcgcaagcagcagcaaatattgttggagaagaagatgctaggagaagactcagatgaagaagaggaaatggatacctctgaaaggaagataaatgctggtagccaagatgatgagatgggttgcacctggggaatgggagaagatgcagtagaggatgatgctgaagagaaccctattgtcttagagtttcagcaggaaagggaggccttttatataaaggatcccaaaaaggctctccaaggcttttttgaccgagaaggagaagaattagaatatgaatttgatgaacagggacatagcacttggctctgcagggtgagattacctgtggacgattcaactggaaaacaactggtggctgaggccattcactcaggaaagaaaaaagaagcaatgatccagtgctcattggaagcttgtcggattcttgacactttgggattgcttcggcaggaagcagtatctcggaaaaggaaagccaagaactgggaagatgaagacttttatgatagtgatgatgacacatttcttgataggactggcctgattgagaagaagcgtctgaacagaatgaagaaggctggcaagattgatgagaagccagagacctttgaatcattggttgcaaaattaaatgatgctgaaagggaactttctgaaatttctgagagattgaaagcctcaagccaagttctatcagagtctccatctcaggattctttagatgcgttcatgtcagaaatgaaatcaggcagtacattagatggtgtgtcccggaagaaacttcacctgagaacttttgaactgaggaaagaacaacagagacttaaagggttaataaaaattgtaaagccagcagagattccagaactaaaaaagactgaaactcagactacaggtgcagaaaacaaagctaaaaagcttacattgcctctatttggtgccatgaaaggaggaagcaaattcaaattaaaaactggaacagtagggaagttaccccccaagcgtccagaactccctccaactctaatgagaatgaaagatgagcctgaagtagaagaggaggaggaagaggaagaggaagaagagaaagaaaaggaggagcatgaaaagaaaaaactggaggatggaagcctcagtaggccacagccagagatagagccagaagcagcagtgcaggaaatgaggcctcccacagatctcacacattttaaagaaacccaaacccatgaaaacatgtctcaacttagcgaggaagaacagaataaagattatcaagactgtagcaaaaccacttcattgtgcgcaggaccctcagcatcaaagaatgaatatgagaaaagcagaggtgaattgaagaaaaagaaaacacctggtccaggcaaacttccaccaacactttcttccaaatatcctgaagatgacccagactactgtgtgtgggtcccacctgaaggtcaaagtggagatggcagaacccatcttaatgacaagtatggctattgattgcttcagaatcccaaaagaaaaccttgtggaccatgtgacatggaatatttgggataatgtatcaaattgaatggccagagaagtttagatgattatttgtaagatctggtgactggcttttcgttctgtgttcttggcttcctaaatttatctgcccatatgattctcatgcatttgatatttatgtttaaaagtgtttatatatgtatgtaaaaagggaaccatatgttttgagaatttgtaaagtgagagacatgatcctattaaaataagaaggcaaaaa

SEQ ID NO: 29138 - DNA, 3947 bp, Homo sapiens
  source 1..3947: mol_type = unassigned DNA
gctattggtcacactggcccagaggggcacgtgactgggaaggggcacaggctggtcccctccccctccttctcaggttcacccctgccggccatggacttcctcctgcggcctcagccagagccagagagcttgggccctgggacgcctgggttccccgagcaggaggaagacgaacttcaccgcaccctgggcgtggagcggtttgaggagatcctacaggaggccgggtctcgtggaggggaggagccaggccgcagctatggggaggaagactttgagtaccaccgccagtcctcccaccacatccatcacccactgtccacccacctgcctccggatgcacgccgccgcaagacaccccagggcccaggacggaagcctcgaaggcgcccgggagcctccccgactggagaaaccccgaccattgaggagggggaggaagatgaggatgaggccagcgaggctgagggggcccgggctctcactcagccgtcccctgtctccacaccctcctcggtgcagttctttctccaagaggatgacagtgctgaccggaaggcagagaggaccagtccatcttcccctgcaccactgccccaccaggaggcgactcctcgggcctccaaaggggcccaggctggaacccaggtggaggaggcggaggcggaggcggtggcggtggccagtggcactgcagggggtgacgacgggggtgcctcggggcgccccctgcccaaagcccagcctgggcaccgcagctacaaccttcaggagaggaggcgcatcgggagcatgactggggctgagcaggcactgctgccccgggtccccacggatgagattgaggcccagacgctggccacggccgacctagacctcatgaagagtcaccggtttgaggacgttcctggggtgcggcggcacttggtgcggaagaatgccaaaggttccacacagagtggccgagaagggcgggagcctggccccacacctcgggcccgaccccgggccccccacaagccccatgaggtgtttgtggagctgaatgagttgctcctggacaaaaaccaggagccccagtggcgggagacagctcgctggatcaaatttgaagaggacgtggaggaggagactgagcgctgggggaagccccacgtggcctccctctccttccgcagtctcctggagctccgcaggaccctggcccatggggctgtgctcttggatctggaccagcagaccctgcccggagtggcccaccaggtggtggagcagatggtcatctctgaccagatcaaggccgaggacagggccaacgtgctgcgggctctgctgttgaaacacagccacccaagtgatgagaaggacttctccttcccccgcaacatctcagctggctccctgggctccctgctggggcatcaccatggtcagggggctgagagtgacccccacgtcaccgagcctctcatgggaggtgttcctgagacccggctggaggtggagcgagagcgtgagctgccgcctccagcaccaccagctggcatcacccgctccaagtccaagcacgagctgaaactgctggagaagattcctgagaatgccgaggccacggtggtccttgtgggctgcgtggagttcctctcccgccccaccatggcctttgtgcggctccgggaggctgtggagttggacgcagtgttggaggtgccggtgcctgtgcgtttcctcttcctgctgctgggcccgagtagtgccaacatggactaccacgagatcggccgctccatctccaccctcatgtcagacaagcaattccacgaggcagcctacctggctgacgagcgggaggacctgctgacggccatcaacgccttcctggactgcagcgtggtgctgccgccttcagaagtgcagggcgaggagctgctgcgctctgtggcccacttccagcgccagatgctcaagaagcgagaggagcagggccggctgctacctacaggggctgggctggagcccaaatctgcccaagataaggcgctcctgcagatggtagaggcggcaggggcagctgaagatgatccccttcggcggacggggcggccctttggggggctgatccgagatgtgcggcgccgctatccccactacctgagtgacttccgagatgcacttgaccctcagtgcctggccgcagtcatcttcatctactttgccgccctgtctcctgccatcacctttggggggctgctgggagagaagacgcaggacctgataggggtgtcggagctgattatgtccacagcgctccagggcgtggtcttctgcctgctgggtgcccagcccctgttggtgatcggcttctcagggcccctgctggtctttgaggaggccttcttctcgttctgtagcagcaaccacctggagtacctggtgggccgtgtgtggatcggcttctggctggtgttcctggccctgctcatggtggccctggaggggagcttcctggtccgcttcgtctcccgcttcacccaggagatcttcgccttcttgatctcactcatcttcatctatgagaccttctacaagctggtgaagatcttccaggagcaccccctgcatggctgctcagcctccaacagctcagaggtggacggcggtgagaacatgacatgggccggggcaagacccacgctggggccgggcaacaggagcttggctgggcagtctgggcaggggaagccccggggccagcccaacacggccctgctgtcgctggtgctcatggccggcaccttcttcatcgccttcttcctgcgcaaattcaagaacagccggttctttcctggccggatccggcgggtgattggggactttggggtgcccatcgccatcctcatcatggtgcttgtggattacagtattgaggacacctatacccagaagctgagcgttcccagtggattctcggtgactgccccagaaaagaggggctgggtcatcaaccccctgggagagaagagccccttccctgtgtggatgatggttgccagcctgctgcccgccatcctggtcttcattctcatcttcatggagacacagatcaccacgctcatcatctccaagaaggagcgcatgctgcagaagggctccggcttccacctggacctgctgctcatcgtggccatgggcggcatctgtgccctctttggcctgccctggttggctgctgccactgtccgctctgtcactcacgccaacgcgctcactgtcatgagcaaggctgtggcacctggggacaagcccaagattcaggaagtcaaggagcagcgggtgacggggctgctggttgccctgcttgtgggcctctccatagttatcggggatctgctccggcagatccccctggccgtgctctttggaattttcctgtacatgggagtcacctcccttaacgggatccagttctatgagcggctgcatctgctgctcatgccgcccaaacaccacccagatgtcacttacgtcaagaaggtccggaccctccgtatgcacctgttcacggccctgcagctgctctgcctggccctgctctgggccgtcatgtccacagctgcctccctggccttccccttcatcctcatcctcacagtgccgctccgcatggtggtgctcacccgtatcttcaccgaccgagagatgaaatgtctggatgctaacgaggcagagccggtgtttgatgagcgggagggtgtggacgagtacaatgagatgcccatgcctgtgtagccgccaccgagggacagccgagggaccgatggacgaggggacaggctggtgggatggggttccccctcccatgcccctccctcctttttatttaagtgaataatttaaagtcttctcctcccccactgcccctgcagtaaagtgctttggccccc

SEQ ID NO: 29139 - DNA, 4387 bp, Homo sapiens
  source 1..4387: mol_type = unassigned DNA
ccggccatggacttcctcctgcggcctcaggtgcgaggggtctgcgaccctctctccccatggcggcaagctccctgcgcctctccccgtcccctcgtcccacggggctgcttctggtgggagtggggctgggcgcttaggggagccaggagatggacaggagccttcctcacagaggggagaagccagccccctggcccgctcaccttctcttatccggtgttctgccagtcccagctgctccagtccccacctcgcccctaagacccgcccttcaccccagccctccccgcgctcttccttgttctggctgctggcaccgctatggagggggctgcatacccccgcccttggagatcccgatgcccttcaggtccagaagctcttgagcaaatatttggcggcgcctggagctgagaccgtgggtgggtggggggctggaccaaggctgcctggccaggcggctgccgcttagctgggctgagctcttacaagcgccgcattccctgccggctgtgccggccggccgctgctccgcgcccgcaggatgactcagccagagccagagagcttgggccctgggacgcctgggttccccgagcaggaggaagacgaacttcaccgcaccctgggcgtggagcggtttgaggagatcctacaggaggccgggtctcgtggaggggaggagccaggccgcagctatggggaggaagactttgagtaccaccgccagtcctcccaccacatccatcacccactgtccacccacctgcctccggatgcacgccgccgcaagacaccccagggcccaggacggaagcctcgaaggcgcccgggagcctccccgactggagaaaccccgaccattgaggagggggaggaagatgaggatgaggccagcgaggctgagggggcccgggctctcactcagccgtcccctgtctccacaccctcctcggtgcagttctttctccaagaggatgacagtgctgaccggaaggcagagaggaccagtccatcttcccctgcaccactgccccaccaggaggcgactcctcgggcctccaaaggggcccaggctggaacccaggtggaggaggcggaggcggaggcggtggcggtggccagtggcactgcagggggtgacgacgggggtgcctcggggcgccccctgcccaaagcccagcctgggcaccgcagctacaaccttcaggagaggaggcgcatcgggagcatgactggggctgagcaggcactgctgccccgggtccccacggatgagattgaggcccagacgctggccacggccgacctagacctcatgaagagtcaccggtttgaggacgttcctggggtgcggcggcacttggtgcggaagaatgccaaaggttccacacagagtggccgagaagggcgggagcctggccccacacctcgggcccgaccccgggccccccacaagccccatgaggtgtttgtggagctgaatgagttgctcctggacaaaaaccaggagccccagtggcgggagacagctcgctggatcaaatttgaagaggacgtggaggaggagactgagcgctgggggaagccccacgtggcctccctctccttccgcagtctcctggagctccgcaggaccctggcccatggggctgtgctcttggatctggaccagcagaccctgcccggagtggcccaccaggtggtggagcagatggtcatctctgaccagatcaaggccgaggacagggccaacgtgctgcgggctctgctgttgaaacacagccacccaagtgatgagaaggacttctccttcccccgcaacatctcagctggctccctgggctccctgctggggcatcaccatggtcagggggctgagagtgacccccacgtcaccgagcctctcatgggaggtgttcctgagacccggctggaggtggagcgagagcgtgagctgccgcctccagcaccaccagctggcatcacccgctccaagtccaagcacgagctgaaactgctggagaagattcctgagaatgccgaggccacggtggtccttgtgggctgcgtggagttcctctcccgccccaccatggcctttgtgcggctccgggaggctgtggagttggacgcagtgttggaggtgccggtgcctgtgcgtttcctcttcctgctgctgggcccgagtagtgccaacatggactaccacgagatcggccgctccatctccaccctcatgtcagacaagcaattccacgaggcagcctacctggctgacgagcgggaggacctgctgacggccatcaacgccttcctggactgcagcgtggtgctgccgccttcagaagtgcagggcgaggagctgctgcgctctgtggcccacttccagcgccagatgctcaagaagcgagaggagcagggccggctgctacctacaggggctgggctggagcccaaatctgcccaagataaggcgctcctgcagatggtagaggcggcaggggcagctgaagatgatccccttcggcggacggggcggccctttggggggctgatccgagatgtgcggcgccgctatccccactacctgagtgacttccgagatgcacttgaccctcagtgcctggccgcagtcatcttcatctactttgccgccctgtctcctgccatcacctttggggggctgctgggagagaagacgcaggacctgataggggtgtcggagctgattatgtccacagcgctccagggcgtggtcttctgcctgctgggtgcccagcccctgttggtgatcggcttctcagggcccctgctggtctttgaggaggccttcttctcgttctgtagcagcaaccacctggagtacctggtgggccgtgtgtggatcggcttctggctggtgttcctggccctgctcatggtggccctggaggggagcttcctggtccgcttcgtctcccgcttcacccaggagatcttcgccttcttgatctcactcatcttcatctatgagaccttctacaagctggtgaagatcttccaggagcaccccctgcatggctgctcagcctccaacagctcagaggtggacggcggtgagaacatgacatgggccggggcaagacccacgctggggccgggcaacaggagcttggctgggcagtctgggcaggggaagccccggggccagcccaacacggccctgctgtcgctggtgctcatggccggcaccttcttcatcgccttcttcctgcgcaaattcaagaacagccggttctttcctggccggatccggcgggtgattggggactttggggtgcccatcgccatcctcatcatggtgcttgtggattacagtattgaggacacctatacccagaagctgagcgttcccagtggattctcggtgactgccccagaaaagaggggctgggtcatcaaccccctgggagagaagagccccttccctgtgtggatgatggttgccagcctgctgcccgccatcctggtcttcattctcatcttcatggagacacagatcaccacgctcatcatctccaagaaggagcgcatgctgcagaagggctccggcttccacctggacctgctgctcatcgtggccatgggcggcatctgtgccctctttggcctgccctggttggctgctgccactgtccgctctgtcactcacgccaacgcgctcactgtcatgagcaaggctgtggcacctggggacaagcccaagattcaggaagtcaaggagcagcgggtgacggggctgctggttgccctgcttgtgggcctctccatagttatcggggatctgctccggcagatccccctggccgtgctctttggaattttcctgtacatgggagtcacctcccttaacgggatccagttctatgagcggctgcatctgctgctcatgccgcccaaacaccacccagatgtcacttacgtcaagaaggtccggaccctccgtatgcacctgttcacggccctgcagctgctctgcctggccctgctctgggccgtcatgtccacagctgcctccctggccttccccttcatcctcatcctcacagtgccgctccgcatggtggtgctcacccgtatcttcaccgaccgagagatgaaatgtctggatgctaacgaggcagagccggtgtttgatgagcgggagggtgtggacgagtacaatgagatgcccatgcctgtgtagccgccaccgagggacagccgagggaccgatggacgaggggacaggctggtgggatggggttccccctcccatgcccctccctcctttttatttaagtgaataatttaaagtcttctcctcccccactgcccctgcagtaaagtgctttggccccca

SEQ ID NO: 29140 - DNA, 6447 bp, Homo sapiens
  source 1..6447: mol_type = unassigned DNA
gtaatggaagtggtggaagcagagaaaatagtactgttgacttcagcaaggtttttgtttttgttattgggtccagcgggcaaggcaccacagtaccatgaaattggacgatcaatagccactctcatgacagatgagattttccatgatgtagcttataaagcaaaagacagaaatgacctcttatctggaattgatgaatttttagatcaagtaactgtcctacctccaggagagtgggatccttctatacgcatagaaccaccaaaaagtgtcccttctcaggaaaagagaaagattcctgtgtttcacaatggatctacccccacactgggtgagactcctaaagaggccgctcatcatgctgggcctgagctacagaggactggacggctttttggtggtttgatacttgacatcaaaaggaaagcaccttttttcttgagtgacttcaaggatgcattaagcctgcagtgcctggcctcgattcttttcctatactgtgcctgtatgtctcctgtaatcacttttggagggctgcttggagaagctacagaaggcagaataagtgcaatagagtctctttttggagcatcattaactgggattgcctattcattgtttgctgggcaacctctaacaatattggggagcacaggtccagttctagtgtttgaaaaaattttatataaattctgcagagattatcaactttcttatctgtctttaagaaccagtattggtctgtggacttcttttttgtgcattgttttggttgcaacagatgcaagcagccttgtgtgttatattactcgatttacagaagaggcttttgcagcccttatttgcatcatattcatctacgaggctttggagaagctctttgatttaggagaaacatatgcatttaatatgcacaacaacttagataaactgaccagctactcatgtgtatgtactgaacctccaaaccccagcaatgaaactctagcacaatggaagaaagataatataacagcacacaatatttcctggagaaatcttactgtttctgaatgtaaaaaacttcgtggtgtattcttggggtcagcttgtggtcatcatggaccttatattccagatgtgctcttttggtgtgtcatcttgtttttcacaacattttttctgtcttcattcctcaagcaatttaagaccaagcgttactttcctaccaaggtgcgatcgacaatcagtgattttgctgtatttctcacaatagtaataatggttacaattgactaccttgtaggagttccatctcctaaacttcatgttcctgaaaaatttgagcctactcatccagagagagggtggatcataagcccactgggagataatccttggtggaccttattaatagctgctattcctgctttgctttgtaccattctcatctttatggatcaacaaatcacagctgtaattataaacagaaaggaacacaaattgaagaaaggagctggctatcaccttgatttgctcatggttggcgttatgttgggagtttgctctgtcatgggacttccatggtttgtggctgcaacagtgttgtcaataagtcatgtcaacagcttaaaagttgaatctgaatgttctgctccaggggaacaacccaagtttttgggaattcgtgaacagcgggttacagggctaatgatttttattctaatgggcctctctgtgttcatgacttcagtcctaaagtttattccaatgcctgttctgtatggtgttttcctttatatgggagtttcctcattaaaaggaatccagttatttgaccgtataaaattatttggaatgcctgctaagcatcagcctgatttgatatacctccgttatgtgccgctctggaaggtccatattttcacagtcattcagcttacttgtttggtccttttatgggtgataaaagtttcagctgctgcagtggtttttcccatgatggttcttgcattagtgtttgtgcgcaaactcatggacctgtgtttcacgaagagagaacttagttggcttgatgatcttatgccagaaagtaagaaaaagaaagaagatgacaaaaagaaaaaagagaaagaggaagctgaacggatgcttcaagatgatgatgatactgtgcaccttccatttgaagggggaagtctcttgcaaattccagtcaaggccctaaaatatagtgttgatccctcaattgttaacatatcagatgaaatggccaaaactgcacagtggaaggcactttccatgaatactgagaatgccaaagtaaccagatctaacatgagtcctgataaacctgtgagtgtgaaaataagttttgaagatgaaccaagaaagaaatacgtggatgctgaaacttcattatagaattgaaccaagaggcattatacatatagatatatacatatgtaatgtgtgcgtatcatgtcactatatataagaatattgtatgtcatgctgtttatgtgtgactaccgggtttttaaaagtagtgtctggagtttgtaatgagcaccgtggagactatgtatttaatgaaatgctctctttgaagtgaggtacatggttcttaactattcaaatatttattctgttagaaaaaaaaattttctgttttgcaatagaaggatgtggagaaatgctttcagtctacttttcttaaatctctgttcatcagtggcaattcgtaaaaaccttaagtgatactttgtttatatgtttataatttttaggtgtttcctgaaattttcacatattatttcacttttgttagtgctttatgggaagaatagggagtctataccagtgctgtgggaaaaatggtaacatttcagggcttctctatttgtgtttcatttctgtagatgtccatcgtgtttcactaactggcgttttcttagccatagagatgactgtagaacaatagaaactttaataatgatagtttttaacttttatgtttaaattttttttaaatcttaaaaccttcatatctaggtatccattgtgacagacaagtaaaattgcaggtgatttgataattaagcacccataccatttataacttctgaatttaaaaagttatacaatgccagtttgcaatagttgattttgatgcctttgtagaatattttttctgaatccttatgctcttttaaagccaatgattcccactctgttctctgccttgtctctctttgtcttaaaatgctttagtttccatcaggttcaagttcttgactattattctcttataagtagtaggcgtaaataatcaggagttagaattctctcagaagggtctatgatcagtattactttattaagaattacctttcattttctctttatgttattctttcacttttgtagattacatttaatagcttgttacctgtgattttattttaaaatatttattttgatatgatgcttaaatattatataaacatttggaaaagtaacaaatagagtaaattgttaatgtaaatagttggtgcttactttcatttatgtttattatcttaaagcaattgatagattttacatctttgatataaagcactgccatatttatattttaaaaggaaattagacattttatatgtagctcagattaatgacatttttattttgtgtattagtttttgcttttctgagctttttaaagtctaacaaatctttttagtcatcttttatatacttttagttccacatgaaataaatgttgttaagcctgtaggactggatgaatggggttgtgaaactgatttgacaagagaataatttacaaaaatcaaatgagtattgagaagccacagaaatatcaaaaatggtgacatcactattaggatgaaaattttatgaaattccaatgctccctttaaccatataattaaattacaaaggtatacataattaatctaataaaggatcatgaggaatgccaaaagctgaaattttagcaagtctggtgttttaaattcattataaactatttattaactaatgtaatgtcctcctctaagaccatattgtaagagtcttgttaaaatgatggattcaacttctgcctcggatgagaggttggaaatgtagctgcttttctttagaaaatatgtagctgtcatcatttggtactgcctaaaaagagttagactctattggcaattgatagagtattacccacggtgcttattattgtttatgagcttccattgtaatgattcctttttatttgtagcagcataattatttccaaagaccccagtatttgctgctatttttaaaactcccctgatgtacctgaacaagaggatttcctcacatcatttccttgtgtctggacatcaggggtaacaactgtacttactttacaggaagaaattttaaaactgaaaactacctgggatcatagtgtttctgtgattttatttaattgtgtatagtaattatccagtgccagaaaaaccgtcacttgcaaaatactttgcactcaaaatgtttttacaatgcttctaaatgttactggtttctgctttcttttgactacttgactgacaaaatgatctgactactccatttaagagcaaaggtaactcatgtttaggtaattaactgcttgttttaagtgattatatttcttccactgtttttgaaaaataatcaaagatagcattcattgagagacagtgacagatataatttactacatatattgatttttaaataaagttgccttaaataagtgtatgtaagcagtagtagttgctatgtactgatttacctcaaggtgcaaaataattaaacctgtacatattccatttacaaaataaattcagccctgcactttctttagatgccttgatttccagaatggagcttagtgctactgaataccctggccacagagccacctcaggatattcttttctccaccctagtttatttatttatagatatctgtttacaaagtctgtagtaaatcctgatgctgaccatctgaaatgtactttttttctgaatgctgtttcaatctaaaatagcagcttttgagaaaacaatgatgtaaattccttatgataaaaggatgattctatatattctttaatgatattaaatatgccgaagccaagcacacagtctttctaaagtgtgtgtatgtttgtgtgaatgtgaatgatactgatcttatatctgttaaaagttgttttaaaaagctgtggcatcccattgttcatatttgccaagtcttctgtaaagatgtctaggacgaaatattttatgtgctaatgcatgtatttgtaaaccagatttgtttaccactcaaaattaacttgttttcttcatccaaaaaagtttatttcttccacgtacttaaattttctgtgtgggtataatatagctttctaatttttttctttcacaaaggcaggttcaaaattctgttgaaagaaaaatgctttctgaaactgaggtataacaccagagcttgctgtttaaaggattatatgatgtacatcagttctataaatgtgctcagcagtttaacatgtgaatcctgttttaaagtgctcagatttcaactgtgtaagccattgatataacgctgtaattaaaaatgtttatatgaaataacttaatgttttaaatttatttatgtagatcacatcatttttatcgtatgcagtgcaaatatgtgaaatgtcttttggtttattccaacaattatttattttagaaagtaagtttaaagactttaaggacattcaaagtttaaaatagtgttcaaattgcaaaatttggcaatcttcatataaattggtttcttttctaacttttcaaaaactaacattaaatgtcaattataggaaaacatagttggaaatgtaatcatccaaagatcatttttaaaatgaaatttaattagcacatattgaacatttgacttaattgttaaaccccagttttgttttgtttttttaatcagatttttgcacactgattagtttttgtgttgtggcttttgttgctttattattcaaggttttttttttttttcttccccatgggggagattgtcttccaatgtttaactacgtttaaataaataaaaattgaattttattgttcatttatataaaatctgataccttgatgtaatttcacaatacagttccaatttttatggcttttataattacaatgatattttcttctataataaaatccaaagtaaacatttaaattgtagaactgatatttttcatttatatgaagtataagcctctactgggtctatattgtgaatcatcctgcctttcaaatttgtttcataattgttagatgaaaactatttttttggagatgttactgaagttgattgagcaataaaagtctacttaatta

SEQ ID NO: 29141 - DNA, 3041 bp, Homo sapiens
  source 1..3041: mol_type = unassigned DNA
cccgagcccaggcttcccaggccgctccctgagggcgaggggaggccagcccgggacaccagggggcgctccgggcggttggggaccaggccagggctgcgagagagtgaccttgggccgaacctgggatctggcccatctctgccgcatcccttgcgccgcccgcccaggagccctgacagccggcgggcggcgacctcttgttctcctcgcgtctttctgttggaaggggccggcgtctggcctcgcgttgtcctgccagaacgtgggcagaaagggtagcagggaccttgctctgagaccagatgaagaagctgtggtggatcagggtgggaccagtacaattctcaacattcactatgaaaaagaagagctggaaggtcacagaactctgtatgtgggagttcggatgccgcttggccggcagagccatcggcatcaccgcactcatggccagaagcaccggagacgagggcggggcaaaggagccagccagggggaggaaggcctggaagccctggcccacgacacaccatctcagcgtgttcagttcattcttggcaccgaggaagatgaagagcatgtgcctcatgagctgtttacagagctggatgagatctgtatgaaagagggagaagatgctgagtggaaggaaacagccaggtggctgaagtttgaagaagatgttgaagatgggggagaacgctggagcaagccttatgtggcaaccctttcattgcacagcctgtttgagctaaggagctgccttattaatggaacagtcctcctggatatgcatgcaaatagcatagaagaaatttcagacctgatcctggatcagcaagaactgtccagtgacctgaatgacagcatgagggttaaagtgcgggaagcccttctcaaaaagcatcatcatcagaatgaaaagaagagaaacaacctcattcccattgttcgctcctttgctgaggttggcaagaagcagtctgatcctcatttgatggataaacatggtcaaaccgtgtctcctcagtctgttccaactacaaatcttgaagtaaaaaatggagtgaattgtgaacatagtcctgtggatttaagcaaggtagaccttcatttcatgaaaaaaattcctactggggccgaggcctccaatgtcctggttggagaggtggatattttggaccgtcccattgttgcctttgtgaggctgtctccagctgttcttctctcaggcctaacagaagtgccaatcccaacaagatttttgtttatcttattgggtccagtagggaaaggtcagcagtaccatgagattggcagatccatggccaccatcatgacagatgagatttttcatgacgtagcatataaggcaaaagagcgagatgatctcctggcggggattgatgagttcctagaccaggtgacggtgctccctccaggagagtgggatccctccattagaattgagccacccaaaaatgtcccttcccaggagaaaaggaaaatgcctggagttccaaatggaaatgtttgccacatagaacaggaaccacatgggggtcacagtgggccagaacttcagcgcactgggcggctatttgggggcttggtgctggacatcaagcggaaggccccctggtactggagcgactaccgagatgcactcagcttacagtgtttggcttcctttctgttcctgtactgtgcctgcatgtcacctgtcatcacctttgggggactgcttggagaagccactgagggacgcataagtgcaattgaatccttgtttggagcttccatgactgggattgcttattccttgtttgcgggacaggctctcaccatcctgggaagtactggaccagtgcttgtgtttgaaaagattttgttcaaattctgcaaagactatgctctttcatacctctccctgcgagcttgtattggactgtggaccgctttcctgtgtattgtccttgtggcaactgatgccagttcccttgtctgctacattacccgtttcactgaagaagcatttgcctccctaatttgcattattttcatctatgaagcaatagaaaaactgattcacctggcagagacctaccccatccacatgcacagccagctggaccaccttagcctctattactgcaggtgtactctgccagagaatccaaacaatcacaccctccagtactggaaggaccacaacatcgtgacagcagaagtccactgggctaacctgactgtcagtgaatgccaggagatgcatggagagttcatgggatctgcgtgcggccatcatggaccctacactcctgatgtcctcttttggtcctgtattctctttttcaccaccttcatcctctcaagcaccttaaagacgtttaagacgagccgttatttcccaaccagaatggagtcttgctctgtcgcctggctggagtgcggtggtgtgatcttggctcactgcaacctccgcctcctcccgagtagctgggactacaggcacgcaccaccacagccagctaatttttgtatttttagtagagacggggtttccccatgttggccaggatggtctcaatctcttgacctcgtgatctgcctgcctcggcctcccaaaatgctgggattacaagcatgagcctggccaagtgctattctttatttcagattgagagttgggaaaaactggagcaaataatggatttctttcttgcttaaaatgtatttatatgtatgtcttattatatacaaggcagatttccctggaataaaagtctagaatgtgctgcttaattttacacatgtgtgcaggcaatattatctgtgagtgaaaagtggaataatacgtggattgggtcaactgattatcagcttgttaggagtcctctgtgtgagacatggtggtataattgtgaagttctcactgtatgtggatgttcatgtgaaagatagtactttcttcccgtaaatatcttttgatttccatttgtatggaatcccaatgaatgtatctttggaaaacataa

SEQ ID NO: 29142 - DNA, 3997 bp, Homo sapiens
  source 1..3997: mol_type = unassigned DNA
attggttgcggcggatgcctcgcgggccggtggctatggaggcggcggcggttgatggttgaccgttggctccggggtgggggtcgccgttcgagtgatctgctcagacccgaccagagggcgcgggctgctgatgcttggcttggagcccgtgggggagacctagttcggctccgccatgccggccgccgggagtaacgagccggacggcgtcctcagctatcagagaccagatgaagaagctgtggtggatcagggtgggaccagtacaattctcaacattcactatgaaaaagaagagctggaaggtcacagaactctgtatgtgggagttcggatgccgcttggccggcagagccatcggcatcaccgcactcatggccagaagcaccggagacgagggcggggcaaaggagccagccagggggaggaaggcctggaagccctggcccacgacacaccatctcagcgtgttcagttcattcttggcaccgaggaagatgaagagcatgtgcctcatgagctgtttacagagctggatgagatctgtatgaaagagggagaagatgctgagtggaaggaaacagccaggtggctgaagtttgaagaagatgttgaagatgggggagaacgctggagcaagccttatgtggcaaccctttcattgcacagcctgtttgagctaaggagctgccttattaatggaacagtcctcctggatatgcatgcaaatagcatagaagaaatttcagacctgatcctggatcagcaagaactgtccagtgacctgaatgacagcatgagggttaaagtgcgggaagcccttctcaaaaagcatcatcatcagaatgaaaagaagagaaacaacctcattcccattgttcgctcctttgctgaggttggcaagaagcagtctgatcctcatttgatggataaacatggtcaaaccgtgtctcctcagtctgttccaactacaaatcttgaagtaaaaaatggagtgaattgtgaacatagtcctgtggatttaagcaaggtagaccttcatttcatgaaaaaaattcctactggggccgaggcctccaatgtcctggttggagaggtggatattttggaccgtcccattgttgcctttgtgaggctgtctccagctgttcttctctcaggcctaacagaagtgccaatcccaacaagatttttgtttatcttattgggtccagtagggaaaggtcagcagtaccatgagattggcagatccatggccaccatcatgacagatgagatttttcatgacgtagcatataaggcaaaagagcgagatgatctcctggcggggattgatgagttcctagaccaggtgacggtgctccctccaggagagtgggatccctccattagaattgagccacccaaaaatgtcccttcccaggagaaaaggaaaatgcctggagttccaaatggaaatgtttgccacatagaacaggaaccacatgggggtcacagtgggccagaacttcagcgcactgggcggctatttgggggcttggtgctggacatcaagcggaaggccccctggtactggagcgactaccgagatgcactcagcttacagtgtttggcttcctttctgttcctgtactgtgcctgcatgtcacctgtcatcacctttgggggactgcttggagaagccactgagggacgcataagtgcaattgaatccttgtttggagcttccatgactgggattgcttattccttgtttgcgggacaggctctcaccatcctgggaagtactggaccagtgcttgtgtttgaaaagattttgttcaaattctgcaaagactatgctctttcatacctctccctgcgagcttgtattggactgtggaccgctttcctgtgtattgtccttgtggcaactgatgccagttcccttgtctgctacattacccgtttcactgaagaagcatttgcctccctaatttgcattattttcatctatgaagcaatagaaaaactgattcacctggcagagacctaccccatccacatgcacagccagctggaccaccttagcctctattactgcaggtgtactctgccagagaatccaaacaatcacaccctccagtactggaaggaccacaacatcgtgacagcagaagtccactgggctaacctgactgtcagtgaatgccaggagatgcatggagagttcatgggatctgcgtgcggccatcatggaccctacactcctgatgtcctcttttggtcctgtattctctttttcaccaccttcatcctctcaagcaccttaaagacgtttaagacgagccgttatttcccaaccagagtacgctccatggtgagtgactttgctgttttcctcactatcttcacaatggtgattattgattttttgattggagtcccatcaccaaagcttcaagttcccagtgtgttcaagccaacaagggatgatcgcggatggattattaatcccattggccccaatccctggtggactgtgatagctgcaattatcccagctcttctctgtactatcttgatattcatggatcagcagatcacagccgtcattattaacaggaaggaacataagctcaagaaaggctgtggctaccacctggacctactgatggtggccatcatgctgggtgtctgctccatcatgggcctgccctggtttgtagctgcaactgtcttgtccatcacacatgtgaacagcctcaagctagaatctgaatgctctgctcctggagaacagcccaagttcctgggcatccgagaacagagagtgacaggccttatgatctttgtgctgatgggctgctcagtcttcatgacggctatcttaaagtttattccaatgccagtactctacggagttttcctttacatgggagtttcttcactacagggaattcagttctttgatcgtctaaagctctttgggatgcccgcaaagcaccagccagatttcatctacctgcggcatgtgccgctgcgcaaagtgcacctcttcaccctcatccagttgacctgtctcgtcctgctctgggtcatcaaggcatctccagctgccattgttttcccaatgatggttttggccttggtctttgtcaggaaagtcatggatctctgtttctctaagcgagagctgagctggctagatgatctcatgcctgaaagcaaaaagaagaagttggatgatgccaaaaagaaggccaaggaggaagaggtcatagtccttgcaccaactgtatacctgggggcctcaaattacagaacataggaagggtcatgtgaaaagtcagcatgtctggaatcccgagggttatatttaggagctgggaagattacccccaaagatgttctcagctaagaatggattagggattcttgcttctgtctgttcttaatttttgggtttgacaaccacttattttttcctttgtttacaatctactcaccaggctcatacctacaatgtgaacatacagtatgcccttattagcagattcaatggctcacattctttcaaaaggtctaatttgacaaatacataagacccattatttcctagaatgtttgtaatatatctaattgcaaatggtgctgtggttggcaccatgcaaagataacttgcataggactttctgtcttttttcatttccctcagcacttggcatcttgtcatctacacaatggaccctcaataaatggcctatatgtgcaaagaaagaatgtgtagcaaatgaaaataccagaccaagaaatgagtgagctgggaagtgtttccaaatacagttagtgcctaaaatagtgtcctttgaaaaaacttttaaaagacttttttttaggccaggcataatgggttatccctgtaattccagggcttttgggagttgaagctggaggattacttgaggccagaagtttgagactagcctaggcaatataatgagaccctgtctct

SEQ ID NO: 29143 - DNA, 4965 bp, Homo sapiens
  source 1..4965: mol_type = unassigned DNA
gctgtcagaacgagtgggaacgtagctggtcgcagagggcaccagcggctgcaggacttcaccaagggaccctgaggctcgtgagcagggacccgcggtgcgggttatgctgggggctcagatcaccgtagacaactggacactcaggaccacgccatggaggagctgcaggatgattatgaagacatgatggaggagaatctggagcaggaggaatatgaagacccagacatccccgagtcccagatggaggagccggcagctcacgacaccgaggcaacagccacagactaccacaccacatcacacccgggtacccacaaggtctatgtggagctgcaggagctggtgatggacgaaaagaaccaggagctgagatggatggaggcggcgcgctgggtgcaactggaggagaacctgggggagaatggggcctggggccgcccgcacctctctcacctcaccttctggagcctcctagagctgcgtagagtcttcaccaagggtactgtcctcctagacctgcaagagacctccctggctggagtggccaaccaactgctagacaggtttatctttgaagaccagatccggcctcaggaccgagaggagctgctccgggccctgctgcttaaacacagccacgctggagagctggaggccctggggggtgtgaagcctgcagtcctgacacgctctggggatccttcacagcctctgctcccccaacactcctcactggagacacagctcttctgtgagcagggagatgggggcacagaagggcactcaccatctggaattctggaaaagattcccccggattcagaggccacgttggtgctagtgggccgcgccgacttcctggagcagccggtgctgggcttcgtgaggctgcaggaggcagcggagctggaggcggtggagctgccggtgcctatacgcttcctctttgtgttgctgggacctgaggccccccacatcgattacacccagcttggccgggctgctgccaccctcatgtcagagagggtgttccgcatagatgcctacatggctcagagccgaggggagctgctgcactccctagagggcttcctggactgcagcctagtgctgcctcccaccgatgccccctccgagcaggcactgctcagtctggtgcctgtgcagagggagctacttcgaaggcgctatcagtccagccctgccaagccagactccagcttctacaagggcctagacttaaatgggggcccagatgaccctctgcagcagacaggccagctcttcgggggcctggtgcgtgatatccggcgccgctacccctattacctgagtgacatcacagatgcattcagcccccaggtcctggctgccgtcatcttcatctactttgctgcactgtcacccgccatcaccttcggcggcctcctgggagaaaagacccggaaccagatgggagtgtcggagctgctgatctccactgcagtgcagggcattctcttcgccctgctgggggctcagcccctgcttgtggtcggcttctcaggacccctgctggtgtttgaggaagccttcttctcgttctgcgagaccaacggtctagagtacatcgtgggccgcgtgtggatcggcttctggctcatcctgctggtggtgttggtggtggccttcgagggtagcttcctggtccgcttcatctcccgctatacccaggagatcttctccttcctcatttccctcatcttcatctatgagactttctccaagctgatcaagatcttccaggaccacccactacagaagacttataactacaacgtgttgatggtgcccaaacctcagggccccctgcccaacacagccctcctctcccttgtgctcatggccggtaccttcttctttgccatgatgctgcgcaagttcaagaacagctcctatttccctggcaagctgcgtcgggtcatcggggacttcggggtccccatctccatcctgatcatggtcctggtggatttcttcattcaggatacctacacccagaaactctcggtgcctgatggcttcaaggtgtccaactcctcagcccggggctgggtcatccacccactgggcttgcgttccgagtttcccatctggatgatgtttgcctccgccctgcctgctctgctggtcttcatcctcatattcctggagtctcagatcaccacgctgattgtcagcaaacctgagcgcaagatggtcaagggctccggcttccacctggacctgctgctggtagtaggcatgggtggggtggccgccctctttgggatgccctggctcagtgccaccaccgtgcgttccgtcacccatgccaacgccctcactgtcatgggcaaagccagcaccccaggggctgcagcccagatccaggaggtcaaagagcagcggatcagtggactcctggtcgctgtgcttgtgggcctgtccatcctcatggagcccatcctgtcccgcatccccctggctgtactgtttggcatcttcctctacatgggggtcacgtcgctcagcggcatccagctctttgaccgcatcttgcttctgttcaagccacccaagtatcacccagatgtgccctacgtcaagcgggtgaagacctggcgcatgcacttattcacgggcatccagatcatctgcctggcagtgctgtgggtggtgaagtccacgccggcctccctggccctgcccttcgtcctcatcctcactgtgccgctgcggcgcgtcctgctgccgctcatcttcaggaacgtggagcttcagtgtctggatgctgatgatgccaaggcaacctttgatgaggaggaaggtcgggatgaatacgacgaagtggccatgcctgtgtgaggggcgggcccaggccctagaccctcccccaccattccacatccccaccttccaaggaaaagcagaagttcatgggcacctcatggactccaggatcctcctggagcagcagctgaggccccagggctgtgggtggggaaggaaggcgtgtccaggagaccttccacaaagggtagcctggcttttctggctggggatggccgatggggcccacattagggggtttgttgcacagtccctcctgttgccacactttcactggggatcccgtgctggaagacttagatctgagccctccctcttcccagcacaggcaggggtagaagcaaaggcaggaggtgggtgagcgggtggggtgcttgctgtgtgaccttgggcaagtcccttgacctttccagcctatatttcctcttctgtaaaatgggtatattgatgataatacccacattacaggatggttactgaggaccaaagatacatgtaaaatagggctttgtaaactccacagggactgttctatagcagtcatcatttgtctttgaacgtacccaaggtcacatagctgggatttgaactgagccgtgcagctgggatttgaaccaggccttctgatttcaaggtccgagctctgtcctctgtcagtcatgcgtccactttcccttcccctgtgactcctcccttccccactctgctcccagcccctaccttgagaccctcttctctgggcccagagagaggcgtcctggtgaggacaaggtacaggcaaggatgatccagggattgggcctgggactcaggcctcctaagtgtttggttcctccctccaaacactcattagttcactcattcattcattccacaaacatttactgagggccccggaatcagtggactccgaggggactgagacaagccctgccctggggtgggggtggggggcaaggtacagttgattctacatttggatagggagtgggggagggtgggaaggtaggggcgggagagtgagggggtttgtaatttattaattgcgtattttctaagagttttcaacatagtttggcttcacacacaacttcaggcccctcatttgagagccattatcctcaactccatctaaactgaatcttggggagaacccagatctgaccaattggggtaggagacagcaggctctccaagaacatgggcaaatttatttttttataaaacaaaaagataaaaagagttgaaagacgtgaaagtggtgagagatggaggaaacagaatcaggaagtggtagaaaagagaggaggtggctgggcgcagtggctcacgtttgtaatcccagcactttgggaggccaagttgggcggatcatttgaggtcaggagtttgagaccagcctggccaacatggtgaaaccccgttactactaaaaatacaaaaattagctgggtgtctcgtggcaggcacctgtaatcccagctacttagaaggctgaggcaagagaatcacctgaacccaggaggtggaggttgcagtgagccaagattgcaccactgcactccagcctgggcaacagagcgagaccctgtctcaaaaaaaaaaaaaaaaaaaaaaaaaaaacggaaggaaacatcagccttgggggccacagactcaacatgtgtgtgtggtggggttccagcccaacatagagtaacattatttgtacctcccaggctagctcagtccatgggaggctctcctgtccctgaaagctgacacccacctttcaccacttcgcccatgctacagttcagtttcctcgtctgtaaaatggggatgataatggtacctaccttgcagtgttgttataaggattaaaggagacagtgcaagaaaaggccttggttggtgaagagcccaacctcggaggggagctgctgggatcctccttatcttgactgggatgtccctgtctccccctccccttgctccttgaacatggccaaggaaagtgaaaaacaaaaattattcactctgctagcacccttccccttgatgcctgggaataggttttgccaataaacgtatctgtgttggagtggc

SEQ ID NO: 29144 - DNA, 3969 bp, Homo sapiens
  source 1..3969: mol_type = unassigned DNA
gccttcctctctctcagtgagtgagtggagttgagctcctgccctccacccagccagcctgcttccctcctgccggtccccaaggacctgggggagggaagcctcctgccggcctgtactggggagggggcaccccctccctgcaggggcatcttgggctctctccagagttcttccattcgtctgcttcctgtctcggcagcccggccccggctccacggggtgtctcaccctccccaccacaccctctctggtctcaggcccacctctggttatgcctccgcctcgttgccctgaaagccgcagcgacagcgaaaagggctaagattcggccatgagcagcgcccctcggcgccccgccaagggcgcagattctttctgtacgccagggccaggacggaagcctcgaaggcgcccgggagcctccccgactggagaaaccccgaccattgaggagggggaggaagatgaggatgaggccagcgaggctgagggggcccgggctctcactcagccgtcccctgtctccacaccctcctcggtgcagttctttctccaagaggatgacagtgctgaccggaaggcagagaggaccagtccatcttcccctgcaccactgccccaccaggaggcgactcctcgggcctccaaaggggcccaggctggaacccaggtggaggaggcggaggcggaggcggtggcggtggccagtggcactgcagggggtgacgacgggggtgcctcggggcgccccctgcccaaagcccagcctgggcaccgcagctacaaccttcaggagaggaggcgcatcgggagcatgactggggctgagcaggcactgctgccccgggtccccacggatgagattgaggcccagacgctggccacggccgacctagacctcatgaagagtcaccggtttgaggacgttcctggggtgcggcggcacttggtgcggaagaatgccaaaggttccacacagagtggccgagaagggcgggagcctggccccacacctcgggcccgaccccgggccccccacaagccccatgaggtgtttgtggagctgaatgagttgctcctggacaaaaaccaggagccccagtggcgggagacagctcgctggatcaaatttgaagaggacgtggaggaggagactgagcgctgggggaagccccacgtggcctccctctccttccgcagtctcctggagctccgcaggaccctggcccatggggctgtgctcttggatctggaccagcagaccctgcccggagtggcccaccaggtggtggagcagatggtcatctctgaccagatcaaggccgaggacagggccaacgtgctgcgggctctgctgttgaaacacagccacccaagtgatgagaaggacttctccttcccccgcaacatctcagctggctccctgggctccctgctggggcatcaccatggtcagggggctgagagtgacccccacgtcaccgagcctctcatgggaggtgttcctgagacccggctggaggtggagcgagagcgtgagctgccgcctccagcaccaccagctggcatcacccgctccaagtccaagcacgagctgaaactgctggagaagattcctgagaatgccgaggccacggtggtccttgtgggctgcgtggagttcctctcccgccccaccatggcctttgtgcggctccgggaggctgtggagttggacgcagtgttggaggtgccggtgcctgtgcgtttcctcttcctgctgctgggcccgagtagtgccaacatggactaccacgagatcggccgctccatctccaccctcatgtcagacaagcaattccacgaggcagcctacctggctgacgagcgggaggacctgctgacggccatcaacgccttcctggactgcagcgtggtgctgccgccttcagaagtgcagggcgaggagctgctgcgctctgtggcccacttccagcgccagatgctcaagaagcgagaggagcagggccggctgctacctacaggggctgggctggagcccaaatctgcccaagataaggcgctcctgcagatggtagaggcggcaggggcagctgaagatgatccccttcggcggacggggcggccctttggggggctgatccgagatgtgcggcgccgctatccccactacctgagtgacttccgagatgcacttgaccctcagtgcctggccgcagtcatcttcatctactttgccgccctgtctcctgccatcacctttggggggctgctgggagagaagacgcaggacctgataggggtgtcggagctgattatgtccacagcgctccagggcgtggtcttctgcctgctgggtgcccagcccctgttggtgatcggcttctcagggcccctgctggtctttgaggaggccttcttctcgttctgtagcagcaaccacctggagtacctggtgggccgtgtgtggatcggcttctggctggtgttcctggccctgctcatggtggccctggaggggagcttcctggtccgcttcgtctcccgcttcacccaggagatcttcgccttcttgatctcactcatcttcatctatgagaccttctacaagctggtgaagatcttccaggagcaccccctgcatggctgctcagcctccaacagctcagaggtggacggcggtgagaacatgacatgggccggggcaagacccacgctggggccgggcaacaggagcttggctgggcagtctgggcaggggaagccccggggccagcccaacacggccctgctgtcgctggtgctcatggccggcaccttcttcatcgccttcttcctgcgcaaattcaagaacagccggttctttcctggccggatccggcgggtgattggggactttggggtgcccatcgccatcctcatcatggtgcttgtggattacagtattgaggacacctatacccagaagctgagcgttcccagtggattctcggtgactgccccagaaaagaggggctgggtcatcaaccccctgggagagaagagccccttccctgtgtggatgatggttgccagcctgctgcccgccatcctggtcttcattctcatcttcatggagacacagatcaccacgctcatcatctccaagaaggagcgcatgctgcagaagggctccggcttccacctggacctgctgctcatcgtggccatgggcggcatctgtgccctctttggcctgccctggttggctgctgccactgtccgctctgtcactcacgccaacgcgctcactgtcatgagcaaggctgtggcacctggggacaagcccaagattcaggaagtcaaggagcagcgggtgacggggctgctggttgccctgcttgtgggcctctccatagttatcggggatctgctccggcagatccccctggccgtgctctttggaattttcctgtacatgggagtcacctcccttaacgggatccagttctatgagcggctgcatctgctgctcatgccgcccaaacaccacccagatgtcacttacgtcaagaaggtccggaccctccgtatgcacctgttcacggccctgcagctgctctgcctggccctgctctgggccgtcatgtccacagctgcctccctggccttccccttcatcctcatcctcacagtgccgctccgcatggtggtgctcacccgtatcttcaccgaccgagagatgaaatgtctggatgctaacgaggcagagccggtgtttgatgagcgggagggtgtggacgagtacaatgagatgcccatgcctgtgtagccgccaccgagggacagccgagggaccgatggacgaggggacaggctggtgggatggggttccccctcccatgcccctccctcctttttatttaagtgaataatttaaagtcttctcctcccccactgcccctgcagtaaagtgctttggccccc

SEQ ID NO: 29145 - DNA, 4142 bp, Homo sapiens
  source 1..4142: mol_type = unassigned DNA
acggtgcgccggggggcgcgcacgcagggggctggcctgcccgcggcgcgggggaaagttgagttgggagaagttgggagcggcgggggcgcgccccggggtgggcacggggcagtcgtcgggagcgcgcgagtgcgccggaggacggggagagaccccgagacccccggggcacgaagtccagagcgagcgggttatgcctccgcctcgttgccctgaaagccgcagcgacagcgaaaagggctaagattcggccatgagcagcgcccctcggcgccccgccaagggcgcagattctttctgtacgccagagccagagagcttgggccctgggacgcctgggttccccgagcaggaggaagacgaacttcaccgcaccctgggcgtggagcggtttgaggagatcctacaggaggccgggtctcgtggaggggaggagccaggccgcagctatggggaggaagactttgagtaccaccgccagtcctcccaccacatccatcacccactgtccacccacctgcctccggatgcacgccgccgcaagacaccccagggcccaggacggaagcctcgaaggcgcccgggagcctccccgactggagaaaccccgaccattgaggagggggaggaagatgaggatgaggccagcgaggctgagggggcccgggctctcactcagccgtcccctgtctccacaccctcctcggtgcagttctttctccaagaggatgacagtgctgaccggaaggcagagaggaccagtccatcttcccctgcaccactgccccaccaggaggcgactcctcgggcctccaaaggggcccaggctggaacccaggtggaggaggcggaggcggaggcggtggcggtggccagtggcactgcagggggtgacgacgggggtgcctcggggcgccccctgcccaaagcccagcctgggcaccgcagctacaaccttcaggagaggaggcgcatcgggagcatgactggggctgagcaggcactgctgccccgggtccccacggatgagattgaggcccagacgctggccacggccgacctagacctcatgaagagtcaccggtttgaggacgttcctggggtgcggcggcacttggtgcggaagaatgccaaaggttccacacagagtggccgagaagggcgggagcctggccccacacctcgggcccgaccccgggccccccacaagccccatgaggtgtttgtggagctgaatgagttgctcctggacaaaaaccaggagccccagtggcgggagacagctcgctggatcaaatttgaagaggacgtggaggaggagactgagcgctgggggaagccccacgtggcctccctctccttccgcagtctcctggagctccgcaggaccctggcccatggggctgtgctcttggatctggaccagcagaccctgcccggagtggcccaccaggtggtggagcagatggtcatctctgaccagatcaaggccgaggacagggccaacgtgctgcgggctctgctgttgaaacacagccacccaagtgatgagaaggacttctccttcccccgcaacatctcagctggctccctgggctccctgctggggcatcaccatggtcagggggctgagagtgacccccacgtcaccgagcctctcatgggaggtgttcctgagacccggctggaggtggagcgagagcgtgagctgccgcctccagcaccaccagctggcatcacccgctccaagtccaagcacgagctgaaactgctggagaagattcctgagaatgccgaggccacggtggtccttgtgggctgcgtggagttcctctcccgccccaccatggcctttgtgcggctccgggaggctgtggagttggacgcagtgttggaggtgccggtgcctgtgcgtttcctcttcctgctgctgggcccgagtagtgccaacatggactaccacgagatcggccgctccatctccaccctcatgtcagacaagcaattccacgaggcagcctacctggctgacgagcgggaggacctgctgacggccatcaacgccttcctggactgcagcgtggtgctgccgccttcagaagtgcagggcgaggagctgctgcgctctgtggcccacttccagcgccagatgctcaagaagcgagaggagcagggccggctgctacctacaggggctgggctggagcccaaatctgcccaagataaggcgctcctgcagatggtagaggcggcaggggcagctgaagatgatccccttcggcggacggggcggccctttggggggctgatccgagatgtgcggcgccgctatccccactacctgagtgacttccgagatgcacttgaccctcagtgcctggccgcagtcatcttcatctactttgccgccctgtctcctgccatcacctttggggggctgctgggagagaagacgcaggacctgataggggtgtcggagctgattatgtccacagcgctccagggcgtggtcttctgcctgctgggtgcccagcccctgttggtgatcggcttctcagggcccctgctggtctttgaggaggccttcttctcgttctgtagcagcaaccacctggagtacctggtgggccgtgtgtggatcggcttctggctggtgttcctggccctgctcatggtggccctggaggggagcttcctggtccgcttcgtctcccgcttcacccaggagatcttcgccttcttgatctcactcatcttcatctatgagaccttctacaagctggtgaagatcttccaggagcaccccctgcatggctgctcagcctccaacagctcagaggtggacggcggtgagaacatgacatgggccggggcaagacccacgctggggccgggcaacaggagcttggctgggcagtctgggcaggggaagccccggggccagcccaacacggccctgctgtcgctggtgctcatggccggcaccttcttcatcgccttcttcctgcgcaaattcaagaacagccggttctttcctggccggatccggcgggtgattggggactttggggtgcccatcgccatcctcatcatggtgcttgtggattacagtattgaggacacctatacccagaagctgagcgttcccagtggattctcggtgactgccccagaaaagaggggctgggtcatcaaccccctgggagagaagagccccttccctgtgtggatgatggttgccagcctgctgcccgccatcctggtcttcattctcatcttcatggagacacagatcaccacgctcatcatctccaagaaggagcgcatgctgcagaagggctccggcttccacctggacctgctgctcatcgtggccatgggcggcatctgtgccctctttggcctgccctggttggctgctgccactgtccgctctgtcactcacgccaacgcgctcactgtcatgagcaaggctgtggcacctggggacaagcccaagattcaggaagtcaaggagcagcgggtgacggggctgctggttgccctgcttgtgggcctctccatagttatcggggatctgctccggcagatccccctggccgtgctctttggaattttcctgtacatgggagtcacctcccttaacgggatccagttctatgagcggctgcatctgctgctcatgccgcccaaacaccacccagatgtcacttacgtcaagaaggtccggaccctccgtatgcacctgttcacggccctgcagctgctctgcctggccctgctctgggccgtcatgtccacagctgcctccctggccttccccttcatcctcatcctcacagtgccgctccgcatggtggtgctcacccgtatcttcaccgaccgagagatgaaatgtctggatgctaacgaggcagagccggtgtttgatgagcgggagggtgtggacgagtacaatgagatgcccatgcctgtgtagccgccaccgagggacagccgagggaccgatggacgaggggacaggctggtgggatggggttccccctcccatgcccctccctcctttttatttaagtgaataatttaaagtcttctcctcccccactgcccctgcagtaaagtgctttggcccccaccta

SEQ ID NO: 29146 - DNA, 793 bp, Homo sapiens
  source 1..793: mol_type = unassigned DNA
cttctgtgccttcctctctctcagtgagtgagtggagttgagctcctgccctccacccagccagcctgcttccctcctgccggtccccaaggacctgggggagggaagcctcctgccggcctgtactggggagggggcaccccctccctgcaggggcatcttgggctctctccagagttcttccattcgtctgcttcctgtctcggcagcccggccccggctccacggggtgtctcaccctccccaccacaccctctctggtctcaggcccacctctggttatgcctccgcctcgttgccctgaaagccgcagcgacagcgaaaagggctaagattcggccatgagcagcgcccctcggcgccccgccaagggcgcagattctttctgtacgccagagccagagagcttgggccctgggacgcctgggttccccgagcaggaggaagacgaacttcaccgcaccctgggcgtggagcggtttgaggagatcctacaggaggccgggtctcgtggaggggaggagccaggccgcagctatggggaggaagactttgagtaccaccgccagtcctcccaccacatccatcacccactgtccacccacctgcctccggatgcacgccgccgcaagacaccccagggcccaggacggaagcctcgaaggcgcccgggagcctccccgactggagaaaccccgaccattgaggagggggaggaagatgaggatgaggccagcgaggctgagggggcccgggctctcactcagccgtcccctgtctccacaccctcctc

SEQ ID NO: 29147 - DNA, 500 bp, Homo sapiens
  source 1..500: mol_type = unassigned DNA
ataaagctctgcccagcccatgcccaccttctgtgccttcctctctctcagtgagttatgcctccgcctcgttgccctgaaagccgcagcgacagcgaaaagggctaagattcggccatgagcagcgcccctcggcgccccgccaagggcgcagattctttctgtacgccagagccagagagcttgggccctgggacgcctgggttccccgagcaggaggaagacgaacttcaccgcaccctgggcgtggagcggtttgaggagatcctacaggaggccgggtctcgtggaggggaggagccaggccgcagctatggggaggaagactttgagtaccaccgccagtcctcccaccacatccatcacccactgtccacccacctgcctccggatgcacgccgccgcaagacaccccagggcccaggacggaagcctcgaaggcgcccgggagcctccccgactggagaaaccccgaccattgaggagggggaggaagatga

SEQ ID NO: 29148 - DNA, 571 bp, Homo sapiens
  source 1..571: mol_type = unassigned DNA
aagccaggaaatgcctcctgagagaggtgaaggcagcgtctcagtatgcaagggaagggattcagggtgaaggttatgcctccgcctcgttgccctgaaagccgcagcgacagcgaaaagggctaagattcggccatgagcagcgcccctcggcgccccgccaagggcgcagattctttctgtacgccagagccagagagcttgggccctgggacgcctgggttccccgagcaggaggaagacgaacttcaccgcaccctgggcgtggagcggtttgaggagatcctacaggaggccgggtctcgtggaggggaggagccaggccgcagctatggggaggaagactttgagtaccaccgccagtcctcccaccacatccatcacccactgtccacccacctgcctccggatgcacgccgccgcaagacaccccagggcccaggacggaagcctcgaaggcgcccgggagcctccccgactggagaaaccccgaccattgaggagggggaggaagatgaggatgaggccagcgaggctgagggggcccgggctctcactcagccgtcccctg

SEQ ID NO: 29149 - DNA, 4925 bp, Homo sapiens
  source 1..4925: mol_type = unassigned DNA
cccagccctcttgaaaagggccgctccgggactacgcgttccagaatgcagcggaaatgggggcggagcgctctcggttaggggtttggggtttggcggcctagatcccgggcactggcggcccagcgctgacctggttggtggcattgtgttcccaacggcctcttgacgacctcagcacgggtttccacctctccccaagccacctagtgaccccagaattgactggggaatgcctgtgagcgatgatgacctcacagggaacagctgaccgcagggctgggagaacagctgtgccccttcgaggctggattttagtggagggacacacgccaaagaccccctctctgctgagccccgtttgttgtctcggagcccacccgactctagccgctgaactctgacatgctgaggaaaactgggtggagccctgggggtccccctcagaccccagtctccggaacagggcccactggagtcagccagggtgtggcaggcaggttggttaaccccctccacagacaagaccacagaccgatgctcaacttgcagcagcctctgcctcaccccttaaaggagctgattatagattcccttacgctgcctctctaattgtctcatgattgcattcttgagggctatggaccgagggaaaaggatcccaaacagcactcctcagcaccggaaccagagttgctgctaaacacgtgttaattaactcgtttctatctgaatgcttttgcatacacaagggaaaagaagcaaaaagtgtattccttatctggaagactttgtgatttcgttgggcaaaaaagaactacacacaaaggtcttgaatgataagtgatggctctgcctagggttcggttcagtgtggaggttccattcaagaggaaggaggccagcacagcgaatctctgtccctctctggaagtggagagcctctaacaagttaccctctcccagatcagctcagggttatgcctccgcctcgttgccctgaaagccgcagcgacagcgaaaagggctaagattcggccatgagcagcgcccctcggcgccccgccaagggcgcagattctttctgtacgccagagccagagagcttgggccctgggacgcctgggttccccgagcaggaggaagacgaacttcaccgcaccctgggcgtggagcggtttgaggagatcctacaggaggccgggtctcgtggaggggaggagccaggccgcagctatggggaggaagactttgagtaccaccgccagtcctcccaccacatccatcacccactgtccacccacctgcctccggatgcacgccgccgcaagacaccccagggcccaggacggaagcctcgaaggcgcccgggagcctccccgactggagaaaccccgaccattgaggagggggaggaagatgaggatgaggccagcgaggctgagggggcccgggctctcactcagccgtcccctgtctccacaccctcctcggtgcagttctttctccaagaggatgacagtgctgaccggaaggcagagaggaccagtccatcttcccctgcaccactgccccaccaggaggcgactcctcgggcctccaaaggggcccaggctggaacccaggtggaggaggcggaggcggaggcggtggcggtggccagtggcactgcagggggtgacgacgggggtgcctcggggcgccccctgcccaaagcccagcctgggcaccgcagctacaaccttcaggagaggaggcgcatcgggagcatgactggggctgagcaggcactgctgccccgggtccccacggatgagattgaggcccagacgctggccacggccgacctagacctcatgaagagtcaccggtttgaggacgttcctggggtgcggcggcacttggtgcggaagaatgccaaaggttccacacagagtggccgagaagggcgggagcctggccccacacctcgggcccgaccccgggccccccacaagccccatgaggtgtttgtggagctgaatgagttgctcctggacaaaaaccaggagccccagtggcgggagacagctcgctggatcaaatttgaagaggacgtggaggaggagactgagcgctgggggaagccccacgtggcctccctctccttccgcagtctcctggagctccgcaggaccctggcccatggggctgtgctcttggatctggaccagcagaccctgcccggagtggcccaccaggtggtggagcagatggtcatctctgaccagatcaaggccgaggacagggccaacgtgctgcgggctctgctgttgaaacacagccacccaagtgatgagaaggacttctccttcccccgcaacatctcagctggctccctgggctccctgctggggcatcaccatggtcagggggctgagagtgacccccacgtcaccgagcctctcatgggaggtgttcctgagacccggctggaggtggagcgagagcgtgagctgccgcctccagcaccaccagctggcatcacccgctccaagtccaagcacgagctgaaactgctggagaagattcctgagaatgccgaggccacggtggtccttgtgggctgcgtggagttcctctcccgccccaccatggcctttgtgcggctccgggaggctgtggagttggacgcagtgttggaggtgccggtgcctgtgcgtttcctcttcctgctgctgggcccgagtagtgccaacatggactaccacgagatcggccgctccatctccaccctcatgtcagacaagcaattccacgaggcagcctacctggctgacgagcgggaggacctgctgacggccatcaacgccttcctggactgcagcgtggtgctgccgccttcagaagtgcagggcgaggagctgctgcgctctgtggcccacttccagcgccagatgctcaagaagcgagaggagcagggccggctgctacctacaggggctgggctggagcccaaatctgcccaagataaggcgctcctgcagatggtagaggcggcaggggcagctgaagatgatccccttcggcggacggggcggccctttggggggctgatccgagatgtgcggcgccgctatccccactacctgagtgacttccgagatgcacttgaccctcagtgcctggccgcagtcatcttcatctactttgccgccctgtctcctgccatcacctttggggggctgctgggagagaagacgcaggacctgataggggtgtcggagctgattatgtccacagcgctccagggcgtggtcttctgcctgctgggtgcccagcccctgttggtgatcggcttctcagggcccctgctggtctttgaggaggccttcttctcgttctgtagcagcaaccacctggagtacctggtgggccgtgtgtggatcggcttctggctggtgttcctggccctgctcatggtggccctggaggggagcttcctggtccgcttcgtctcccgcttcacccaggagatcttcgccttcttgatctcactcatcttcatctatgagaccttctacaagctggtgaagatcttccaggagcaccccctgcatggctgctcagcctccaacagctcagaggtggacggcggtgagaacatgacatgggccggggcaagacccacgctggggccgggcaacaggagcttggctgggcagtctgggcaggggaagccccggggccagcccaacacggccctgctgtcgctggtgctcatggccggcaccttcttcatcgccttcttcctgcgcaaattcaagaacagccggttctttcctggccggatccggcgggtgattggggactttggggtgcccatcgccatcctcatcatggtgcttgtggattacagtattgaggacacctatacccagaagctgagcgttcccagtggattctcggtgactgccccagaaaagaggggctgggtcatcaaccccctgggagagaagagccccttccctgtgtggatgatggttgccagcctgctgcccgccatcctggtcttcattctcatcttcatggagacacagatcaccacgctcatcatctccaagaaggagcgcatgctgcagaagggctccggcttccacctggacctgctgctcatcgtggccatgggcggcatctgtgccctctttggcctgccctggttggctgctgccactgtccgctctgtcactcacgccaacgcgctcactgtcatgagcaaggctgtggcacctggggacaagcccaagattcaggaagtcaaggagcagcgggtgacggggctgctggttgccctgcttgtgggcctctccatagttatcggggatctgctccggcagatccccctggccgtgctctttggaattttcctgtacatgggagtcacctcccttaacgggatccagttctatgagcggctgcatctgctgctcatgccgcccaaacaccacccagatgtcacttacgtcaagaaggtccggaccctccgtatgcacctgttcacggccctgcagctgctctgcctggccctgctctgggccgtcatgtccacagctgcctccctggccttccccttcatcctcatcctcacagtgccgctccgcatggtggtgctcacccgtatcttcaccgaccgagagatgaaatgtctggatgctaacgaggcagagccggtgtttgatgagcgggagggtgtggacgagtacaatgagatgcccatgcctgtgtagccgccaccgagggacagccgagggaccgatggacgaggggacaggctggtgggatggggttccccctcccatgcccctccctcctttttatttaagtgaataatttaaagtcttctcctcccccactgcccctgcagtaaagtgctttggcccccacct

SEQ ID NO: 29150 - DNA, 610 bp, Homo sapiens
  source 1..610: mol_type = unassigned DNA
attatcactccctccctcatctttgttgctttctctccgggcctgggccttgactcctttctccctcatttttcttgcggcctttcccacctcctctctcctcctccctctactcagcctctcggcccttttcggcccccctcgcctcagtcctctcctgtctccttgttcttctcttttcttcctataaataactctcctctgtgctgtggctgccgctaagggccactctgaggcccttcatactccaggaggatccccagcagcgcagcctgcgcgtggtggctcctgccctcccagggctctcgatggtgatcaggcctctcccccatccaggttatgcctccgcctcgttgccctgaaagccgcagcgacagcgaaaagggctaagattcggccatgagcagcgcccctcggcgccccgccaagggcgcagattctttctgtacgccagagccagagagcttgggccctgggacgcctgggttccccgagcaggaggaagacgaacttcaccgcaccctgggcgtggagcggtttgaggagatcctacaggaggccgggtctcgtggaggggaggagccaggccgcagctatggggaggaagact

SEQ ID NO: 29151 - DNA, 702 bp, Homo sapiens
  source 1..702: mol_type = unassigned DNA
agaccacccctcccctccggcccccccgcatagtccttcagtcccgtccggggcgcccagactgggggttgcccggggcccccatccccaatctccgggttgagaggcgaagccaggaaaggcgggtggcgggttatgcctccgcctcgttgccctgaaagccgcagcgacagcgaaaagggctaagattcggccatgagcagcgcccctcggcgccccgccaagggcgcagattctttctgtacgccagagccagagagcttgggccctgggacgcctgggttccccgagcaggaggaagacgaacttcaccgcaccctgggcgtggagcggtttgaggagatcctacaggaggccgggtctcgtggaggggaggagccaggccgcagctatggggaggaagactttgagtaccaccgccagtcctcccaccacatccatcacccactgtccacccacctgcctccggatgcacgccgccgcaagacaccccagggcccaggacggaagcctcgaaggcgcccgggagcctccccgactggagaaaccccgaccattgaggagggggaggaagatgaggatgaggccagcgaggctgagggggcccgggctctcactcagccgtcccctgtctccacaccctcctcggtgcagttctttctccaagaggatgacagtgctgaccggaaggcagagaggacc

SEQ ID NO: 29152 - DNA, 5323 bp, Homo sapiens
  source 1..5323: mol_type = unassigned DNA
gcggcggcggccgcggtggcagcgaaggcggcggcggcggcggcagtggcagtggccgctgcagccccacactccgccgccaaactggaggagcgacggaagccagaccccaggaggatggaggatgaagctgtcctggacagaggggcttccttcctcaagcatgtgtgtgatgaagaagaagtagaaggccaccataccatttacatcggagtccatgtgccgaagagttacaggagaaggagacgtcacaagagaaagacagggcacaaagaaaagaaggaaaaggagagaatctctgagaactactctgacaaatcagatattgaaaatgctgatgaatccagcagcagcatcctaaaacctctcatctctcctgctgcagaacgcatccgattcatcttgggagaggaggatgacagcccagctccccctcagctcttcacggaactggatgagctgctggccgtggatgggcaggagatggagtggaaggaaacagccaggtggatcaagtttgaagaaaaagtggaacagggtggggaaagatggagcaagccccatgtggccacattgtcccttcatagtttatttgagctgaggacatgtatggagaaaggatccatcatgcttgatcgggaggcttcttctctcccacagttggtggagatgattgttgaccatcagattgagacaggcctattgaaacctgaacttaaggataaggtgacctatactttgctccggaagcaccggcatcaaaccaagaaatccaaccttcggtccctggctgacattgggaagacagtctccagtgcaagtaggatgtttaccaaccctgataatggtagcccagccatgacccataggaatctgacttcctccagtctgaatgacatttctgataaaccggagaaggaccagctgaagaataagttcatgaaaaaattgccacgtgatgcagaagcttccaacgtgcttgttggggaggttgactttttggatactcctttcattgcctttgttaggctacagcaggctgtcatgctgggtgccctgactgaagttcctgtgcccacaaggttcttgttcattctcttaggtcctaaggggaaagccaagtcctaccacgagattggcagagccattgccaccctgatgtctgatgaggtgttccatgacattgcttataaagcaaaagacaggcacgacctgattgctggtattgatgagttcctagatgaagtcatcgtccttccacctggggaatgggatccagcaattaggatagagcctcctaagagtcttccatcctctgacaaaagaaagaatatgtactcaggtggagagaatgttcagatgaatggggatacgccccatgatggaggtcacggaggaggaggacatggggattgtgaagaattgcagcgaactggacggttctgtggtggactaattaaagacataaagaggaaagcgccattttttgccagtgatttttatgatgctttaaatattcaagctctttcggcaattctcttcatttatctggcaactgtaactaatgctatcacttttggaggactgcttggggatgccactgacaacatgcagggcgtgttggagagtttcctgggcactgctgtctctggagccatcttttgcctttttgctggtcaaccactcactattctgagcagcaccggacctgtcctagtttttgagaggcttctatttaatttcagcaaggacaataattttgactatttggagtttcgcctttggattggcctgtggtccgccttcctatgtctcattttggtagccactgatgccagcttcttggttcaatacttcacacgtttcacggaggagggcttttcctctctgattagcttcatctttatctatgatgctttcaagaagatgatcaagcttgcagattactaccccatcaactccaacttcaaagtgggctacaacactctcttttcctgtacctgtgtgccacctgacccagctaatatctcaatatctaatgacaccacactggccccagagtatttgccaactatgtcttctactgacatgtaccataatactacctttgactgggcatttttgtcgaagaaggagtgttcaaaatacggaggaaacctcgtcgggaacaactgtaattttgttcctgatatcacactcatgtcttttatcctcttcttgggaacctacacctcttccatggctctgaaaaaattcaaaactagtccttattttccaaccacagcaagaaaactgatcagtgattttgccattatcttgtccattctcatcttttgtgtaatagatgccctagtaggcgtggacaccccaaaactaattgtgccaagtgagttcaagccaacaagtccaaaccgaggttggttcgttccaccgtttggagaaaacccctggtgggtgtgccttgctgctgctatcccggctttgttggtcactatactgattttcatggaccaacaaattacagctgtgattgtaaacaggaaagaacataaactcaagaaaggagcagggtatcacttggatctcttttgggtggccatcctcatggttatatgctccctcatggctcttccgtggtatgtagctgctacggtcatctccattgctcacatcgacagtttgaagatggagacagagacttctgcacctggagaacaaccaaagtttctaggagtgagggaacaaagagtcactggaacccttgtgtttattctgactggtctgtcagtctttatggctcccatcttgaagtttatacccatgcctgtactctatggtgtgttcctgtatatgggagtagcatcccttaatggtgtgcagttcatggatcgtctgaagctgcttctgatgcctctgaagcatcagcctgacttcatctacctgcgtcatgttcctctgcgcagagtccacctgttcactttcctgcaggtgttgtgtctggccctgctttggatcctcaagtcaacggtggctgctatcatttttccagtaatgatcttggcacttgtagctgtcagaaaaggcatggactacctcttctcccagcacgacctcagcttcctggatgatgtcattccagaaaaggacaagaaaaagaaggaggatgagaagaaaaagaaaaagaagaagggaagtctggacagtgacaatgatgattctgactgcccatactcagaaaaagttccaagtattaaaattccaatggacatcatggaacagcaacctttcctaagcgatagcaaaccttctgacagagaaagatcaccaacattccttgaacgccacacatcatgctgataaaattcctttccttcagtcactcggtatgccaagtcctcctagaactccagtaaaagttgtgcctcaaattagaatagaacttgaacctgaagacaatgattatttctggaggagcaagggaacagaaactacattgtaacctgtttgtctttcttaaaactgacatttgttgttaatgtcatttgtttttgtttggctgtttgtttattttttaacttttatttcgtctcagtttttggtcacaggccaaataatacagcgctctctctgcttctctcttgcatagacacaatcaagacaatagtgcaccgttccttaaaaacagcatctgaggaatcccccttttgttcttaaactttcagatgtgtcctttgataaccaaattctgtcactcaagacacagacacgcacagaccctgtcctttgcctctattaagcagaggatggaagtattaaggattttgtaacaccttttatgaaaatgttgaaggaacttaaaactttagctttggagctgtgcttactggcttgtctttgtctggtagaacaaaccttgacctccagacagagtcccttctcacttatagagctctccaggactggaaaaagtgctgctattttaacttgctcttgcttgtaaatcctaatcttagagttatcaaaagaagaaaaaactgaaggtactttactccctatagagaaaccattgccatcattgtagcaagtgctggaatgtcccttttttcctatgcaactttttttaaccctttaatgaacttatctgttgagtacattgaagaatatttttcttcctagattttgttgtttaaattatggggcctaacctgccacttattttttgtcaatttttaaaacttttttttaattactgtaaagaaaatgaattttttcctgcagcaggaaacatagttttgagtagttctacctcttatttgtagctgccaggctttctgtaaaaattgtattgtatataatgtgatttttacacatacatacacacacaaatacacaatctctagggtaagccagaaggcaagatcagattaaaaacaccatgtttctaagcatccatttttccctttctttaaaagaaacttaactgttctatgaaggagattgagggagaagagacaaactcctatgtcatgagaataaccgatgttctgataatagtagcatctaggtacagatgctggttgtattaccacgtcaatgtcctatgcagtattgttagacattttctcattttgaaatatttgtgtgtttgtgtatgtgctctgtgccatggctggtgtatatatgtgcaatgttagaaggcaaaagagtgatggtaggcagagggcaaagtcattgaatctcttatgccagttttcataaaacccaaaccacatatgaaaaaatccattaagggtccaagaagtctgtccatatgaaaatgagggtaaatatagtttatttcccaggtatcagtcattataattgatataatagctctaacatgcaatataaaattcataggagtattaatagcccatttacacatctataaaatgtaatgggattgcagagctgcagagtacagtgtaacagtactctcatgcaatttttttcaggatgcaaaggcaattattctttgtaagcgggacatttagaatatatttgtgtacatattatatgtatgtatatttcaaagtaccacactgaaaattagacatttattaaccaaatttaacgtggtatttaaaggtaatatttttaatatgatacattacatattgtgaatgtatactaaaaaaacattttaaatgttaaaattataatttcagattcatataaccacaactgtgatatatcctaactataaccagttgttgaggggtatactagaagcagaatgaaaccacattttttggtttgataatatgcacttattgactcccac

SEQ ID NO: 29153 - DNA, 7640 bp, Homo sapiens
  source 1..7640: mol_type = unassigned DNA
aggaggggaagtgagtggttagacctcagctcatctgagggctaaaggttctttgtgacacatcacacagaattggagtgctgtccttctggagagtggtggagaaccaagatacagttcagaaccaaaggaatagagaagggctttgatttctttttggctttagattggggatttgggaggcttagcaggaaagatgtccactgaaaatgtggaagggaagcccagtaaccttggggagagaggaagagcccggagctccactttcctcagggttgtccagccaatgtttaaccacagtattttcacttctgcagtctctcctgctgcagaacgcatccgattcatcttgggagaggaggatgacagcccagctccccctcagctcttcacggaactggatgagctgctggccgtggatgggcaggagatggagtggaaggaaacagccaggtggatcaagtttgaagaaaaagtggaacagggtggggaaagatggagcaagccccatgtggccacattgtcccttcatagtttatttgagctgaggacatgtatggagaaaggatccatcatgcttgatcgggaggcttcttctctcccacagttggtggagatgattgttgaccatcagattgagacaggcctattgaaacctgaacttaaggataaggtgacctatactttgctccggaagcaccggcatcaaaccaagaaatccaaccttcggtccctggctgacattgggaagacagtctccagtgcaagtaggatgtttaccaaccctgataatggtagcccagccatgacccataggaatctgacttcctccagtctgaatgacatttctgataaaccggagaaggaccagctgaagaataagttcatgaaaaaattgccacgtgatgcagaagcttccaacgtgcttgttggggaggttgactttttggatactcctttcattgcctttgttaggctacagcaggctgtcatgctgggtgccctgactgaagttcctgtgcccacaaggttcttgttcattctcttaggtcctaaggggaaagccaagtcctaccacgagattggcagagccattgccaccctgatgtctgatgaggtgttccatgacattgcttataaagcaaaagacaggcacgacctgattgctggtattgatgagttcctagatgaagtcatcgtccttccacctggggaatgggatccagcaattaggatagagcctcctaagagtcttccatcctctgacaaaagaaagaatatgtactcaggtggagagaatgttcagatgaatggggatacgccccatgatggaggtcacggaggaggaggacatggggattgtgaagaattgcagcgaactggacggttctgtggtggactaattaaagacataaagaggaaagcgccattttttgccagtgatttttatgatgctttaaatattcaagctctttcggcaattctcttcatttatctggcaactgtaactaatgctatcacttttggaggactgcttggggatgccactgacaacatgcagggcgtgttggagagtttcctgggcactgctgtctctggagccatcttttgcctttttgctggtcaaccactcactattctgagcagcaccggacctgtcctagtttttgagaggcttctatttaatttcagcaaggacaataattttgactatttggagtttcgcctttggattggcctgtggtccgccttcctatgtctcattttggtagccactgatgccagcttcttggttcaatacttcacacgtttcacggaggagggcttttcctctctgattagcttcatctttatctatgatgctttcaagaagatgatcaagcttgcagattactaccccatcaactccaacttcaaagtgggctacaacactctcttttcctgtacctgtgtgccacctgacccagctaatatctcaatatctaatgacaccacactggccccagagtatttgccaactatgtcttctactgacatgtaccataatactacctttgactgggcatttttgtcgaagaaggagtgttcaaaatacggaggaaacctcgtcgggaacaactgtaattttgttcctgatatcacactcatgtcttttatcctcttcttgggaacctacacctcttccatggctctgaaaaaattcaaaactagtccttattttccaaccacagcaagaaaactgatcagtgattttgccattatcttgtccattctcatcttttgtgtaatagatgccctagtaggcgtggacaccccaaaactaattgtgccaagtgagttcaagccaacaagtccaaaccgaggttggttcgttccaccgtttggagaaaacccctggtgggtgtgccttgctgctgctatcccggctttgttggtcactatactgattttcatggaccaacaaattacagctgtgattgtaaacaggaaagaacataaactcaagaaaggagcagggtatcacttggatctcttttgggtggccatcctcatggttatatgctccctcatggctcttccgtggtatgtagctgctacggtcatctccattgctcacatcgacagtttgaagatggagacagagacttctgcacctggagaacaaccaaagtttctaggagtgagggaacaaagagtcactggaacccttgtgtttattctgactggtctgtcagtctttatggctcccatcttgaagtttatacccatgcctgtactctatggtgtgttcctgtatatgggagtagcatcccttaatggtgtgcagttcatggatcgtctgaagctgcttctgatgcctctgaagcatcagcctgacttcatctacctgcgtcatgttcctctgcgcagagtccacctgttcactttcctgcaggtgttgtgtctggccctgctttggatcctcaagtcaacggtggctgctatcatttttccagtaatgatcttggcacttgtagctgtcagaaaaggcatggactacctcttctcccagcacgacctcagcttcctggatgatgtcattccagaaaaggacaagaaaaagaaggaggatgagaagaaaaagaaaaagaagaagggaagtctggacagtgacaatgatgattctgactgcccatactcagaaaaagttccaagtattaaaattccaatggacatcatggaacagcaacctttcctaagcgatagcaaaccttctgacagagaaagatcaccaacattccttgaacgccacacatcatgctgataaaattcctttccttcagtcactcggtatgccaagtcctcctagaactccagtaaaagttgtgcctcaaattagaatagaacttgaacctgaagacaatgattatttctggaggagcaagggaacagaaactacattgtaacctgtttgtctttcttaaaactgacatttgttgttaatgtcatttgtttttgtttggctgtttgtttattttttaacttttatttcgtctcagtttttggtcacaggccaaataatacagcgctctctctgcttctctcttgcatagacacaatcaagacaatagtgcaccgttccttaaaaacagcatctgaggaatcccccttttgttcttaaactttcagatgtgtcctttgataaccaaattctgtcactcaagacacagacacgcacagaccctgtcctttgcctctattaagcagaggatggaagtattaaggattttgtaacaccttttatgaaaatgttgaaggaacttaaaactttagctttggagctgtgcttactggcttgtctttgtctggtagaacaaaccttgacctccagacagagtcccttctcacttatagagctctccaggactggaaaaagtgctgctattttaacttgctcttgcttgtaaatcctaatcttagagttatcaaaagaagaaaaaactgaaggtactttactccctatagagaaaccattgccatcattgtagcaagtgctggaatgtcccttttttcctatgcaactttttttaaccctttaatgaacttatctgttgagtacattgaagaatatttttcttcctagattttgttgtttaaattatggggcctaacctgccacttattttttgtcaatttttaaaacttttttttaattactgtaaagaaaatgaattttttcctgcagcaggaaacatagttttgagtagttctacctcttatttgtagctgccaggctttctgtaaaaattgtattgtatataatgtgatttttacacatacatacacacacaaatacacaatctctagggtaagccagaaggcaagatcagattaaaaacaccatgtttctaagcatccatttttccctttctttaaaagaaacttaactgttctatgaaggagattgagggagaagagacaaactcctatgtcatgagaataaccgatgttctgataatagtagcatctaggtacagatgctggttgtattaccacgtcaatgtcctatgcagtattgttagacattttctcattttgaaatatttgtgtgtttgtgtatgtgctctgtgccatggctggtgtatatatgtgcaatgttagaaggcaaaagagtgatggtaggcagagggcaaagtcattgaatctcttatgccagttttcataaaacccaaaccacatatgaaaaaatccattaagggtccaagaagtctgtccatatgaaaatgagggtaaatatagtttatttcccaggtatcagtcattataattgatataatagctctaacatgcaatataaaattcataggagtattaatagcccatttacacatctataaaatgtaatgggattgcagagctgcagagtacagtgtaacagtactctcatgcaatttttttcaggatgcaaaggcaattattctttgtaagcgggacatttagaatatatttgtgtacatattatatgtatgtatatttcaaagtaccacactgaaaattagacatttattaaccaaatttaacgtggtatttaaaggtaatatttttaatatgatacattacatattgtgaatgtatactaaaaaaacattttaaatgttaaaattataatttcagattcatataaccacaactgtgatatatcctaactataaccagttgttgaggggtatactagaagcagaatgaaaccacattttttggtttgataatatgcacttattgactcccactcattgttatgttaattaagttattattctgtctccttgtaattttgattacaaaaattttattatcctgagttagctgttacttttacagtacctgatactcctaaaacttttaacttatacaaattagtcaataatgaccccaattttttcattaaaataatagtggtgaattatatgttattgtgttaaaacctcacttgccaaattctggcttcacatttgtatttagggctatccttaaaatgatgagtctatattatctagctttctattaccctaatataaactggtataagaagactttccttttttctttatgcatggaagcatcaataaattgtttaaaaaccatgtatagtaaattcagcttaacccgtgatcttcttaagttaaaggtacttttgttttataaaagctctagataaaactttcttttctgatcatgaatcaagtatctgtggtttcatgcccctctctatacctttcaaagaactcctgaagcaacttaactcatcatttcagcctctgagtagaggtaaaacctatgtgtacttctgtttatgatccatattgatatttatgacatgaacacagaatagtaccttacatttgctaaacagacagttaatatcaaatcctttcaatattctgggaacccagggaagtttttaaaaatgtcattactttcaaaggaacagaagtagttaaccaaactaacaagcaaaacctgaggtttacctagtgacaccaaattatcggtattttaactgaatttacccattgactaagaatgaaccagatttggtggtggttttgtttctatgcaaactggacacaaattacaacagtaaatttttttataagtgcttctcccttctccatgatgtgacttccggagataaaggattcaaaagataaagacaaagtacgctcagagttgttaaccagaaagtcctggctgtggttgcagaaacactgttggaagaaaagagatgactaagtcaagtgtctgccttatcaaaagagcaaaaatgcctctggttttgtgtttgggagaaaagtatcttggacgcactgttttccttgataaaagtcatcttctctactgtgtgaaatgaatacttggaattctaattgttttgtgtgccaggggcagtaatgtccctgcctcttctcccaatcaaggttgaggagtggggctggggagaggacttaactgacttaagaagtaggaaaacaaaaacctctctcctcagccttccacctccaagagaggaggaaaaacagttgtctgctgtctgtaattcagtttgcgtgtattttatgctcatgcaccaacccatacagagtaaatcttttatcaactgtatactggtgtttaatagagaatgattgtcttccgagttttttggttccttttttaactgtgttaaagtacttgaaatgtattgactgctgactatattttaaaaacaaaatgaaataatttgagttgtattacagaggttgacattgttcagggatgggacaaagccttcttcaatccttttcatactacttaatgattttggtgcaggaacctgagattttctgatttatatttcatgatatttcacatttgctcttcacagcatgagcatgaagcccagtggcaccaaatggctgggtacaatcaagtgatattttgtagcacctcactatctgaaaggccatgagttttcagatgatttcattgagcttcattgcagcctgaaattttaaaaaagttgtgtaatacgccaaccagtcaagttgtgttttggccagagatttagatatgtccaatttcctggctcatttcattgtgctctatgggtacgtataaaaagcaagaattctgtttcctaggcaaacattgcaactcagggctaaagtcatccagtgaaacttttagagccagaagtaactttgtcccagtcctacaatgtgaaaagagtgaatagttgcctctttttagccattttcatggctggtacatattcgtacgcattacttttcagaatcaatacgcactttcagatattcttatttttattctcttaagtctttattaactttggagagagaaatgatgcatctttttattttaaatgaagtagatcaacatggtggaacaaaatgataaagaacagaaaacatttcaatatattactaataactttttccaatataaatcctaaaattcctataacatagtattttacagttttatgaagctttctattgtgacttttatggaattaagagatgaagaagatgagatattttagcatttatatttttcaaaattatatgtatacttaaaaataaagtaactttatgcattta

SEQ ID NO: 29154 - DNA, 3771 bp, Homo sapiens
  source 1..3771: mol_type = unassigned DNA
ggcagtggcagtggccgctgcagccccacactccgccgccaaactggaggagcgacggaagccagaccccaggaggatggaggatgaagctgtcctggacagaggggcttccttcctcaagcatgtgtgtgatgaagaagaagtagaaggccaccataccatttacatcggagtccatgtgccgaagagttacaggagaaggagacgtcacaagagaaagacagggcacaaagaaaagaaggaaaaggagagaatctctgagaactactctgacaaatcagatattgaaaatgctgatgaatccagcagcagcatcctaaaacctctcatctctcctgctgcagaacgcatccgattcatcttgggagaggaggatgacagcccagctccccctcagctcttcacggaactggatgagctgctggccgtggatgggcaggagatggagtggaaggaaacagccaggtggatcaagtttgaagaaaaagtggaacagggtggggaaagatggagcaagccccatgtggccacattgtcccttcatagtttatttgagctgaggacatgtatggagaaaggatccatcatgcttgatcgggaggcttcttctctcccacagttggtggagatgattgttgaccatcagattgagacaggcctattgaaacctgaacttaaggataaggtgacctatactttgctccggaagcaccggcatcaaaccaagaaatccaaccttcggtccctggctgacattgggaagacagtctccagtgcaagtaggatgtttaccaaccctgataatggtagcccagccatgacccataggaatctgacttcctccagtctgaatgacatttctgataaaccggagaaggaccagctgaagaataagttcatgaaaaaattgccacgtgatgcagaagcttccaacgtgcttgttggggaggttgactttttggatactcctttcattgcctttgttaggctacagcaggctgtcatgctgggtgccctgactgaagttcctgtgcccacaaggttcttgttcattctcttaggtcctaaggggaaagccaagtcctaccacgagattggcagagccattgccaccctgatgtctgatgaggtgttccatgacattgcttataaagcaaaagacaggcacgacctgattgctggtattgatgagttcctagatgaagtcatcgtccttccacctggggaatgggatccagcaattaggatagagcctcctaagagtcttccatcctctgacaaaagaaagaatatgtactcaggtggagagaatgttcagatgaatggggatacgccccatgatggaggtcacggaggaggaggacatggggattgtgaagaattgcagcgaactggacggttctgtggtggactaattaaagacataaagaggaaagcgccattttttgccagtgatttttatgatgctttaaatattcaagctctttcggcaattctcttcatttatctggcaactgtaactaatgctatcacttttggaggactgcttggggatgccactgacaacatgcagggcgtgttggagagtttcctgggcactgctgtctctggagccatcttttgcctttttgctggtcaaccactcactattctgagcagcaccggacctgtcctagtttttgagaggcttctatttaatttcagcaaggacaataattttgactatttggagtttcgcctttggattggcctgtggtccgccttcctatgtctcattttggtagccactgatgccagcttcttggttcaatacttcacacgtttcacggaggagggcttttcctctctgattagcttcatctttatctatgatgctttcaagaagatgatcaagcttgcagattactaccccatcaactccaacttcaaagtgggctacaacactctcttttcctgtacctgtgtgccacctgacccagctaatatctcaatatctaatgacaccacactggccccagagtatttgccaactatgtcttctactgacatgtaccataatactacctttgactgggcatttttgtcgaagaaggagtgttcaaaatacggaggaaacctcgtcgggaacaactgtaattttgttcctgatatcacactcatgtcttttatcctcttcttgggaacctacacctcttccatggctctgaaaaaattcaaaactagtccttattttccaaccacagcaagaaaactgatcagtgattttgccattatcttgtccattctcatcttttgtgtaatagatgccctagtaggcgtggacaccccaaaactaattgtgccaagtgagttcaagccaacaagtccaaaccgaggttggttcgttccaccgtttggagaaaacccctggtgggtgtgccttgctgctgctatcccggctttgttggtcactatactgattttcatggaccaacaaattacagctgtgattgtaaacaggaaagaacataaactcaagtttatacccatgcctgtactctatggtgtgttcctgtatatgggagtagcatcccttaatggtgtgcagttcatggatcgtctgaagctgcttctgatgcctctgaagcatcagcctgacttcatctacctgcgtcatgttcctctgcgcagagtccacctgttcactttcctgcaggtgttgtgtctggccctgctttggatcctcaagtcaacggtggctgctatcatttttccagtaatgatcttggcacttgtagctgtcagaaaaggcatggactacctcttctcccagcacgacctcagcttcctggatgatgtcattccagaaaaggacaagaaaaagaaggaggatgagaagaaaaagaaaaagaagaagggaagtctggacagtgacaatgatgattctgactgcccatactcagaaaaagttccaagtattaaaattccaatggacatcatggaacagcaacctttcctaagcgatagcaaaccttctgacagagaaagatcaccaacattccttgaacgccacacatcatgctgataaaattcctttccttcagtcactcggtatgccaagtcctcctagaactccagtaaaagttgtgcctcaaattagaatagaacttgaacctgaagacaatgattatttctggaggagcaagggaacagaaactacattgtaacctgtttgtctttcttaaaactgacatttgttgttaatgtcatttgtttttgtttggctgtttgtttattttttaacttttatttcgtctcagtttttggtcacaggccaaataatacagcgctctctctgcttctctcttgcatagacacaatcaagacaatagtgcaccgttccttaaaaacagcatctgaggaatcccccttttgttcttaaactttcagatgtgtcctttgataaccaaattctgtcactcaagacacagacacgcacagaccctgtcctttgcctctattaagcagaggatggaagtattaaggattttgtaacaccttttatgaaaatgttgaaggaacttaaaactttagctttggagctgtgcttactggcttgtctttgtctggtagaacaaaccttgacctccagacagagtcccttctcacttatagagctctccaggactggaaaaagtgctgctattttaacttgctcttgcttgtaaatcctaatcttagagttatcaaaagaagaaaaaactgaaggtactttactccctatagagaaac

SEQ ID NO: 29155 - DNA, 7596 bp, Homo sapiens
  source 1..7596: mol_type = unassigned DNA
gcggcggcggccgcggtggcagcgaaggcggcggcggcggcggcagtggcagtggccgctgcagccccacactccgccgccaaactggaggagcgacggaagccagaccccaggaggatggaggatgaagctgtcctggacagaggggcttccttcctcaagcatgtgtgtgatgaagaagaagtagaaggccaccataccatttacatcggagtccatgtgccgaagagttacaggagaaggagacgtcacaagagaaagacagggcacaaagaaaagaaggaaaaggagagaatctctgagaactactctgacaaatcagatattgaaaatgctgatgaatccagcagcagcatcctaaaacctctcatctctcctgctgcagaacgcatccgattcatcttgggagaggaggatgacagcccagctccccctcagctcttcacggaactggatgagctgctggccgtggatgggcaggagatggagtggaaggaaacagccaggtggatcaagtttgaagaaaaagtggaacagggtggggaaagatggagcaagccccatgtggccacattgtcccttcatagtttatttgagctgaggacatgtatggagaaaggatccatcatgcttgatcgggaggcttcttctctcccacagttggtggagatgattgttgaccatcagattgagacaggcctattgaaacctgaacttaaggataaggtgacctatactttgctccggaagcaccggcatcaaaccaagaaatccaaccttcggtccctggctgacattgggaagacagtctccagtgcaagtaggatgtttaccaaccctgataatggtagcccagccatgacccataggaatctgacttcctccagtctgaatgacatttctgataaaccggagaaggaccagctgaagaataagttcatgaaaaaattgccacgtgatgcagaagcttccaacgtgcttgttggggaggttgactttttggatactcctttcattgcctttgttaggctacagcaggctgtcatgctgggtgccctgactgaagttcctgtgcccacaaggttcttgttcattctcttaggtcctaaggggaaagccaagtcctaccacgagattggcagagccattgccaccctgatgtctgatgaggtgttccatgacattgcttataaagcaaaagacaggcacgacctgattgctggtattgatgagttcctagatgaagtcatcgtccttccacctggggaatgggatccagcaattaggatagagcctcctaagagtcttccatcctctgacaaaagaaagaatatgtactcaggtggagagaatgttcagatgaatggggatacgccccatgatggaggtcacggaggaggaggacatggggattgtgaagaattgcagcgaactggacggttctgtggtggactaattaaagacataaagaggaaagcgccattttttgccagtgatttttatgatgctttaaatattcaagctctttcggcaattctcttcatttatctggcaactgtaactaatgctatcacttttggaggactgcttggggatgccactgacaacatgcagggcgtgttggagagtttcctgggcactgctgtctctggagccatcttttgcctttttgctggtcaaccactcactattctgagcagcaccggacctgtcctagtttttgagaggcttctatttaatttcagcaaggacaataattttgactatttggagtttcgcctttggattggcctgtggtccgccttcctatgtctcattttggtagccactgatgccagcttcttggttcaatacttcacacgtttcacggaggagggcttttcctctctgattagcttcatctttatctatgatgctttcaagaagatgatcaagcttgcagattactaccccatcaactccaacttcaaagtgggctacaacactctcttttcctgtacctgtgtgccacctgacccagctaatatctcaatatctaatgacaccacactggccccagagtatttgccaactatgtcttctactgacatgtaccataatactacctttgactgggcatttttgtcgaagaaggagtgttcaaaatacggaggaaacctcgtcgggaacaactgtaattttgttcctgatatcacactcatgtcttttatcctcttcttgggaacctacacctcttccatggctctgaaaaaattcaaaactagtccttattttccaaccacagcaagaaaactgatcagtgattttgccattatcttgtccattctcatcttttgtgtaatagatgccctagtaggcgtggacaccccaaaactaattgtgccaagtgagttcaagccaacaagtccaaaccgaggttggttcgttccaccgtttggagaaaacccctggtgggtgtgccttgctgctgctatcccggctttgttggtcactatactgattttcatggaccaacaaattacagctgtgattgtaaacaggaaagaacataaactcaagaaaggagcagggtatcacttggatctcttttgggtggccatcctcatggttatatgctccctcatggctcttccgtggtatgtagctgctacggtcatctccattgctcacatcgacagtttgaagatggagacagagacttctgcacctggagaacaaccaaagtttctaggagtgagggaacaaagagtcactggaacccttgtgtttattctgactggtctgtcagtctttatggctcccatcttgaagtttatacccatgcctgtactctatggtgtgttcctgtatatgggagtagcatcccttaatggtgtgcagttcatggatcgtctgaagctgcttctgatgcctctgaagcatcagcctgacttcatctacctgcgtcatgttcctctgcgcagagtccacctgttcactttcctgcaggtgttgtgtctggccctgctttggatcctcaagtcaacggtggctgctatcatttttccagtaatgatcttggcacttgtagctgtcagaaaaggcatggactacctcttctcccagcacgacctcagcttcctggatgatgtcattccagaaaaggacaagaaaaagaaggaggatgagaagaaaaagaaaaagaagaagggaagtctggacagtgacaatgatgatgagaaagatcaccaacattccttgaacgccacacatcatgctgataaaattcctttccttcagtcactcggtatgccaagtcctcctagaactccagtaaaagttgtgcctcaaattagaatagaacttgaacctgaagacaatgattatttctggaggagcaagggaacagaaactacattgtaacctgtttgtctttcttaaaactgacatttgttgttaatgtcatttgtttttgtttggctgtttgtttattttttaacttttatttcgtctcagtttttggtcacaggccaaataatacagcgctctctctgcttctctcttgcatagacacaatcaagacaatagtgcaccgttccttaaaaacagcatctgaggaatcccccttttgttcttaaactttcagatgtgtcctttgataaccaaattctgtcactcaagacacagacacgcacagaccctgtcctttgcctctattaagcagaggatggaagtattaaggattttgtaacaccttttatgaaaatgttgaaggaacttaaaactttagctttggagctgtgcttactggcttgtctttgtctggtagaacaaaccttgacctccagacagagtcccttctcacttatagagctctccaggactggaaaaagtgctgctattttaacttgctcttgcttgtaaatcctaatcttagagttatcaaaagaagaaaaaactgaaggtactttactccctatagagaaaccattgccatcattgtagcaagtgctggaatgtcccttttttcctatgcaactttttttaaccctttaatgaacttatctgttgagtacattgaagaatatttttcttcctagattttgttgtttaaattatggggcctaacctgccacttattttttgtcaatttttaaaacttttttttaattactgtaaagaaaatgaattttttcctgcagcaggaaacatagttttgagtagttctacctcttatttgtagctgccaggctttctgtaaaaattgtattgtatataatgtgatttttacacatacatacacacacaaatacacaatctctagggtaagccagaaggcaagatcagattaaaaacaccatgtttctaagcatccatttttccctttctttaaaagaaacttaactgttctatgaaggagattgagggagaagagacaaactcctatgtcatgagaataaccgatgttctgataatagtagcatctaggtacagatgctggttgtattaccacgtcaatgtcctatgcagtattgttagacattttctcattttgaaatatttgtgtgtttgtgtatgtgctctgtgccatggctggtgtatatatgtgcaatgttagaaggcaaaagagtgatggtaggcagagggcaaagtcattgaatctcttatgccagttttcataaaacccaaaccacatatgaaaaaatccattaagggtccaagaagtctgtccatatgaaaatgagggtaaatatagtttatttcccaggtatcagtcattataattgatataatagctctaacatgcaatataaaattcataggagtattaatagcccatttacacatctataaaatgtaatgggattgcagagctgcagagtacagtgtaacagtactctcatgcaatttttttcaggatgcaaaggcaattattctttgtaagcgggacatttagaatatatttgtgtacatattatatgtatgtatatttcaaagtaccacactgaaaattagacatttattaaccaaatttaacgtggtatttaaaggtaatatttttaatatgatacattacatattgtgaatgtatactaaaaaaacattttaaatgttaaaattataatttcagattcatataaccacaactgtgatatatcctaactataaccagttgttgaggggtatactagaagcagaatgaaaccacattttttggtttgataatatgcacttattgactcccactcattgttatgttaattaagttattattctgtctccttgtaattttgattacaaaaattttattatcctgagttagctgttacttttacagtacctgatactcctaaaacttttaacttatacaaattagtcaataatgaccccaattttttcattaaaataatagtggtgaattatatgttattgtgttaaaacctcacttgccaaattctggcttcacatttgtatttagggctatccttaaaatgatgagtctatattatctagctttctattaccctaatataaactggtataagaagactttccttttttctttatgcatggaagcatcaataaattgtttaaaaaccatgtatagtaaattcagcttaacccgtgatcttcttaagttaaaggtacttttgttttataaaagctctagataaaactttcttttctgatcatgaatcaagtatctgtggtttcatgcccctctctatacctttcaaagaactcctgaagcaacttaactcatcatttcagcctctgagtagaggtaaaacctatgtgtacttctgtttatgatccatattgatatttatgacatgaacacagaatagtaccttacatttgctaaacagacagttaatatcaaatcctttcaatattctgggaacccagggaagtttttaaaaatgtcattactttcaaaggaacagaagtagttaaccaaactaacaagcaaaacctgaggtttacctagtgacaccaaattatcggtattttaactgaatttacccattgactaagaatgaaccagatttggtggtggttttgtttctatgcaaactggacacaaattacaacagtaaatttttttataagtgcttctcccttctccatgatgtgacttccggagataaaggattcaaaagataaagacaaagtacgctcagagttgttaaccagaaagtcctggctgtggttgcagaaacactgttggaagaaaagagatgactaagtcaagtgtctgccttatcaaaagagcaaaaatgcctctggttttgtgtttgggagaaaagtatcttggacgcactgttttccttgataaaagtcatcttctctactgtgtgaaatgaatacttggaattctaattgttttgtgtgccaggggcagtaatgtccctgcctcttctcccaatcaaggttgaggagtggggctggggagaggacttaactgacttaagaagtaggaaaacaaaaacctctctcctcagccttccacctccaagagaggaggaaaaacagttgtctgctgtctgtaattcagtttgcgtgtattttatgctcatgcaccaacccatacagagtaaatcttttatcaactgtatactggtgtttaatagagaatgattgtcttccgagttttttggttccttttttaactgtgttaaagtacttgaaatgtattgactgctgactatattttaaaaacaaaatgaaataatttgagttgtattacagaggttgacattgttcagggatgggacaaagccttcttcaatccttttcatactacttaatgattttggtgcaggaacctgagattttctgatttatatttcatgatatttcacatttgctcttcacagcatgagcatgaagcccagtggcaccaaatggctgggtacaatcaagtgatattttgtagcacctcactatctgaaaggccatgagttttcagatgatttcattgagcttcattgcagcctgaaattttaaaaaagttgtgtaatacgccaaccagtcaagttgtgttttggccagagatttagatatgtccaatttcctggctcatttcattgtgctctatgggtacgtataaaaagcaagaattctgtttcctaggcaaacattgcaactcagggctaaagtcatccagtgaaacttttagagccagaagtaactttgtcccagtcctacaatgtgaaaagagtgaatagttgcctctttttagccattttcatggctggtacatattcgtacgcattacttttcagaatcaatacgcactttcagatattcttatttttattctcttaagtctttattaactttggagagagaaatgatgcatctttttattttaaatgaagtagatcaacatggtggaacaaaatgataaagaacagaaaacatttcaatatattactaataactttttccaatataaatcctaaaattcctataacatagtattttacagttttatgaagctttctattgtgacttttatggaattaagagatgaagaagatgagatattttagcatttatatttttcaaaattatatgtatacttaaaaataaagtaactttatgcattta

SEQ ID NO: 29156 - DNA, 6104 bp, Homo sapiens
  source 1..6104: mol_type = unassigned DNA
accctaaaggaattggagtcagggcccaggagccacaggccactgcactggggcatcccaggatttggaattcagctgtgagctcatgagctgatggatgtttccaggagtaccctgaagaccacccaggtgggagtgtaagataaccttccagataaagagttgctgctaccaaaagagtgctgacaccatcacagtatgttcccttctcaaccctggacatggttcagaaacagctaaagcagacaagaatctggggcagccaatattgtaccacctgccaaagcttggcacaaacaatctggaagccaaaaattgcacatactgtggaacagagcaagtggttctggcctccctgggatttggatcctggtttccagagctaagaacacaaagtcatgaaggtgaaggaggagaaggctggggtaggaaagctggaccacactaaccacaggaggagatttccggatcagaaagaatgccctcctatccacattgggcttccagtacccacttaccctcaaagaaaaactgaccagaagggacatctttcaggcctgcaaaaagtccactggggcctgcggccagaccagccacagcaggaactgactggcccagggagtggggcaagcagccaggacagcagcatggatcttatcagcaggactcggtccccagctgctgagcagctccaggacatcctgggggaggaagatgaggctcccaaccccaccctctttacagagatggatactctgcagcatgacggagaccagatggagtggaaggagtcagccaggtggataaagtttgaagaaaaggtagaggaaggcggcgaacgctggagcaagccccacgtgtccacactatccctgcacagcctcttcgagctccgtacctgcctgcagacggggacggtgctgctggatttggacagtggctccttaccacagatcatagatgatgtcattgagaagcagattgaggatggtctcctgcggccagagctccgggagagggtcagttacgtcctcctgaggaggcaccgccaccaaaccaagaagcccatccaccgctccttagctgacattgggaagtcagtctccaccacaaatcgcagtcctgcccggagccctggtgctggcccgagtctacaccactccacggaagacctgcggatgcggcagagtgcaaattacggacgtctgtgtcatgcccagagcagaagcatgaatgacatttctctcaccccaaacacagaccagcggaaaaacaaattcatgaagaagatccccaaggactcagaagcgtccaacgtgctcgtgggcgaggtggacttcctagaccagccattcatcgcgttcgtgcgcctcatccagtcggccatgctgggaggagtgaccgaggtgcctgtccccaccagatttctgtttatactactgggaccttctgggagagcaaaatcctacaatgaaattggccgtgccattgcaaccctcatggtagatgatctcttcagtgacgtggcctacaaagcccgcaatcgggaagatctgatcgcaggaattgatgaatttctggatgaggtcatcgtccttcctcctggagaatgggacccaaatatccggattgagccccccaagaaggtgccctctgctgacaagaggaaatctgtgttctccctagcagagctgggccagatgaatggctctgtgggaggaggcggcggagctcctggaggaggcaatggaggtggtggtggtggtggcagtggcggcggggctggcagtggcggggccggcggaacaagcagcggggatgatggagagatgccagccatgcatgaaatcggggaggaacttatctggacaggaaggttcttcggtggcctgtgtctggatatcaagaggaagttgccctggttcccaagtgacttctatgatggcttccacattcagtccatctctgccatcctattcatctacctcggctgtatcaccaacgcgatcacctttggtgggcttctgggggatgccaccgacaattatcagggagtgatggagagcttcctgggcactgccatggctggctccttgttctgcctcttctcgggacagcctctcatcattctcagcagcacggggcccatcctcatctttgagaagctcctcttcgacttcagcaaaggcaatggcctggactacatggagttccgcctctggattggcctacactcagctgtccagtgccttatcctagtggccacagatgccagctttatcatcaaatatatcacccgcttcaccgaggagggcttctccacccttatcagcttcatcttcatctacgatgccatcaagaagatgatcggtgccttcaagtactaccctatcaatatggacttcaagccaaacttcatcactacctacaagtgcgagtgtgtcgcccctgacacagtgaatacaaccgtgttcaatgcttcagccccattggcaccagacaccaacgcttctctgtacaacctccttaacctcacagcgttggactggtccctgctgagcaagaaggagtgtctgagctacggcgggcgcctgcttgggaattcctgcaagtttatcccagacctggcgctcatgtccttcatccttttctttgggacatactccatgaccctgaccctgaagaagttcaaattcagccgctattttcctaccaaggtccgggccctggtggctgacttttccattgttttctccatcctgatgttctgtggaatcgatgcctgttttggcctagaaactcccaagctgcatgtgcccagtgtcatcaagccaacgcggcctgaccgaggctggttcgtggccccctttgggaagaacccgtggtgggtatacccagcaagcatcctgcccgccctgctggtgaccatcctgatcttcatggaccagcagatcactgccgtcattgtcaaccggaaggagaacaaactgaagaaggctgccggctaccatctggacctgttctgggtgggcatcctcatggctttgtgctcctttatggggctcccctggtacgtggctgccacggtcatctccatcgcccacatcgacagcctcaagatggagacagagaccagtgcccctggggagcagccccagtttctgggagtcagggaacagagagtaaccggcatcatcgtcttcatcctgacgggaatctctgtcttcctggctcccatcctaaagatcctgggcctcatcatcgttcgaaggcttctggatttcatcttttcccagcacgacctggcctggattgacaacatcctcccagagaaggaaaaaaaggagacagacaagaagaggaagagaaaaaaaggggcccacgaggactgtgatgaggagccccagttccctcctccctcggttataaagattcccatggaaagtgtccaatcagatccccaaaacggtatccactgcattgccagaaaaagatcttccagttggagttactcactctgattcttccttcagtgacacagaacttgaccgaagcatcaccttgcacttcaaaatatcctgtccagcttcacctgctttcagctactcacggaacccagtgttcatggtgccacaggtgaagatagagatggagtcagactatgacttcacagacatggataaataccgaagagaaactgacagtgagaccaccctctaggatgaagcagcttctcccagatgggagatggagagcctggcttagtcttcactgggagggtcttaacttctctgtgcctgtttccttctttatcaaacagagggagtccgtctgcctatagaaaactggagatctattgatgaaaagtattgcttagatgcaaagctctcccctttgtagtaattaaaatacctaaagctaaatattatattttattttaaaatgcagttcagcatagaaattctaacatttctttggaaataaaaaaatgcttgtttccccaaaccatagctaagataaaggggcaatagtcaattcatatttaaaacaaatatcaatttaaaattgtttaaaggttagatttaaatatagatgttctcaaacaaacttgtaatatacttttatgtcactagaccatctttggaatatttggcaattctgcatattaagaaatgctgaaaaggtcctatcttttctccctgtcacatccaatttcctaagggttatatgaaaagtttgaaccagccgggcacagtggcacacgcctgtaatcctagcactttgggaggccgaggcaggtgaattgcctgagctcaggagttcgagaccagcctaggcaacacggtgaaaccccgtctctactaaactacaaaaaattagccgggtgtggtggcatgcacctgtagtcccagctattcgggaggctgaggcaggagaatcgcttgaacccaggaggcagaagttgcagtgagctgagatggcaccactgcactccagcctaggcaacagagtgagactccgtatccaaacaaaaaaaaagtttgaaccatctgcattatgggccttgctccagaagtgtgactggggctttcccagattgaaaagccagttccaaaactctgttaatgaaagaaccaatgcatctgagtggataaatgtttctaaaataaaatagttcttgttaaagtgaaatttgaaaccacatgttaaatcaaaatgatcctttaaattagtatcactggtttttcatacctggaatcacatttcatgatacatttgggtgggtcctccctgcaaattttcaatgtttattcccaaagtcaaactcccattcatgtgaacaatacaggttagacagaggtaaggtcacattttacattacaactttgcaatattaatcaacctagtactttaaaggaatgattgaaaactatttgggaagataaaaaccagtttcaatgaagcaaacctattcctcatgaaacttaagatcagtcattttatcttcaatccacatttaatgaacaccaaccatgttgatttaatgcctactatgaccctgacagccacagtgcatctgacacttactttctccaaaacaactatgatttaaaccttgagtaaatcacttgaaccttgaggttagagttactatatttgctcaagatgacaaatgcaggtgctttcttttttaaagaaaaatgacactagatcattaacaccttgagtataggacaggtaattgcctctgtaattcccagcgtctagtgtagtgcctggtccatagaaagctctcaataagtgtttgattacatttaatctcagagctcccttccaagggatactgccaagaggtaaagctccaaacctctactcttactgagagcagaatttcttagaatttccagaaccatctcctatgcttaagtataaattcttgtcagacacagtggctcacacctgtaatcccgctacttgggaggcagaggtggggggaatcagcagaggtcaggaggtcaagaccagcctgggcaacatagtgagacccatctctaaacaaatgtttaaaaattagctaggcatgctggcacacacctgtagtcccagccatttcagaggctgatgcaggaggatcgtttaagtccaggagttcaaggctgcagtgagctataatcatgccactgcactccagccagggagacagctggaatccatgtcttataaacaataataattaatttttaaaaaaagtatttatcatccacaccaatcctggggaagctaacaatccacccttaacacatttcagttttaaaacctggctgatctggaatagaactttgtccaaattaaattgtagaaatgctatggattcaagagtaaacctgcttgattaatcaaacaagctggaaaactactgttaatttctttgttgtaaattgatcactgtaattttaccttacatgtcatttatattttgtatatacatgaacattttaatttccatagcttttaacaggttgacataatacttctccatgcagtaagtcagtcattttttccacttgtaactgtaattcaataaaatttaatcctgtctggtc

SEQ ID NO: 29157 - DNA, 3449 bp, Homo sapiens
  source 1..3449: mol_type = unassigned DNA
tcatgaaggtgaaggaggagaaggctggggtaggaaagctggaccacactaaccacaggaggagatttccggatcagaaagaatgccctcctatccacattgggcttccagtacccacttaccctcaaagaaaaactgaccagaagggacatctttcaggcctgcaaaaagtccactggggcctgcggccagaccagccacagcaggaactgactggcccagggagtggggcaagcagccaggacagcagcatggatcttatcagcaggactcggtccccagctgctgagcagctccaggacatcctgggggaggaagatgaggctcccaaccccaccctctttacagagatggatactctgcagcatgacggagaccagatggagtggaaggagtcagccaggtggataaagtttgaagaaaaggtagaggaaggcggcgaacgctggagcaagccccacgtgtccacactatccctgcacagcctcttcgagctccgtacctgcctgcagacggggacggtgctgctggatttggacagtggctccttaccacagatcatagatgatgtcattgagaagcagattgaggatggtctcctgcggccagagctccgggagagggtcagttacgtcctcctgaggaggcaccgccaccaaaccaagaagcccatccaccgctccttagctgacattgggaagtcagtctccaccacaaatcgcagtcctgcccggagccctggtgctggcccgagtctacaccactccacggaagacctgcggatgcggcagagtgcaaattacggacgtctgtgtcatgcccagagcagaagcatgaatgacatttctctcaccccaaacacagaccagcggaaaaacaaattcatgaagaagatccccaaggactcagaagcgtccaacgtgctcgtgggcgaggtggacttcctagaccagccattcatcgcgttcgtgcgcctcatccagtcggccatgctgggaggagtgaccgaggtgcctgtccccaccagatttctgtttatactactgggaccttctgggagagcaaaatcctacaatgaaattggccgtgccattgcaaccctcatggtagatgatctcttcagtgacgtggcctacaaagcccgcaatcgggaagatctgatcgcaggaattgatgaatttctggatgaggtcatcgtccttcctcctggagaatgggacccaaatatccggattgagccccccaagaaggtgccctctgctgacaagaggaaatctgtgttctccctagcagagctgggccagatgaatggctctgtgggaggaggcggcggagctcctggaggaggcaatggaggtggtggtggtggtggcagtggcggcggggctggcagtggcggggccggcggaacaagcagcggggatgatggagagatgccagccatgcatgaaatcggggaggaacttatctggacaggaaggttcttcggtggcctgtgtctggatatcaagaggaagttgccctggttcccaagtgacttctatgatggcttccacattcagtccatctctgccatcctattcatctacctcggctgtatcaccaacgcgatcacctttggtgggcttctgggggatgccaccgacaattatcagggagtgatggagagcttcctgggcactgccatggctggctccttgttctgcctcttctcgggacagcctctcatcattctcagcagcacggggcccatcctcatctttgagaagctcctcttcgacttcagcaaaggcaatggcctggactacatggagttccgcctctggattggcctacactcagctgtccagtgccttatcctagtggccacagatgccagctttatcatcaaatatatcacccgcttcaccgaggagggcttctccacccttatcagcttcatcttcatctacgatgccatcaagaagatgatcggtgccttcaagtactaccctatcaatatggacttcaagccaaacttcatcactacctacaagtgcgagtgtgtcgcccctgacacagtgaatacaaccgtgttcaatgcttcagccccattggcaccagacaccaacgcttctctgtacaacctccttaacctcacagcgttggactggtccctgctgagcaagaaggagtgtctgagctacggcgggcgcctgcttgggaattcctgcaagtttatcccagacctggcgctcatgtccttcatccttttctttgggacatactccatgaccctgaccctgaagaagttcaaattcagccgctattttcctaccaaggtccgggccctggtggctgacttttccattgttttctccatcctgatgttctgtggaatcgatgcctgttttggcctagaaactcccaagctgcatgtgcccagtgtcatcaagccaacgcggcctgaccgaggctggttcgtggccccctttgggaagaacccgtggtgggtatacccagcaagcatcctgcccgccctgctggtgaccatcctgatcttcatggaccagcagatcactgccgtcattgtcaaccggaaggagaacaaactgaagaaggctgccggctaccatctggacctgttctgggtgggcatcctcatggctttgtgctcctttatggggctcccctggtacgtggctgccacggtcatctccatcgcccacatcgacagcctcaagatggagacagagaccagtgcccctggggagcagccccagtttctgggagtcagggaacagagagtaaccggcatcatcgtcttcatcctgacgggaatctctgtcttcctggctcccatcctaaagtgtatccccctgccggtgctgtacggagtcttcctctacatgggcgtggcctccctgaatggcatccagatggggaccggagggtcagaattcaaaatccagaagaagctgactccattctgggaacgctgcaagctcttcctgatgccagccaagcaccagccggaccatgccttcctgcggcacgtgccgctgcgccggatccacctcttcaccctggtgcagatcctctgcctggcggtgctctggatcctcaaatccacggtggctgccatcatcttcccggtcatgatcctgggcctcatcatcgttcgaaggcttctggatttcatcttttcccagcacgacctggcctggattgacaacatcctcccagagaaggaaaaaaaggagacagacaagaagaggaagagaaaaaaaggggcccacgaggactgtgatgaggagccccagttccctcctccctcggttataaagattcccatggaaagtgtccaatcagatccccaaaacggtatccactgcattgccagaaaaagatcttccagttggagttactcactctgattcttccttcagtgacacagaacttgaccgaag

SEQ ID NO: 29158 - DNA, 3142 bp, Homo sapiens
  source 1..3142: mol_type = unassigned DNA
gcctccctgggatttggatcctggtttccagagctaagaacacaaagtcatgaaggtgaaggaggagaaggctggggtaggaaagctggaccacactaaccacaggaggagatttccggatcagaaagggtccccagctgctgagcagctccaggacatcctgggggaggaagatgaggctcccaaccccaccctctttacagagatggatactctgcagcatgacggagaccagatggagtggaaggagtcagccaggtggataaagtttgaagaaaaggtagaggaaggcggcgaacgctggagcaagccccacgtgtccacactatccctgcacagcctcttcgagctccgtacctgcctgcagacggggacggtgctgctggatttggacagtggctccttaccacagatcatagatgatgtcattgagaagcagattgaggatggtctcctgcggccagagctccgggagagggtcagttacgtcctcctgaggaggcaccgccaccaaaccaagaagcccatccaccgctccttagctgacattgggaagtcagtctccaccacaaatcgcagtcctgcccggagccctggtgctggcccgagtctacaccactccacggaagacctgcggatgcggcagagtgcaaattacggacgtctgtgtcatgcccagagcagaagcatgaatgacatttctctcaccccaaacacagaccagcggaaaaacaaattcatgaagaagatccccaaggactcagaagcgtccaacgtgctcgtgggcgaggtggacttcctagaccagccattcatcgcgttcgtgcgcctcatccagtcggccatgctgggaggagtgaccgaggtgcctgtccccaccagatttctgtttatactactgggaccttctgggagagcaaaatcctacaatgaaattggccgtgccattgcaaccctcatggtagatgatctcttcagtgacgtggcctacaaagcccgcaatcgggaagatctgatcgcaggaattgatgaatttctggatgaggtcatcgtccttcctcctggagaatgggacccaaatatccggattgagccccccaagaaggtgccctctgctgacaagaggaaatctgtgttctccctagcagagctgggccagatgaatggctctgtgggaggaggcggcggagctcctggaggaggcaatggaggtggtggtggtggtggcagtggcggcggggctggcagtggcggggccggcggaacaagcagcggggatgatggagagatgccagccatgcatgaaatcggggaggaacttatctggacaggaaggttcttcggtggcctgtgtctggatatcaagaggaagttgccctggttcccaagtgacttctatgatggcttccacattcagtccatctctgccatcctattcatctacctcggctgtatcaccaacgcgatcacctttggtgggcttctgggggatgccaccgacaattatcagggagtgatggagagcttcctgggcactgccatggctggctccttgttctgcctcttctcgggacagcctctcatcattctcagcagcacggggcccatcctcatctttgagaagctcctcttcgacttcagcaaaggcaatggcctggactacatggagttccgcctctggattggcctacactcagctgtccagtgccttatcctagtggccacagatgccagctttatcatcaaatatatcacccgcttcaccgaggagggcttctccacccttatcagcttcatcttcatctacgatgccatcaagaagatgatcggtgccttcaagtactaccctatcaatatggacttcaagccaaacttcatcactacctacaagtgcgagtgtgtcgcccctgacacagtgaatacaaccgtgttcaatgcttcagccccattggcaccagacaccaacgcttctctgtacaacctccttaacctcacagcgttggactggtccctgctgagcaagaaggagtgtctgagctacggcgggcgcctgcttgggaattcctgcaagtttatcccagacctggcgctcatgtccttcatccttttctttgggacatactccatgaccctgaccctgaagaagttcaaattcagccgctattttcctaccaagccaacgcggcctgaccgaggctggttcgtggccccctttgggaagaacccgtggtgggtatacccagcaagcatcctgcccgccctgctggtgaccatcctgatcttcatggaccagcagatcactgccgtcattgtcaaccggaaggagaacaaactgaagaaggctgccggctaccatctggacctgttctgggtgggcatcctcatggctttgtgctcctttatggggctcccctggtacgtggctgccacggtcatctccatcgcccacatcgacagcctcaagatggagacagagaccagtgcccctggggagcagccccagtttctgggagtcagggaacagagagtaaccggcatcatcgtcttcatcctgacgggaatctctgtcttcctggctcccatcctaaagtgtatccccctgccggtgctgtacggagtcttcctctacatgggcgtggcctccctgaatggcatccagttctgggaacgctgcaagctcttcctgatgccagccaagcaccagccggaccatgccttcctgcggcacgtgccgctgcgccggatccacctcttcaccctggtgcagatcctctgcctggcggtgctctggatcctcaaatccacggtggctgccatcatcttcccggtcatgatcctgggcctcatcatcgttcgaaggcttctggatttcatcttttcccagcacgacctggcctggattgacaacatcctcccagagaaggaaaaaaaggagacagacaagaagaggaagagaaaaaaaggggcccacgaggactgtgatgaggagccccagttccctcctccctcggttataaagattcccatggaaagtgtccaatcagatccccaaaacggtatccactgcattgccagaaaaagatcttccagttggagttactcactctgattcttccttcagtgacacagaacttgaccgaag

SEQ ID NO: 29159 - DNA, 6041 bp, Homo sapiens
  source 1..6041: mol_type = unassigned DNA
accctaaaggaattggagtcagggcccaggagccacaggccactgcactggggcatcccaggatttggaattcagctgtgagctcatgagctgatggatgtttccaggagtaccctgaagaccacccaggtgggagtgtaagataaccttccagataaagagttgctgctaccaaaagagtgctgacaccatcacagtatgttcccttctcaaccctggacatggttcagaaacagctaaagcagacaagaatctggggcagccaatattgtaccacctgccaaagcttggcacaaacaatctggaagccaaaaattgcacatactgtggaacagagcaagtggttctggcctccctgggatttggatcctggtttccagagctaagaacacaaagtcatgaaggtgaaggaggagaaggctggggtaggaaagctggaccacactaaccacaggaggagatttccggatcagaaagggtccccagctgctgagcagctccaggacatcctgggggaggaagatgaggctcccaaccccaccctctttacagagatggatactctgcagcatgacggagaccagatggagtggaaggagtcagccaggtggataaagtttgaagaaaaggtagaggaaggcggcgaacgctggagcaagccccacgtgtccacactatccctgcacagcctcttcgagctccgtacctgcctgcagacggggacggtgctgctggatttggacagtggctccttaccacagatcatagatgatgtcattgagaagcagattgaggatggtctcctgcggccagagctccgggagagggtcagttacgtcctcctgaggaggcaccgccaccaaaccaagaagcccatccaccgctccttagctgacattgggaagtcagtctccaccacaaatcgcagtcctgcccggagccctggtgctggcccgagtctacaccactccacggaagacctgcggatgcggcagagtgcaaattacggacgtctgtgtcatgcccagagcagaagcatgaatgacatttctctcaccccaaacacagaccagcggaaaaacaaattcatgaagaagatccccaaggactcagaagcgtccaacgtgctcgtgggcgaggtggacttcctagaccagccattcatcgcgttcgtgcgcctcatccagtcggccatgctgggaggagtgaccgaggtgcctgtccccaccagatttctgtttatactactgggaccttctgggagagcaaaatcctacaatgaaattggccgtgccattgcaaccctcatggtagatgatctcttcagtgacgtggcctacaaagcccgcaatcgggaagatctgatcgcaggaattgatgaatttctggatgaggtcatcgtccttcctcctggagaatgggacccaaatatccggattgagccccccaagaaggtgccctctgctgacaagaggaaatctgtgttctccctagcagagctgggccagatgaatggctctgtgggaggaggcggcggagctcctggaggaggcaatggaggtggtggtggtggtggcagtggcggcggggctggcagtggcggggccggcggaacaagcagcggggatgatggagagatgccagccatgcatgaaatcggggaggaacttatctggacaggaaggttcttcggtggcctgtgtctggatatcaagaggaagttgccctggttcccaagtgacttctatgatggcttccacattcagtccatctctgccatcctattcatctacctcggctgtatcaccaacgcgatcacctttggtgggcttctgggggatgccaccgacaattatcagggagtgatggagagcttcctgggcactgccatggctggctccttgttctgcctcttctcgggacagcctctcatcattctcagcagcacggggcccatcctcatctttgagaagctcctcttcgacttcagcaaaggcaatggcctggactacatggagttccgcctctggattggcctacactcagctgtccagtgccttatcctagtggccacagatgccagctttatcatcaaatatatcacccgcttcaccgaggagggcttctccacccttatcagcttcatcttcatctacgatgccatcaagaagatgatcggtgccttcaagtactaccctatcaatatggacttcaagccaaacttcatcactacctacaagtgcgagtgtgtcgcccctgacacagtgaatacaaccgtgttcaatgcttcagccccattggcaccagacaccaacgcttctctgtacaacctccttaacctcacagcgttggactggtccctgctgagcaagaaggagtgtctgagctacggcgggcgcctgcttgggaattcctgcaagtttatcccagacctggcgctcatgtccttcatccttttctttgggacatactccatgaccctgaccctgaagaagttcaaattcagccgctattttcctaccaagccaacgcggcctgaccgaggctggttcgtggccccctttgggaagaacccgtggtgggtatacccagcaagcatcctgcccgccctgctggtgaccatcctgatcttcatggaccagcagatcactgccgtcattgtcaaccggaaggagaacaaactgaagaaggctgccggctaccatctggacctgttctgggtgggcatcctcatggctttgtgctcctttatggggctcccctggtacgtggctgccacggtcatctccatcgcccacatcgacagcctcaagatggagacagagaccagtgcccctggggagcagccccagtttctgggagtcagggaacagagagtaaccggcatcatcgtcttcatcctgacgggaatctctgtcttcctggctcccatcctaaagtgtatccccctgccggtgctgtacggagtcttcctctacatgggcgtggcctccctgaatggcatccagttctgggaacgctgcaagctcttcctgatgccagccaagcaccagccggaccatgccttcctgcggcacgtgccgctgcgccggatccacctcttcaccctggtgcagatcctctgcctggcggtgctctggatcctcaaatccacggtggctgccatcatcttcccggtcatgatcctgggcctcatcatcgttcgaaggcttctggatttcatcttttcccagcacgacctggcctggattgacaacatcctcccagagaaggaaaaaaaggagacagacaagaagaggaagagaaaaaaaggggcccacgaggactgtgatgaggagccccagttccctcctccctcggttataaagattcccatggaaagtgtccaatcagatccccaaaacggtatccactgcattgccagaaaaagatcttccagttggagttactcactctgattcttccttcagtgacacagaacttgaccgaagcatcaccttgcacttcaaaatatcctgtccagcttcacctgctttcagctactcacggaacccagtgttcatggtgccacaggtgaagatagagatggagtcagactatgacttcacagacatggataaataccgaagagaaactgacagtgagaccaccctctaggatgaagcagcttctcccagatgggagatggagagcctggcttagtcttcactgggagggtcttaacttctctgtgcctgtttccttctttatcaaacagagggagtccgtctgcctatagaaaactggagatctattgatgaaaagtattgcttagatgcaaagctctcccctttgtagtaattaaaatacctaaagctaaatattatattttattttaaaatgcagttcagcatagaaattctaacatttctttggaaataaaaaaatgcttgtttccccaaaccatagctaagataaaggggcaatagtcaattcatatttaaaacaaatatcaatttaaaattgtttaaaggttagatttaaatatagatgttctcaaacaaacttgtaatatacttttatgtcactagaccatctttggaatatttggcaattctgcatattaagaaatgctgaaaaggtcctatcttttctccctgtcacatccaatttcctaagggttatatgaaaagtttgaaccagccgggcacagtggcacacgcctgtaatcctagcactttgggaggccgaggcaggtgaattgcctgagctcaggagttcgagaccagcctaggcaacacggtgaaaccccgtctctactaaactacaaaaaattagccgggtgtggtggcatgcacctgtagtcccagctattcgggaggctgaggcaggagaatcgcttgaacccaggaggcagaagttgcagtgagctgagatggcaccactgcactccagcctaggcaacagagtgagactccgtatccaaacaaaaaaaaagtttgaaccatctgcattatgggccttgctccagaagtgtgactggggctttcccagattgaaaagccagttccaaaactctgttaatgaaagaaccaatgcatctgagtggataaatgtttctaaaataaaatagttcttgttaaagtgaaatttgaaaccacatgttaaatcaaaatgatcctttaaattagtatcactggtttttcatacctggaatcacatttcatgatacatttgggtgggtcctccctgcaaattttcaatgtttattcccaaagtcaaactcccattcatgtgaacaatacaggttagacagaggtaaggtcacattttacattacaactttgcaatattaatcaacctagtactttaaaggaatgattgaaaactatttgggaagataaaaaccagtttcaatgaagcaaacctattcctcatgaaacttaagatcagtcattttatcttcaatccacatttaatgaacaccaaccatgttgatttaatgcctactatgaccctgacagccacagtgcatctgacacttactttctccaaaacaactatgatttaaaccttgagtaaatcacttgaaccttgaggttagagttactatatttgctcaagatgacaaatgcaggtgctttcttttttaaagaaaaatgacactagatcattaacaccttgagtataggacaggtaattgcctctgtaattcccagcgtctagtgtagtgcctggtccatagaaagctctcaataagtgtttgattacatttaatctcagagctcccttccaagggatactgccaagaggtaaagctccaaacctctactcttactgagagcagaatttcttagaatttccagaaccatctcctatgcttaagtataaattcttgtcagacacagtggctcacacctgtaatcccgctacttgggaggcagaggtggggggaatcagcagaggtcaggaggtcaagaccagcctgggcaacatagtgagacccatctctaaacaaatgtttaaaaattagctaggcatgctggcacacacctgtagtcccagccatttcagaggctgatgcaggaggatcgtttaagtccaggagttcaaggctgcagtgagctataatcatgccactgcactccagccagggagacagctggaatccatgtcttataaacaataataattaatttttaaaaaaagtatttatcatccacaccaatcctggggaagctaacaatccacccttaacacatttcagttttaaaacctggctgatctggaatagaactttgtccaaattaaattgtagaaatgctatggattcaagagtaaacctgcttgattaatcaaacaagctggaaaactactgttaatttctttgttgtaaattgatcactgtaattttaccttacatgtcatttatattttgtatatacatgaacattttaatttccatagcttttaacaggttgacataatacttctccatgcagtaagtcagtcattttttccacttgtaactgtaattcaataaaatttaatcctgtctggtc

SEQ ID NO: 29160 - DNA, 3123 bp, Homo sapiens
  source 1..3123: mol_type = unassigned DNA
atgaaggtgaaggaggagaaggctggggtaggaaagctggaccacactaaccacaggaggagatttccggatcagaaagaatgccctcctatccacattgggcttccagtacccacttaccctcaaagaaaaactgaccagaagggacatctttcaggcctgcaaaaagtccactggggcctgcggccagaccagccacagcaggaactgactggcccagggagtggggcaagcagccaggacagcagcatggatcttatcagcaggactcggtccccagctgctgagcagctccaggacatcctgggggaggaagatgaggctcccaaccccaccctctttacagagatggatactctgcagcatgacggagaccagatggagtggaaggagtcagccaggtggataaagtttgaagaaaaggtagaggaaggcggcgaacgctggagcaagccccacgtgtccacactatccctgcacagcctcttcgagctccgtacctgcctgcagacggggacggtgctgctggatttggacagtggctccttaccacagatcatagatgatgtcattgagaagcagattgaggatggtctcctgcggccagagctccgggagagggtcagttacgtcctcctgaggaggcaccgccaccaaaccaagaagcccatccaccgctccttagctgacattgggaagtcagtctccaccacaaatcgcagtcctgcccggagccctggtgctggcccgagtctacaccactccacggaagacctgcggatgcggcagagtgcaaattacggacgtctgtgtcatgcccagagcagaagcatgaatgacatttctctcaccccaaacacagaccagcggaaaaacaaattcatgaagaagatccccaaggactcagaagcgtccaacgtgctcgtgggcgaggtggacttcctagaccagccattcatcgcgttcgtgcgcctcatccagtcggccatgctgggaggagtgaccgaggtgcctgtccccaccagatttctgtttatactactgggaccttctgggagagcaaaatcctacaatgaaattggccgtgccattgcaaccctcatggtagatgatctcttcagtgacgtggcctacaaagcccgcaatcgggaagatctgatcgcaggaattgatgaatttctggatgaggtcatcgtccttcctcctggagaatgggacccaaatatccggattgagccccccaagaaggtgccctctgctgacaagaggaaatctgtgttctccctagcagagctgggccagatgaatggctctgtgggaggaggcggcggagctcctggaggaggcaatggaggtggtggtggtggtggcagtggcggcggggctggcagtggcggggccggcggaacaagcagcggggatgatggagagatgccagccatgcatgaaatcggggaggaacttatctggacaggaaggttcttcggtggcctgtgtctggatatcaagaggaagttgccctggttcccaagtgacttctatgatggcttccacattcagtccatctctgccatcctattcatctacctcggctgtatcaccaacgcgatcacctttggtgggcttctgggggatgccaccgacaattatcagggagtgatggagagcttcctgggcactgccatggctggctccttgttctgcctcttctcgggacagcctctcatcattctcagcagcacggggcccatcctcatctttgagaagctcctcttcgacttcagcaaaggcaatggcctggactacatggagttccgcctctggattggcctacactcagctgtccagtgccttatcctagtggccacagatgccagctttatcatcaaatatatcacccgcttcaccgaggagggcttctccacccttatcagcttcatcttcatctacgatgccatcaagaagatgatcggtgccttcaagtactaccctatcaatatggacttcaagccaaacttcatcactacctacaagtgcgagtgtgtcgcccctgacacagtgaatacaaccgtgttcaatgcttcagccccattggcaccagacaccaacgcttctctgtacaacctccttaacctcacagcgttggactggtccctgctgagcaagaaggagtgtctgagctacggcgggcgcctgcttgggaattcctgcaagtttatcccagacctggcgctcatgtccttcatccttttctttgggacatactccatgaccctgaccctgaagaagttcaaattcagccgctattttcctaccaaggtccgggccctggtggctgacttttccattgttttctccatcctgatgttctgtggaatcgatgcctgttttggcctagaaactcccaagctgcatgtgcccagtgtcatcaagccaacgcggcctgaccgaggctggttcgtggccccctttgggaagaacccgtggtgggtatacccagcaagcatcctgcccgccctgctggtgaccatcctgatcttcatggaccagcagatcactgccgtcattgtcaaccggaaggagaacaaactgaagaaggctgccggctaccatctggacctgttctgggtgggcatcctcatggctttgtgctcctttatggggctcccctggtacgtggctgccacggtcatctccatcgcccacatcgacagcctcaagatggagacagagaccagtgcccctggggagcagccccagtttctgggagtcagggaacagagagtaaccggcatcatcgtcttcatcctgacgggaatctctgtcttcctggctcccatcctaaagatcctgggcctcatcatcgttcgaaggcttctggatttcatcttttcccagcacgacctggcctggattgacaacatcctcccagagaaggaaaaaaaggagacagacaagaagaggaagagaaaaaaaggggcccacgaggactgtgatgaggagccccagttccctcctccctcggttataaagattcccatggaaagtgtccaatcagatccccaaaacggtatccactgcattgccagaaaaagatcttccagttggagttactcactctga

SEQ ID NO: 29161 - DNA, 3814 bp, Homo sapiens
  source 1..3814: mol_type = unassigned DNA
ccaccctaaaggaattggagtcagggcccaggagccacaggccactgcactggggcatcccaggatttggaattcagctgtgagctcatgagctgatggatgtttccaggagtaccctgaagaccacccaggtgggagtgtaagataaccttccagataaagagttgctgctaccaaaagagtgctgacaccatcacagtatgttcccttctcaaccctggacatggttcagaaacagctaaagcagacaagaatctggggcagccaatattgtaccacctgccaaagcttggcacaaacaatctggaagccaaaaattgcacatactgtggaacagagcaagtggttctggcctccctgggatttggatcctggtttccagagctaagaacacaaagtcatgaaggtgaaggaggagaaggctggggtaggaaagctggaccacactaaccacaggaggagatttccggatcagaaagaatgccctcctatccacattgggcttccagtacccacttaccctcaaagaaaaactgaccagaagggacatctttcaggcctgcaaaaagtccactggggcctgcggccagaccagccacagcaggaactgactggcccagggagtggggcaagcagccaggacagcagcatggatcttatcagcaggactcggtccccagctgctgagcagctccaggacatcctgggggaggaagatgaggctcccaaccccaccctctttacagagatggatactctgcagcatgacggagaccagatggagtggaaggagtcagccaggtggataaagtttgaagaaaaggtagaggaaggcggcgaacgctggagcaagccccacgtgtccacactatccctgcacagcctcttcgagctccgtacctgcctgcagacggggacggtgctgctggatttggacagtggctccttaccacagatcatagatgatgtcattgagaagcagattgaggatggtctcctgcggccagagctccgggagagggtcagttacgtcctcctgaggaggcaccgccaccaaaccaagaagcccatccaccgctccttagctgacattgggaagtcagtctccaccacaaatcgcagtcctgcccggagccctggtgctggcccgagtctacaccactccacggaagacctgcggatgcggcagagtgcaaattacggacgtctgtgtcatgcccagagcagaagcatgaatgacatttctctcaccccaaacacagaccagcggaaaaacaaattcatgaagaagatccccaaggactcagaagcgtccaacgtgctcgtgggcgaggtggacttcctagaccagccattcatcgcgttcgtgcgcctcatccagtcggccatgctgggaggagtgaccgaggtgcctgtccccaccagatttctgtttatactactgggaccttctgggagagcaaaatcctacaatgaaattggccgtgccattgcaaccctcatggtagatgatctcttcagtgacgtggcctacaaagcccgcaatcgggaagatctgatcgcaggaattgatgaatttctggatgaggtcatcgtccttcctcctggagaatgggacccaaatatccggattgagccccccaagaaggtgccctctgctgacaagaggaaatctgtgttctccctagcagagctgggccagatgaatggctctgtgggaggaggcggcggagctcctggaggaggcaatggaggtggtggtggtggtggcagtggcggcggggctggcagtggcggggccggcggaacaagcagcggggatgatggagagatgccagccatgcatgaaatcggggaggaacttatctggacaggaaggttcttcggtggcctgtgtctggatatcaagaggaagttgccctggttcccaagtgacttctatgatggcttccacattcagtccatctctgccatcctattcatctacctcggctgtatcaccaacgcgatcacctttggtgggcttctgggggatgccaccgacaattatcagggagtgatggagagcttcctgggcactgccatggctggctccttgttctgcctcttctcgggacagcctctcatcattctcagcagcacggggcccatcctcatctttgagaagctcctcttcgacttcagcaaaggcaatggcctggactacatggagttccgcctctggattggcctacactcagctgtccagtgccttatcctagtggccacagatgccagctttatcatcaaatatatcacccgcttcaccgaggagggcttctccacccttatcagcttcatcttcatctacgatgccatcaagaagatgatcggtgccttcaagtactaccctatcaatatggacttcaagccaaacttcatcactacctacaagtgcgagtgtgtcgcccctgacacagtgaatacaaccgtgttcaatgcttcagccccattggcaccagacaccaacgcttctctgtacaacctccttaacctcacagcgttggactggtccctgctgagcaagaaggagtgtctgagctacggcgggcgcctgcttgggaattcctgcaagtttatcccagacctggcgctcatgtccttcatccttttctttgggacatactccatgaccctgaccctgaagaagttcaaattcagccgctattttcctaccaaggtccgggccctggtggctgacttttccattgttttctccatcctgatgttctgtggaatcgatgcctgttttggcctagaaactcccaagctgcatgtgcccagtgtcatcaagccaacgcggcctgaccgaggctggttcgtggccccctttgggaagaacccgtggtgggtatacccagcaagcatcctgcccgccctgctggtgaccatcctgatcttcatggaccagcagatcactgccgtcattgtcaaccggaaggagaacaaactgaagaaggctgccggctaccatctggacctgttctgggtgggcatcctcatggctttgtgctcctttatggggctcccctggtacgtggctgccacggtcatctccatcgcccacatcgacagcctcaagatggagacagagaccagtgcccctggggagcagccccagtttctgggagtcagggaacagagagtaaccggcatcatcgtcttcatcctgacgggaatctctgtcttcctggctcccatcctaaagtgtatccccctgccggtgctgtacggagtcttcctctacatgggcgtggcctccctgaatggcatccagatggggaccggagggtcagaattcaaaatccagaagaagctgactccattctgggaacgctgcaagctcttcctgatgccagccaagcaccagccggaccatgccttcctgcggcacgtgccgctgcgccggatccacctcttcaccctggtgcagatcctctgcctggcggtgctctggatcctcaaatccacggtggctgccatcatcttcccggtcatgatcctgggcctcatcatcgttcgaaggcttctggatttcatcttttcccagcacgacctggcctggattgacaacatcctcccagagaaggaaaaaaaggagacagacaagaagaggaagagaaaaaaaggggcccacgaggactgtgatgaggagccccagttccctcctccctcggttataaagattcccatggaaagtgtccaatcagatccccaaaacggtatccactgcattgccagaaaaagatcttccagttggagttactcactctga

SEQ ID NO: 29162 - DNA, 6348 bp, Homo sapiens
  source 1..6348: mol_type = unassigned DNA
accctaaaggaattggagtcagggcccaggagccacaggccactgcactggggcatcccaggatttggaattcagctgtgagctcatgagctgatggatgtttccaggagtaccctgaagaccacccaggtgggagtgtaagataaccttccagataaagagttgctgctaccaaaagagtgctgacaccatcacagtatgttcccttctcaaccctggacatggttcagaaacagctaaagcagacaagaatctggggcagccaatattgtaccacctgccaaagcttggcacaaacaatctggaagccaaaaattgcacatactgtggaacagagcaagtggttctggcctccctgggatttggatcctggtttccagagctaagaacacaaagtcatgaaggtgaaggaggagaaggctggggtaggaaagctggaccacactaaccacaggaggagatttccggatcagaaagaatgccctcctatccacattgggcttccagtacccacttaccctcaaagaaaaactgaccagaagggacatctttcaggcctgcaaaaagtccactggggcctgcggccagaccagccacagcaggaactgactggcccagggagtggggcaagcagccaggacagcagcatggatcttatcagcaggactcggtccccagctgctgagcagctccaggacatcctgggggaggaagatgaggctcccaaccccaccctctttacagagatggatactctgcagcatgacggagaccagatggagtggaaggagtcagccaggtggataaagtttgaagaaaaggtagaggaaggcggcgaacgctggagcaagccccacgtgtccacactatccctgcacagcctcttcgagctccgtacctgcctgcagacggggacggtgctgctggatttggacagtggctccttaccacagatcatagatgatgtcattgagaagcagattgaggatggtctcctgcggccagagctccgggagagggtcagttacgtcctcctgaggaggcaccgccaccaaaccaagaagcccatccaccgctccttagctgacattgggaagtcagtctccaccacaaatcgcagtcctgcccggagccctggtgctggcccgagtctacaccactccacggaagacctgcggatgcggcagagtgcaaattacggacgtctgtgtcatgcccagagcagaagcatgaatgacatttctctcaccccaaacacagaccagcggaaaaacaaattcatgaagaagatccccaaggactcagaagcgtccaacgtgctcgtgggcgaggtggacttcctagaccagccattcatcgcgttcgtgcgcctcatccagtcggccatgctgggaggagtgaccgaggtgcctgtccccaccagatttctgtttatactactgggaccttctgggagagcaaaatcctacaatgaaattggccgtgccattgcaaccctcatggtagatgatctcttcagtgacgtggcctacaaagcccgcaatcgggaagatctgatcgcaggaattgatgaatttctggatgaggtcatcgtccttcctcctggagaatgggacccaaatatccggattgagccccccaagaaggtgccctctgctgacaagaggaaatctgtgttctccctagcagagctgggccagatgaatggctctgtgggaggaggcggcggagctcctggaggaggcaatggaggtggtggtggtggtggcagtggcggcggggctggcagtggcggggccggcggaacaagcagcggggatgatggagagatgccagccatgcatgaaatcggggaggaacttatctggacaggaaggttcttcggtggcctgtgtctggatatcaagaggaagttgccctggttcccaagtgacttctatgatggcttccacattcagtccatctctgccatcctattcatctacctcggctgtatcaccaacgcgatcacctttggtgggcttctgggggatgccaccgacaattatcagggagtgatggagagcttcctgggcactgccatggctggctccttgttctgcctcttctcgggacagcctctcatcattctcagcagcacggggcccatcctcatctttgagaagctcctcttcgacttcagcaaaggcaatggcctggactacatggagttccgcctctggattggcctacactcagctgtccagtgccttatcctagtggccacagatgccagctttatcatcaaatatatcacccgcttcaccgaggagggcttctccacccttatcagcttcatcttcatctacgatgccatcaagaagatgatcggtgccttcaagtactaccctatcaatatggacttcaagccaaacttcatcactacctacaagtgcgagtgtgtcgcccctgacacagtgaatacaaccgtgttcaatgcttcagccccattggcaccagacaccaacgcttctctgtacaacctccttaacctcacagcgttggactggtccctgctgagcaagaaggagtgtctgagctacggcgggcgcctgcttgggaattcctgcaagtttatcccagacctggcgctcatgtccttcatccttttctttgggacatactccatgaccctgaccctgaagaagttcaaattcagccgctattttcctaccaaggtccgggccctggtggctgacttttccattgttttctccatcctgatgttctgtggaatcgatgcctgttttggcctagaaactcccaagctgcatgtgcccagtgtcatcaagccaacgcggcctgaccgaggctggttcgtggccccctttgggaagaacccgtggtgggtatacccagcaagcatcctgcccgccctgctggtgaccatcctgatcttcatggaccagcagatcactgccgtcattgtcaaccggaaggagaacaaactgaagaaggctgccggctaccatctggacctgttctgggtgggcatcctcatggctttgtgctcctttatggggctcccctggtacgtggctgccacggtcatctccatcgcccacatcgacagcctcaagatggagacagagaccagtgcccctggggagcagccccagtttctgggagtcagggaacagagagtaaccggcatcatcgtcttcatcctgacgggaatctctgtcttcctggctcccatcctaaagtgtatccccctgccggtgctgtacggagtcttcctctacatgggcgtggcctccctgaatggcatccagttctgggaacgctgcaagctcttcctgatgccagccaagcaccagccggaccatgccttcctgcggcacgtgccgctgcgccggatccacctcttcaccctggtgcagatcctctgcctggcggtgctctggatcctcaaatccacggtggctgccatcatcttcccggtcatgatcctgggcctcatcatcgttcgaaggcttctggatttcatcttttcccagcacgacctggcctggattgacaacatcctcccagagaaggaaaaaaaggagacagacaagaagaggaagagaaaaaaaggggcccacgaggactgtgatgaggagccccagttccctcctccctcggttataaagattcccatggaaagtgtccaatcagatccccaaaacggtatccactgcattgccagaaaaagatcttccagttggagttactcactctgattcttccttcagtgacacagaacttgaccgaagcatcaccttgcacttcaaaatatcctgtccagcttcacctgctttcagctactcacggaacccagtgttcatggtgccacaggtgaagatagagatggagtcagactatgacttcacagacatggataaataccgaagagaaactgacagtgagaccaccctctaggatgaagcagcttctcccagatgggagatggagagcctggcttagtcttcactgggagggtcttaacttctctgtgcctgtttccttctttatcaaacagagggagtccgtctgcctatagaaaactggagatctattgatgaaaagtattgcttagatgcaaagctctcccctttgtagtaattaaaatacctaaagctaaatattatattttattttaaaatgcagttcagcatagaaattctaacatttctttggaaataaaaaaatgcttgtttccccaaaccatagctaagataaaggggcaatagtcaattcatatttaaaacaaatatcaatttaaaattgtttaaaggttagatttaaatatagatgttctcaaacaaacttgtaatatacttttatgtcactagaccatctttggaatatttggcaattctgcatattaagaaatgctgaaaaggtcctatcttttctccctgtcacatccaatttcctaagggttatatgaaaagtttgaaccagccgggcacagtggcacacgcctgtaatcctagcactttgggaggccgaggcaggtgaattgcctgagctcaggagttcgagaccagcctaggcaacacggtgaaaccccgtctctactaaactacaaaaaattagccgggtgtggtggcatgcacctgtagtcccagctattcgggaggctgaggcaggagaatcgcttgaacccaggaggcagaagttgcagtgagctgagatggcaccactgcactccagcctaggcaacagagtgagactccgtatccaaacaaaaaaaaagtttgaaccatctgcattatgggccttgctccagaagtgtgactggggctttcccagattgaaaagccagttccaaaactctgttaatgaaagaaccaatgcatctgagtggataaatgtttctaaaataaaatagttcttgttaaagtgaaatttgaaaccacatgttaaatcaaaatgatcctttaaattagtatcactggtttttcatacctggaatcacatttcatgatacatttgggtgggtcctccctgcaaattttcaatgtttattcccaaagtcaaactcccattcatgtgaacaatacaggttagacagaggtaaggtcacattttacattacaactttgcaatattaatcaacctagtactttaaaggaatgattgaaaactatttgggaagataaaaaccagtttcaatgaagcaaacctattcctcatgaaacttaagatcagtcattttatcttcaatccacatttaatgaacaccaaccatgttgatttaatgcctactatgaccctgacagccacagtgcatctgacacttactttctccaaaacaactatgatttaaaccttgagtaaatcacttgaaccttgaggttagagttactatatttgctcaagatgacaaatgcaggtgctttcttttttaaagaaaaatgacactagatcattaacaccttgagtataggacaggtaattgcctctgtaattcccagcgtctagtgtagtgcctggtccatagaaagctctcaataagtgtttgattacatttaatctcagagctcccttccaagggatactgccaagaggtaaagctccaaacctctactcttactgagagcagaatttcttagaatttccagaaccatctcctatgcttaagtataaattcttgtcagacacagtggctcacacctgtaatcccgctacttgggaggcagaggtggggggaatcagcagaggtcaggaggtcaagaccagcctgggcaacatagtgagacccatctctaaacaaatgtttaaaaattagctaggcatgctggcacacacctgtagtcccagccatttcagaggctgatgcaggaggatcgtttaagtccaggagttcaaggctgcagtgagctataatcatgccactgcactccagccagggagacagctggaatccatgtcttataaacaataataattaatttttaaaaaaagtatttatcatccacaccaatcctggggaagctaacaatccacccttaacacatttcagttttaaaacctggctgatctggaatagaactttgtccaaattaaattgtagaaatgctatggattcaagagtaaacctgcttgattaatcaaacaagctggaaaactactgttaatttctttgttgtaaattgatcactgtaattttaccttacatgtcatttatattttgtatatacatgaacattttaatttccatagcttttaacaggttgacataatacttctccatgcagtaagtcagtcattttttccacttgtaactgtaattcaataaaatttaatcctgtctggtca

SEQ ID NO: 29163 - DNA, 6168 bp, Homo sapiens
  source 1..6168: mol_type = unassigned DNA
accctaaaggaattggagtcagggcccaggagccacaggccactgcactggggcatcccaggatttggaattcagctgtgagctcatgagctgatggatgtttccaggagtaccctgaagaccacccaggtgggagtgtaagataaccttccagataaagagttgctgctaccaaaagagtgctgacaccatcacagtatgttcccttctcaaccctggacatggttcagaaacagctaaagcagacaagaatctggggcagccaatattgtaccacctgccaaagcttggcacaaacaatctggaagccaaaaattgcacatactgtggaacagagcaagtggttctggcctccctgggatttggatcctggtttccagagctaagaacacaaagtcatgaaggtgaaggaggagaaggctggggtaggaaagctggaccacactaaccacaggaggagatttccggatcagaaagaatgccctcctatccacattgggcttccagtacccacttaccctcaaagaaaaactgaccagaagggacatctttcaggcctgcaaaaagtccactggggcctgcggccagaccagccacagcaggaactgactggcccagggagtggggcaagcagccaggacagcagcatggatcttatcagcaggactcggtccccagctgctgagcagctccaggacatcctgggggaggaagatgaggctcccaaccccaccctctttacagagatggatactctgcagcatgacggagaccagatggagtggaaggagtcagccaggtggataaagtttgaagaaaaggtagaggaaggcggcgaacgctggagcaagccccacgtgtccacactatccctgcacagcctcttcgagctccgtacctgcctgcagacggggacggtgctgctggatttggacagtggctccttaccacagatcatagatgatgtcattgagaagcagattgaggatggtctcctgcggccagagctccgggagagggtcagttacgtcctcctgaggaggcaccgccaccaaaccaagaagcccatccaccgctccttagctgacattgggaagtcagtctccaccacaaatcgcagtcctgcccggagccctggtgctggcccgagtctacaccactccacggaagacctgcggatgcggcagagtgcaaattacggacgtctgtgtcatgcccagagcagaagcatgaatgacatttctctcaccccaaacacagaccagcggaaaaacaaattcatgaagaagatccccaaggactcagaagcgtccaacgtgctcgtgggcgaggtggacttcctagaccagccattcatcgcgttcgtgcgcctcatccagtcggccatgctgggaggagtgaccgaggtgcctgtccccaccagatttctgtttatactactgggaccttctgggagagcaaaatcctacaatgaaattggccgtgccattgcaaccctcatggtagatgatctcttcagtgacgtggcctacaaagcccgcaatcgggaagatctgatcgcaggaattgatgaatttctggatgaggtcatcgtccttcctcctggagaatgggacccaaatatccggattgagccccccaagaaggtgccctctgctgacaagaggaaatctgtgttctccctagcagagctgggccagatgaatggctctgtgggaggaggcggcggagctcctggaggaggcaatggaggtggtggtggtggtggcagtggcggcggggctggcagtggcggggccggcggaacaagcagcggggatgatggagagatgccagccatgcatgaaatcggggaggaacttatctggacaggaaggttcttcggtggcctgtgtctggatatcaagaggaagttgccctggttcccaagtgacttctatgatggcttccacattcagtccatctctgccatcctattcatctacctcggctgtatcaccaacgcgatcacctttggtgggcttctgggggatgccaccgacaattatcagggagtgatggagagcttcctgggcactgccatggctggctccttgttctgcctcttctcgggacagcctctcatcattctcagcagcacggggcccatcctcatctttgagaagctcctcttcgacttcagcaaaggcaatggcctggactacatggagttccgcctctggattggcctacactcagctgtccagtgccttatcctagtggccacagatgccagctttatcatcaaatatatcacccgcttcaccgaggagggcttctccacccttatcagcttcatcttcatctacgatgccatcaagaagatgatcggtgccttcaagtactaccctatcaatatggacttcaagccaaacttcatcactacctacaagtgcgagtgtgtcgcccctgacacagtgaatacaaccgtgttcaatgcttcagccccattggcaccagacaccaacgcttctctgtacaacctccttaacctcacagcgttggactggtccctgctgagcaagaaggagtgtctgagctacggcgggcgcctgcttgggaattcctgcaagtttatcccagacctggcgctcatgtccttcatccttttctttgggacatactccatgaccctgaccctgaagaagttcaaattcagccgctattttcctaccaaggtccgggccctggtggctgacttttccattgttttctccatcctgatgttctgtggaatcgatgcctgttttggcctagaaactcccaagctgcatgtgcccagtgtcatcaagccaacgcggcctgaccgaggctggttcgtggccccctttgggaagaacccgtggtgggtatacccagcaagcatcctgcccgccctgctggtgaccatcctgatcttcatggaccagcagatcactgccgtcattgtcaaccggaaggagaacaaactgaagggaacagagagtaaccggcatcatcgtcttcatcctgacgggaatctctgtcttcctggctcccatcctaaagtgtatccccctgccggtgctgtacggagtcttcctctacatgggcgtggcctccctgaatggcatccagttctgggaacgctgcaagctcttcctgatgccagccaagcaccagccggaccatgccttcctgcggcacgtgccgctgcgccggatccacctcttcaccctggtgcagatcctctgcctggcggtgctctggatcctcaaatccacggtggctgccatcatcttcccggtcatgatcctgggcctcatcatcgttcgaaggcttctggatttcatcttttcccagcacgacctggcctggattgacaacatcctcccagagaaggaaaaaaaggagacagacaagaagaggaagagaaaaaaaggggcccacgaggactgtgatgaggagccccagttccctcctccctcggttataaagattcccatggaaagtgtccaatcagatccccaaaacggtatccactgcattgccagaaaaagatcttccagttggagttactcactctgattcttccttcagtgacacagaacttgaccgaagcatcaccttgcacttcaaaatatcctgtccagcttcacctgctttcagctactcacggaacccagtgttcatggtgccacaggtgaagatagagatggagtcagactatgacttcacagacatggataaataccgaagagaaactgacagtgagaccaccctctaggatgaagcagcttctcccagatgggagatggagagcctggcttagtcttcactgggagggtcttaacttctctgtgcctgtttccttctttatcaaacagagggagtccgtctgcctatagaaaactggagatctattgatgaaaagtattgcttagatgcaaagctctcccctttgtagtaattaaaatacctaaagctaaatattatattttattttaaaatgcagttcagcatagaaattctaacatttctttggaaataaaaaaatgcttgtttccccaaaccatagctaagataaaggggcaatagtcaattcatatttaaaacaaatatcaatttaaaattgtttaaaggttagatttaaatatagatgttctcaaacaaacttgtaatatacttttatgtcactagaccatctttggaatatttggcaattctgcatattaagaaatgctgaaaaggtcctatcttttctccctgtcacatccaatttcctaagggttatatgaaaagtttgaaccagccgggcacagtggcacacgcctgtaatcctagcactttgggaggccgaggcaggtgaattgcctgagctcaggagttcgagaccagcctaggcaacacggtgaaaccccgtctctactaaactacaaaaaattagccgggtgtggtggcatgcacctgtagtcccagctattcgggaggctgaggcaggagaatcgcttgaacccaggaggcagaagttgcagtgagctgagatggcaccactgcactccagcctaggcaacagagtgagactccgtatccaaacaaaaaaaaagtttgaaccatctgcattatgggccttgctccagaagtgtgactggggctttcccagattgaaaagccagttccaaaactctgttaatgaaagaaccaatgcatctgagtggataaatgtttctaaaataaaatagttcttgttaaagtgaaatttgaaaccacatgttaaatcaaaatgatcctttaaattagtatcactggtttttcatacctggaatcacatttcatgatacatttgggtgggtcctccctgcaaattttcaatgtttattcccaaagtcaaactcccattcatgtgaacaatacaggttagacagaggtaaggtcacattttacattacaactttgcaatattaatcaacctagtactttaaaggaatgattgaaaactatttgggaagataaaaaccagtttcaatgaagcaaacctattcctcatgaaacttaagatcagtcattttatcttcaatccacatttaatgaacaccaaccatgttgatttaatgcctactatgaccctgacagccacagtgcatctgacacttactttctccaaaacaactatgatttaaaccttgagtaaatcacttgaaccttgaggttagagttactatatttgctcaagatgacaaatgcaggtgctttcttttttaaagaaaaatgacactagatcattaacaccttgagtataggacaggtaattgcctctgtaattcccagcgtctagtgtagtgcctggtccatagaaagctctcaataagtgtttgattacatttaatctcagagctcccttccaagggatactgccaagaggtaaagctccaaacctctactcttactgagagcagaatttcttagaatttccagaaccatctcctatgcttaagtataaattcttgtcagacacagtggctcacacctgtaatcccgctacttgggaggcagaggtggggggaatcagcagaggtcaggaggtcaagaccagcctgggcaacatagtgagacccatctctaaacaaatgtttaaaaattagctaggcatgctggcacacacctgtagtcccagccatttcagaggctgatgcaggaggatcgtttaagtccaggagttcaaggctgcagtgagctataatcatgccactgcactccagccagggagacagctggaatccatgtcttataaacaataataattaatttttaaaaaaagtatttatcatccacaccaatcctggggaagctaacaatccacccttaacacatttcagttttaaaacctggctgatctggaatagaactttgtccaaattaaattgtagaaatgctatggattcaagagtaaacctgcttgattaatcaaacaagctggaaaactactgttaatttctttgttgtaaattgatcactgtaattttaccttacatgtcatttatattttgtatatacatgaacattttaatttccatagcttttaacaggttgacataatacttctccatgcagtaagtcagtcattttttccacttgtaactgtaattcaataaaatttaatcctgtctggtc

SEQ ID NO: 29164 - DNA, 3073 bp, Homo sapiens
  source 1..3073: mol_type = unassigned DNA
tggacatggttcagaaacagctaaagcagacaagaatctggggcagccaatattgtaccacctgccaaagcttggcacaaacaatctggaagccaaaaattgcacatactgtggaacagagcaagtggttctggcctccctgggatttggatcctggtttccagagctaagaacacaaagtcatgaaggtgaaggaggagaaggctggggtaggaaagctggaccacactaaccacaggaggagatttccggatcagaaagaatgccctcctatccacattgggcttccagtacccacttaccctcaaagaaaaactgaccagaagggacatctttcaggcctgcaaaaagtccactggggcctgcggccagaccagccacagcaggaactgactggcccagggagtggggcaagcagccaggacagcagcatggatcttatcagcaggactcggtccccagctgctgagcagctccaggacatcctgggggaggaagatgaggctcccaaccccaccctctttacagagatggatactctgcagcatgacggagaccagatggagtggaaggagtcagccaggtggataaagtttgaagaaaaggtagaggaaggcggcgaacgctggagcaagccccacgtgtccacactatccctgcacagcctcttcgagctccgtacctgcctgcagacggggacggtgctgctggatttggacagtggctccttaccacagatcatagatgatgtcattgagaagcagattgaggatggtctcctgcggccagagctccgggagagggtcagttacgtcctcctgaggaggcaccgccaccaaaccaagaagcccatccaccgctccttagctgacattgggaagtcagtctccaccacaaatcgcagtcctgcccggagccctggtgctggcccgagtctacaccactccacggaagacctgcggatgcggcagagtgcaaattacggacgtctgtgtcatgcccagagcagaagcatgaatgacatttctctcaccccaaacacagaccagcggaaaaacaaattcatgaagaagatccccaaggactcagaagcgtccaacgtgctcgtgggcgaggtggacttcctagaccagccattcatcgcgttcgtgcgcctcatccagtcggccatgctgggaggagtgaccgaggtgcctgtccccaccagatttctgtttatactactgggaccttctgggagagcaaaatcctacaatgaaattggccgtgccattgcaaccctcatggtagatgatctcttcagtgacgtggcctacaaagcccgcaatcgggaagatctgatcgcaggaattgatgaatttctggatgaggtcatcgtccttcctcctggagaatgggacccaaatatccggattgagccccccaagaaggtgccctctgctgacaagaggaaatctgtgttctccctagcagagctgggccagatgaatggctctgtgggaggaggcggcggagctcctggaggaggcaatggaggtggtggtggtggtggcagtggcggcggggctggcagtggcggggccggcggaacaagcagcggggatgatggagagatgccagccatgcatgaaatcggggaggaacttatctggacaggaaggttcttcggtggcctgtgtctggatatcaagaggaagttgccctggttcccaagtgacttctatgatggcttccacattcagtccatctctgccatcctattcatctacctcggctgtatcaccaacgcgatcacctttggtgggcttctgggggatgccaccgacaattatcagggagtgatggagagcttcctgggcactgccatggctggctccttgttctgcctcttctcgggacagcctctcatcattctcagcagcacggggcccatcctcatctttgagaagctcctcttcgacttcagcaaaggcaatggcctggactacatggagttccgcctctggattggcctacactcagctgtccagtgccttatcctagtggccacagatgccagctttatcatcaaatatatcacccgcttcaccgaggagggcttctccacccttatcagcttcatcttcatctacgatgccatcaagaagatgatcggtgccttcaagtactaccctatcaatatggacttcaagccaaacttcatcactacctacaagtgcgagtgtgtcgcccctgacacagtgaatacaaccgtgttcaatgcttcagccccattggcaccagacaccaacgcttctctgtacaacctccttaacctcacagcgttggactggtccctgctgagcaagaaggagtgtctgagctacggcgggcgcctgcttgggaattcctgcaagtttatcccagacctggcgctcatgtccttcatccttttctttgggacatactccatgaccctgaccctgaagaagttcaaattcagccgctattttcctaccaagccaacgcggcctgaccgaggctggttcgtggccccctttgggaagaacccgtggtgggtatacccagcaagcatcctgcccgccctgctggtgaccatcctgatcttcatggaccagcagatcactgccgtcattgtcaaccggaaggagaacaaactgaagggaacagagagtaaccggcatcatcgtcttcatcctgacgggaatctctgtcttcctggctcccatcctaaagtgtatccccctgccggtgctgtacggagtcttcctctacatgggcgtggcctccctgaatggcatccagttctgggaacgctgcaagctcttcctgatgccagccaagcaccagccggaccatgccttcctgcggcacgtgccgctgcgccggatccacctcttcaccctggtgcagatcctctgcctggcggtgctctggatcctcaaatccacggtggctgccatcatcttcccggtcatgtctctctccaccacagatcctgggcctcatcatcgttcgaaggcttctggatttcatcttttcccagcacgacctggcctggattgacaacatc

SEQ ID NO: 29165 - DNA, 727 bp, Homo sapiens
  source 1..727: mol_type = unassigned DNA
aaggtccaccctaaaggaattggagtcagggcccaggagccacaggccactgcactggggcatcccaggatttggaattcagctgtgagctcatgagctgatggatgtttccaggagtaccctgaagaccacccaggtgggagtgtaagataaccttccagataaagagttgctgctaccaaaagagtgctgacaccatcacagtatgttcccttctcaaccctggacatggttcagaaacagctaaagcagacaagaatctggggcagccaatattgtaccacctgccaaagcttggcacaaacaatctggaagccaaaaattgcacatactgtgtcatgaaggtgaaggaggagaaggctggggtaggaaagctggaccacactaaccacaggaggagatttccggatcagaaagaatgccctcctatccacattgggcttccagtacccacttaccctcaaagaaaaactgaccagaagggacatctttcaggcctgcaaaaagtccactggggcctgcggccagaccagccacagcaggaactgactggcccagggagtggggcaagcagccaggacagcagcatggatcttatcagcaggactcggtccccagctgctgagcagctccaggacatcctgggggaggaagatgaggctcccaaccccaccctctttacagagatggatactctgcagcatgacggagaccagatggagtggaa

SEQ ID NO: 29166 - DNA, 552 bp, Homo sapiens
  source 1..552: mol_type = unassigned DNA
atactgttcagcctggaaaccacagagagcccttcttgccacccaacaggaacagagcaagtggttctggcctccctgggatttggatcctggtttccagagctaagaacacaaagtcatgaaggtgaaggaggagaaggctggggtaggaaagctggaccacactaaccacaggaggagatttccggatcagaaagaatgccctcctatccacattgggcttccagtacccacttaccctcaaagaaaaactgaccagaagggacatctttcaggcctgcaaaaagtccactggggcctgcggccagaccagccacagcaggaactgactggcccagggagtggggcaagcagccaggacagcagcatggatcttatcagcaggactcggtccccagctgctgagcagctccaggacatcctgggggaggaagatgaggctcccaaccccaccctctttacagagatggatactctgcagcatgacggagaccagatggagtggaaggagtcagccaggtggataaagtttgaagaaaaggtagaggaagg

SEQ ID NO: 29167 - DNA, 6410 bp, Homo sapiens
  source 1..6410: mol_type = unassigned DNA
accctaaaggaattggagtcagggcccaggagccacaggccactgcactggggcatcccaggatttggaattcagctgtgagctcatgagctgatggatgtttccaggagtaccctgaagaccacccaggtgggagtgtaagataaccttccagataaagagttgctgctaccaaaagagtgctgacaccatcacagtatgttcccttctcaaccctggacatggttcagaaacagctaaagcagacaagaatctggggcagccaatattgtaccacctgccaaagcttggcacaaacaatctggaagccaaaaattgcacatactgtggaacagagcaagtggttctggcctccctgggatttggatcctggtttccagagctaagaacacaaagtcatgaaggtgaaggaggagaaggctggggtaggaaagctggaccacactaaccacaggaggagatttccggatcagaaagaatgccctcctatccacattgggcttccagtacccacttaccctcaaagaaaaactgaccagaagggacatctttcaggcctgcaaaaagtccactggggcctgcggccagaccagccacagcaggaactgactggcccagggagtggggcaagcagccaggacagcagcatggatcttatcagcaggactcggtccccagctgctgagcagctccaggacatcctgggggaggaagatgaggctcccaaccccaccctctttacagagatggatactctgcagcatgacggagaccagatggagtggaaggagtcagccaggtggataaagtttgaagaaaaggtagaggaaggcggcgaacgctggagcaagccccacgtgtccacactatccctgcacagcctcttcgagctccgtacctgcctgcagacggggacggtgctgctggatttggacagtggctccttaccacagatcatagatgatgtcattgagaagcagattgaggatggtctcctgcggccagagctccgggagagggtcagttacgtcctcctgaggaggcaccgccaccaaaccaagaagcccatccaccgctccttagctgacattgggaagtcagtctccaccacaaatcgcagtcctgcccggagccctggtgctggcccgagtctacaccactccacggaagacctgcggatgcggcagagtgcaaattacggacgtctgtgtcatgcccagagcagaagcatgaatgacatttctctcaccccaaacacagaccagcggaaaaacaaattcatgaagaagatccccaaggactcagaagcgtccaacgtgctcgtgggcgaggtggacttcctagaccagccattcatcgcgttcgtgcgcctcatccagtcggccatgctgggaggagtgaccgaggtgcctgtccccaccagatttctgtttatactactgggaccttctgggagagcaaaatcctacaatgaaattggccgtgccattgcaaccctcatggtagatgatctcttcagtgacgtggcctacaaagcccgcaatcgggaagatctgatcgcaggaattgatgaatttctggatgaggtcatcgtccttcctcctggagaatgggacccaaatatccggattgagccccccaagaaggtgccctctgctgacaagaggaaatctgtgttctccctagcagagctgggccagatgaatggctctgtgggaggaggcggcggagctcctggaggaggcaatggaggtggtggtggtggtggcagtggcggcggggctggcagtggcggggccggcggaacaagcagcggggatgatggagagatgccagccatgcatgaaatcggggaggaacttatctggacaggaaggttcttcggtggcctgtgtctggatatcaagaggaagttgccctggttcccaagtgacttctatgatggcttccacattcagtccatctctgccatcctattcatctacctcggctgtatcaccaacgcgatcacctttggtgggcttctgggggatgccaccgacaattatcagggagtgatggagagcttcctgggcactgccatggctggctccttgttctgcctcttctcgggacagcctctcatcattctcagcagcacggggcccatcctcatctttgagaagctcctcttcgacttcagcaaaggcaatggcctggactacatggagttccgcctctggattggcctacactcagctgtccagtgccttatcctagtggccacagatgccagctttatcatcaaatatatcacccgcttcaccgaggagggcttctccacccttatcagcttcatcttcatctacgatgccatcaagaagatgatcggtgccttcaagtactaccctatcaatatggacttcaagccaaacttcatcactacctacaagtgcgagtgtgtcgcccctgacacagtgaatacaaccgtgttcaatgcttcagccccattggcaccagacaccaacgcttctctgtacaacctccttaacctcacagcgttggactggtccctgctgagcaagaaggagtgtctgagctacggcgggcgcctgcttgggaattcctgcaagtttatcccagacctggcgctcatgtccttcatccttttctttgggacatactccatgaccctgaccctgaagaagttcaaattcagccgctattttcctaccaaggtccgggccctggtggctgacttttccattgttttctccatcctgatgttctgtggaatcgatgcctgttttggcctagaaactcccaagctgcatgtgcccagtgtcatcaagccaacgcggcctgaccgaggctggttcgtggccccctttgggaagaacccgtggtgggtatacccagcaagcatcctgcccgccctgctggtgaccatcctgatcttcatggaccagcagatcactgccgtcattgtcaaccggaaggagaacaaactgaagaaggctgccggctaccatctggacctgttctgggtgggcatcctcatggctttgtgctcctttatggggctcccctggtacgtggctgccacggtcatctccatcgcccacatcgacagcctcaagatggagacagagaccagtgcccctggggagcagccccagtttctgggagtcagggaacagagagtaaccggcatcatcgtcttcatcctgacgggaatctctgtcttcctggctcccatcctaaagtgtatccccctgccggtgctgtacggagtcttcctctacatgggcgtggcctccctgaatggcatccagatggggaccggagggtcagaattcaaaatccagaagaagctgactccattctgggaacgctgcaagctcttcctgatgccagccaagcaccagccggaccatgccttcctgcggcacgtgccgctgcgccggatccacctcttcaccctggtgcagatcctctgcctggcggtgctctggatcctcaaatccacggtggctgccatcatcttcccggtcatgtctctctccaccacagatctgggcctcatcatcgttcgaaggcttctggatttcatcttttcccagcacgacctggcctggattgacaacatcctcccagagaaggaaaaaaaggagacagacaagaagaggaagagaaaaaaaggggcccacgaggactgtgatgaggagccccagttccctcctccctcggttataaagattcccatggaaagtgtccaatcagatccccaaaacggtatccactgcattgccagaaaaagatcttccagttggagttactcactctgattcttccttcagtgacacagaacttgaccgaagcatcaccttgcacttcaaaatatcctgtccagcttcacctgctttcagctactcacggaacccagtgttcatggtgccacaggtgaagatagagatggagtcagactatgacttcacagacatggataaataccgaagagaaactgacagtgagaccaccctctaggatgaagcagcttctcccagatgggagatggagagcctggcttagtcttcactgggagggtcttaacttctctgtgcctgtttccttctttatcaaacagagggagtccgtctgcctatagaaaactggagatctattgatgaaaagtattgcttagatgcaaagctctcccctttgtagtaattaaaatacctaaagctaaatattatattttattttaaaatgcagttcagcatagaaattctaacatttctttggaaataaaaaaatgcttgtttccccaaaccatagctaagataaaggggcaatagtcaattcatatttaaaacaaatatcaatttaaaattgtttaaaggttagatttaaatatagatgttctcaaacaaacttgtaatatacttttatgtcactagaccatctttggaatatttggcaattctgcatattaagaaatgctgaaaaggtcctatcttttctccctgtcacatccaatttcctaagggttatatgaaaagtttgaaccagccgggcacagtggcacacgcctgtaatcctagcactttgggaggccgaggcaggtgaattgcctgagctcaggagttcgagaccagcctaggcaacacggtgaaaccccgtctctactaaactacaaaaaattagccgggtgtggtggcatgcacctgtagtcccagctattcgggaggctgaggcaggagaatcgcttgaacccaggaggcagaagttgcagtgagctgagatggcaccactgcactccagcctaggcaacagagtgagactccgtatccaaacaaaaaaaaagtttgaaccatctgcattatgggccttgctccagaagtgtgactggggctttcccagattgaaaagccagttccaaaactctgttaatgaaagaaccaatgcatctgagtggataaatgtttctaaaataaaatagttcttgttaaagtgaaatttgaaaccacatgttaaatcaaaatgatcctttaaattagtatcactggtttttcatacctggaatcacatttcatgatacatttgggtgggtcctccctgcaaattttcaatgtttattcccaaagtcaaactcccattcatgtgaacaatacaggttagacagaggtaaggtcacattttacattacaactttgcaatattaatcaacctagtactttaaaggaatgattgaaaactatttgggaagataaaaaccagtttcaatgaagcaaacctattcctcatgaaacttaagatcagtcattttatcttcaatccacatttaatgaacaccaaccatgttgatttaatgcctactatgaccctgacagccacagtgcatctgacacttactttctccaaaacaactatgatttaaaccttgagtaaatcacttgaaccttgaggttagagttactatatttgctcaagatgacaaatgcaggtgctttcttttttaaagaaaaatgacactagatcattaacaccttgagtataggacaggtaattgcctctgtaattcccagcgtctagtgtagtgcctggtccatagaaagctctcaataagtgtttgattacatttaatctcagagctcccttccaagggatactgccaagaggtaaagctccaaacctctactcttactgagagcagaatttcttagaatttccagaaccatctcctatgcttaagtataaattcttgtcagacacagtggctcacacctgtaatcccgctacttgggaggcagaggtggggggaatcagcagaggtcaggaggtcaagaccagcctgggcaacatagtgagacccatctctaaacaaatgtttaaaaattagctaggcatgctggcacacacctgtagtcccagccatttcagaggctgatgcaggaggatcgtttaagtccaggagttcaaggctgcagtgagctataatcatgccactgcactccagccagggagacagctggaatccatgtcttataaacaataataattaatttttaaaaaaagtatttatcatccacaccaatcctggggaagctaacaatccacccttaacacatttcagttttaaaacctggctgatctggaatagaactttgtccaaattaaattgtagaaatgctatggattcaagagtaaacctgcttgattaatcaaacaagctggaaaactactgttaatttctttgttgtaaattgatcactgtaattttaccttacatgtcatttatattttgtatatacatgaacattttaatttccatagcttttaacaggttgacataatacttctccatgcagtaagtcagtcattttttccacttgtaactgtaattcaataaaatttaatcctgtctggtc

SEQ ID NO: 29168 - DNA, 7757 bp, Homo sapiens
  source 1..7757: mol_type = unassigned DNA
ctcactgtccctggaatcttcaagggagttactgcattacatcatcagaaacaaggcatttctatattactatggaaagatttcgtctggagaagaagttacctggtcctgatgaagaagctgttgtggatcttggcaaaactagctcaactgtgaacaccaagtttgaaaaagaagaactagaaagtcatagagctgtatatattggtgttcacgtcccgtttagtaaagagagtcgtcggcgtcataggcatcgcggacacaaacatcaccaccggagaagaaaagataaagaatcagataaagaagatggacgggaatctccttcttatgatacaccatcccagagagttcagtttatccttggtactgaagatgatgatgaagaacatattccccatgatctcttcacggaaatggatgaactgtgttacagagatggagaagaatatgaatggaaagaaactgctagatggctgaaatttgaagaggatgttgaagatggcggtgaccgatggagtaaaccttatgtggcaactctctctttgcacagtctttttgaactaaggagttgcatcctcaatggaacagtcatgctggatatgagagcaagcactctagatgaaatagcagatatggtattagacaacatgatagcttctggccaattagacgagtccatacgagagaatgtcagagaagctcttctgaagagacatcatcatcagaatgagaaaagattcaccagtcggattcctcttgttcgatcttttgcagatataggcaagaaacattctgaccctcacttgcttgaaaggaatggggaaggcctttcagcctcccgccactctttgcgaacaggtctgtctgcctcaaacctttccttgagaggagaatcacctttatctcttcttcttggtcatcttcttccttcttcaagagctggaacccctgcaggctcaaggtgtacaaccccagtacccacccctcaaaacagtcctccttctagccctagcatcagccgcctgacctccagaagttcccaagagagtcagcgtcaggccccagaactactggtttcacctgccagtgatgatattcccacagtagtaattcatccgcctgaggaagacttagaagcagcgctgaaaggcgaggagcagaagaatgaggaaaatgttgacttaactccaggtattttggcctctccccagtctgctcctggaaacttggacaatagtaaaagtggagaaattaaaggtaatggaagtggtggaagcagagaaaatagtactgttgacttcagcaaggttgatatgaatttcatgagaaaaattcctacgggtgctgaggcatccaacgtcctggtgggcgaagtagactttttggaaaggccaataattgcatttgtgagactggctcctgctgtcctccttacagggttgactgaggtccctgttccaaccaggtttttgtttttgttattgggtccagcgggcaaggcaccacagtaccatgaaattggacgatcaatagccactctcatgacagatgagattttccatgatgtagcttataaagcaaaagacagaaatgacctcttatctggaattgatgaatttttagatcaagtaactgtcctacctccaggagagtgggatccttctatacgcatagaaccaccaaaaagtgtcccttctcaggaaaagagaaagattcctgtgtttcacaatggatctacccccacactgggtgagactcctaaagaggccgctcatcatgctgggcctgagctacagaggactggacggctttttggtggtttgatacttgacatcaaaaggaaagcaccttttttcttgagtgacttcaaggatgcattaagcctgcagtgcctggcctcgattcttttcctatactgtgcctgtatgtctcctgtaatcacttttggagggctgcttggagaagctacagaaggcagaataagtgcaatagagtctctttttggagcatcattaactgggattgcctattcattgtttgctgggcaacctctaacaatattggggagcacaggtccagttctagtgtttgaaaaaattttatataaattctgcagagattatcaactttcttatctgtctttaagaaccagtattggtctgtggacttcttttttgtgcattgttttggttgcaacagatgcaagcagccttgtgtgttatattactcgatttacagaagaggcttttgcagcccttatttgcatcatattcatctacgaggctttggagaagctctttgatttaggagaaacatatgcatttaatatgcacaacaacttagataaactgaccagctactcatgtgtatgtactgaacctccaaaccccagcaatgaaactctagcacaatggaagaaagataatataacagcacacaatatttcctggagaaatcttactgtttctgaatgtaaaaaacttcgtggtgtattcttggggtcagcttgtggtcatcatggaccttatattccagatgtgctcttttggtgtgtcatcttgtttttcacaacattttttctgtcttcattcctcaagcaatttaagaccaagcgttactttcctaccaaggtgcgatcgacaatcagtgattttgctgtatttctcacaatagtaataatggttacaattgactaccttgtaggagttccatctcctaaacttcatgttcctgaaaaatttgagcctactcatccagagagagggtggatcataagcccactgggagataatccttggtggaccttattaatagctgctattcctgctttgctttgtaccattctcatctttatggatcaacaaatcacagctgtaattataaacagaaaggaacacaaattgaagaaaggagctggctatcaccttgatttgctcatggttggcgttatgttgggagtttgctctgtcatgggacttccatggtttgtggctgcaacagtgttgtcaataagtcatgtcaacagcttaaaagttgaatctgaatgttctgctccaggggaacaacccaagtttttgggaattcgtgaacagcgggttacagggctaatgatttttattctaatgggcctctctgtgttcatgacttcagtcctaaagtttattccaatgcctgttctgtatggtgttttcctttatatgggagtttcctcattaaaaggaatccagttatttgaccgtataaaattatttggaatgcctgctaagcatcagcctgatttgatatacctccgttatgtgccgctctggaaggtccatattttcacagtcattcagcttacttgtttggtccttttatgggtgataaaagtttcagctgctgcagtggtttttcccatgatggttcttgcattagtgtttgtgcgcaaactcatggacctgtgtttcacgaagagagaacttagttggcttgatgatcttatgccagaaagtaagaaaaagaaagaagatgacaaaaagaaaaaagagaaagaggaagctgaacggatgcttcaagatgatgatgatactgtgcaccttccatttgaagggggaagtctcttgcaaattccagtcaaggccctaaaatatagtcctgataaacctgtgagtgtgaaaataagttttgaagatgaaccaagaaagaaatacgtggatgctgaaacttcattatagaattgaaccaagaggcattatacatatagatatatacatatgtaatgtgtgcgtatcatgtcactatatataagaatattgtatgtcatgctgtttatgtgtgactaccgggtttttaaaagtagtgtctggagtttgtaatgagcaccgtggagactatgtatttaatgaaatgctctctttgaagtgaggtacatggttcttaactattcaaatatttattctgttagaaaaaaaaattttctgttttgcaatagaaggatgtggagaaatgctttcagtctacttttcttaaatctctgttcatcagtggcaattcgtaaaaaccttaagtgatactttgtttatatgtttataatttttaggtgtttcctgaaattttcacatattatttcacttttgttagtgctttatgggaagaatagggagtctataccagtgctgtgggaaaaatggtaacatttcagggcttctctatttgtgtttcatttctgtagatgtccatcgtgtttcactaactggcgttttcttagccatagagatgactgtagaacaatagaaactttaataatgatagtttttaacttttatgtttaaattttttttaaatcttaaaaccttcatatctaggtatccattgtgacagacaagtaaaattgcaggtgatttgataattaagcacccataccatttataacttctgaatttaaaaagttatacaatgccagtttgcaatagttgattttgatgcctttgtagaatattttttctgaatccttatgctcttttaaagccaatgattcccactctgttctctgccttgtctctctttgtcttaaaatgctttagtttccatcaggttcaagttcttgactattattctcttataagtagtaggcgtaaataatcaggagttagaattctctcagaagggtctatgatcagtattactttattaagaattacctttcattttctctttatgttattctttcacttttgtagattacatttaatagcttgttacctgtgattttattttaaaatatttattttgatatgatgcttaaatattatataaacatttggaaaagtaacaaatagagtaaattgttaatgtaaatagttggtgcttactttcatttatgtttattatcttaaagcaattgatagattttacatctttgatataaagcactgccatatttatattttaaaaggaaattagacattttatatgtagctcagattaatgacatttttattttgtgtattagtttttgcttttctgagctttttaaagtctaacaaatctttttagtcatcttttatatacttttagttccacatgaaataaatgttgttaagcctgtaggactggatgaatggggttgtgaaactgatttgacaagagaataatttacaaaaatcaaatgagtattgagaagccacagaaatatcaaaaatggtgacatcactattaggatgaaaattttatgaaattccaatgctccctttaaccatataattaaattacaaaggtatacataattaatctaataaaggatcatgaggaatgccaaaagctgaaattttagcaagtctggtgttttaaattcattataaactatttattaactaatgtaatgtcctcctctaagaccatattgtaagagtcttgttaaaatgatggattcaacttctgcctcggatgagaggttggaaatgtagctgcttttctttagaaaatatgtagctgtcatcatttggtactgcctaaaaagagttagactctattggcaattgatagagtattacccacggtgcttattattgtttatgagcttccattgtaatgattcctttttatttgtagcagcataattatttccaaagaccccagtatttgctgctatttttaaaactcccctgatgtacctgaacaagaggatttcctcacatcatttccttgtgtctggacatcaggggtaacaactgtacttactttacaggaagaaattttaaaactgaaaactacctgggatcatagtgtttctgtgattttatttaattgtgtatagtaattatccagtgccagaaaaaccgtcacttgcaaaatactttgcactcaaaatgtttttacaatgcttctaaatgttactggtttctgctttcttttgactacttgactgacaaaatgatctgactactccatttaagagcaaaggtaactcatgtttaggtaattaactgcttgttttaagtgattatatttcttccactgtttttgaaaaataatcaaagatagcattcattgagagacagtgacagatataatttactacatatattgatttttaaataaagttgccttaaataagtgtatgtaagcagtagtagttgctatgtactgatttacctcaaggtgcaaaataattaaacctgtacatattccatttacaaaataaattcagccctgcactttctttagatgccttgatttccagaatggagcttagtgctactgaataccctggccacagagccacctcaggatattcttttctccaccctagtttatttatttatagatatctgtttacaaagtctgtagtaaatcctgatgctgaccatctgaaatgtactttttttctgaatgctgtttcaatctaaaatagcagcttttgagaaaacaatgatgtaaattccttatgataaaaggatgattctatatattctttaatgatattaaatatgccgaagccaagcacacagtctttctaaagtgtgtgtatgtttgtgtgaatgtgaatgatactgatcttatatctgttaaaagttgttttaaaaagctgtggcatcccattgttcatatttgccaagtcttctgtaaagatgtctaggacgaaatattttatgtgctaatgcatgtatttgtaaaccagatttgtttaccactcaaaattaacttgttttcttcatccaaaaaagtttatttcttccacgtacttaaattttctgtgtgggtataatatagctttctaatttttttctttcacaaaggcaggttcaaaattctgttgaaagaaaaatgctttctgaaactgaggtataacaccagagcttgctgtttaaaggattatatgatgtacatcagttctataaatgtgctcagcagtttaacatgtgaatcctgttttaaagtgctcagatttcaactgtgtaagccattgatataacgctgtaattaaaaatgtttatatgaaataacttaatgttttaaatttatttatgtagatcacatcatttttatcgtatgcagtgcaaatatgtgaaatgtcttttggtttattccaacaattatttattttagaaagtaagtttaaagactttaaggacattcaaagtttaaaatagtgttcaaattgcaaaatttggcaatcttcatataaattggtttcttttctaacttttcaaaaactaacattaaatgtcaattataggaaaacatagttggaaatgtaatcatccaaagatcatttttaaaatgaaatttaattagcacatattgaacatttgacttaattgttaaaccccagttttgttttgtttttttaatcagatttttgcacactgattagtttttgtgttgtggcttttgttgctttattattcaaggttttttttttttttcttccccatgggggagattgtcttccaatgtttaactacgtttaaataaataaaaattgaattttattgttcatttatataaaatctgataccttgatgtaatttcacaatacagttccaatttttatggcttttataattacaatgatattttcttctataataaaatccaaagtaaacatttaaattgtagaactgatatttttcatttatatgaagtataagcctctactgggtctatattgtgaatcatcctgcctttcaaatttgtttcataattgttagatgaaaactatttttttggagatgttactgaagttgattgagcaataaaagtctacttaatta

SEQ ID NO: 29169 - DNA, 4001 bp, Homo sapiens
  source 1..4001: mol_type = unassigned DNA
cctactaaagccagcccagcagtcgcagcgcgcacacgcacgccccgcgtctcccgcgcccggcgcccggctctccccacgcgcgcacacctcgcgcacggacgcacccacgtttgtcctcgcgcgccgggggctcggcggcggcggcaggggcagcggcagaagcaggcagaccgcgcggggcagtaccgtagcggccgtcacgggctggccggccggccatggaggctgatggggccggcgagcagatgagaccgctactcacccgggtaacgagcaggggtcctgatgaagaagctgttgtggatcttggcaaaactagctcaactgtgaacaccaagtttgaaaaagaagaactagaaagtcatagagctgtatatattggtgttcacgtcccgtttagtaaagagagtcgtcggcgtcataggcatcgcggacacaaacatcaccaccggagaagaaaagataaagaatcagataaagaagatggacgggaatctccttcttatgatacaccatcccagagagttcagtttatccttggtactgaagatgatgatgaagaacatattccccatgatctcttcacggaaatggatgaactgtgttacagagatggagaagaatatgaatggaaagaaactgctagatggctgaaatttgaagaggatgttgaagatggcggtgaccgatggagtaaaccttatgtggcaactctctctttgcacagtctttttgaactaaggagttgcatcctcaatggaacagtcatgctggatatgagagcaagcactctagatgaaatagcagatatggtattagacaacatgatagcttctggccaattagacgagtccatacgagagaatgtcagagaagctcttctgaagagacatcatcatcagaatgagaaaagattcaccagtcggattcctcttgttcgatcttttgcagatataggcaagaaacattctgaccctcacttgcttgaaaggaatggggaaggcctttcagcctcccgccactctttgcgaacaggtctgtctgcctcaaacctttccttgagaggagaatcacctttatctcttcttcttggtcatcttcttccttcttcaagagctggaacccctgcaggctcaaggtgtacaaccccagtacccacccctcaaaacagtcctccttctagccctagcatcagccgcctgacctccagaagttcccaagagagtcagcgtcaggccccagaactactggtttcacctgccagtgatgatattcccacagtagtaattcatccgcctgaggaagacttagaagcagcgctgaaaggcgaggagcagaagaatgaggaaaatgttgacttaactccaggtattttggcctctccccagtctgctcctggaaacttggacaatagtaaaagtggagaaattaaaggtaatggaagtggtggaagcagagaaaatagtactgttgacttcagcaaggtttttgtttttgttattgggtccagcgggcaaggcaccacagtaccatgaaattggacgatcaatagccactctcatgacagatgagattttccatgatgtagcttataaagcaaaagacagaaatgacctcttatctggaattgatgaatttttagatcaagtaactgtcctacctccaggagagtgggatccttctatacgcatagaaccaccaaaaagtgtcccttctcaggaaaagagaaagattcctgtgtttcacaatggatctacccccacactgggtgagactcctaaagaggccgctcatcatgctgggcctgagctacagaggactggacggctttttggtggtttgatacttgacatcaaaaggaaagcaccttttttcttgagtgacttcaaggatgcattaagcctgcagtgcctggcctcgattcttttcctatactgtgcctgtatgtctcctgtaatcacttttggagggctgcttggagaagctacagaaggcagaataagtgcaatagagtctctttttggagcatcattaactgggattgcctattcattgtttgctgggcaacctctaacaatattggggagcacaggtccagttctagtgtttgaaaaaattttatataaattctgcagagattatcaactttcttatctgtctttaagaaccagtattggtctgtggacttcttttttgtgcattgttttggttgcaacagatgcaagcagccttgtgtgttatattactcgatttacagaagaggcttttgcagcccttatttgcatcatattcatctacgaggctttggagaagctctttgatttaggagaaacatatgcatttaatatgcacaacaacttagataaactgaccagctactcatgtgtatgtactgaacctccaaaccccagcaatgaaactctagcacaatggaagaaagataatataacagcacacaatatttcctggagaaatcttactgtttctgaatgtaaaaaacttcgtggtgtattcttggggtcagcttgtggtcatcatggaccttatattccagatgtgctcttttggtgtgtcatcttgtttttcacaacattttttctgtcttcattcctcaagcaatttaagaccaagcgttactttcctaccaaggtgcgatcgacaatcagtgattttgctgtatttctcacaatagtaataatggttacaattgactaccttgtaggagttccatctcctaaacttcatgttcctgaaaaatttgagcctactcatccagagagagggtggatcataagcccactgggagataatccttggtggaccttattaatagctgctattcctgctttgctttgtaccattctcatctttatggatcaacaaatcacagctgtaattataaacagaaaggaacacaaattgaagaaaggagctggctatcaccttgatttgctcatggttggcgttatgttgggagtttgctctgtcatgggacttccatggtttgtggctgcaacagtgttgtcaataagtcatgtcaacagcttaaaagttgaatctgaatgttctgctccaggggaacaacccaagtttttgggaattcgtgaacagcgggttacagggctaatgatttttattctaatgggcctctctgtgttcatgacttcagtcctaaagtttattccaatgcctgttctgtatggtgttttcctttatatgggagtttcctcattaaaaggaatccagttatttgaccgtataaaattatttggaatgcctgctaagcatcagcctgatttgatatacctccgttatgtgccgctctggaaggtccatattttcacagtcattcagcttacttgtttggtccttttatgggtgataaaagtttcagctgctgcagtggtttttcccatgatggttcttgcattagtgtttgtgcgcaaactcatggacctgtgtttcacgaagagagaacttagttggcttgatgatcttatgccagaaagtaagaaaaagaaagaagatgacaaaaagaaaaaagagaaagaggaagctgaacggatgcttcaagatgatgatgatactgtgcaccttccatttgaagggggaagtctcttgcaaattccagtcaaggccctaaaatatagtgttgatccctcaattgttaacatatcagatgaaatggccaaaactgcacagtggaaggcactttccatgaatactgagaatgccaaagtaaccagatctaacatgagtcctgataaacctgtgagtgtgaaaataagttttgaagatgaaccaagaaagaaatacgtggatgctgaaacttcattatagaattgaaccaagaggcattatacatatagatatatacatatgtaatgtgtgcgtatcatgtcactatatataagaatattgtatgtcatgctgtttatgtgtgactaccgggtttttaaaagtagtgtctggagtttgtaatgagcaccgtggagact

SEQ ID NO: 29170 - DNA, 3933 bp, Homo sapiens
  source 1..3933: mol_type = unassigned DNA
cctactaaagccagcccagcagtcgcagcgcgcacacgcacgccccgcgtctcccgcgcccggcgcccggctctccccacgcgcgcacacctcgcgcacggacgcacccacgtttgtcctcgcgcgccgggggctcggcggcggcggcaggggcagcggcagaagcaggcagaccgcgcggggcagtaccgtagcggccgtcacgggctggccggccggccatggaggctgatggggccggcgagcagatgagaccgctactcacccggggtcctgatgaagaagctgttgtggatcttggcaaaactagctcaactgtgaacaccaagtttgaaaaagaagaactagaaagtcatagagctgtatatattggtgttcacgtcccgtttagtaaagagagtcgtcggcgtcataggcatcgcggacacaaacatcaccaccggagaagaaaagataaagaatcagataaagaagatggacgggaatctccttcttatgatacaccatcccagagagttcagtttatccttggtactgaagatgatgatgaagaacatattccccatgatctcttcacggaaatggatgaactgtgttacagagatggagaagaatatgaatggaaagaaactgctagatggctgaaatttgaagaggatgttgaagatggcggtgaccgatggagtaaaccttatgtggcaactctctctttgcacagtctttttgaactaaggagttgcatcctcaatggaacagtcatgctggatatgagagcaagcactctagatgaaatagcagatatggtattagacaacatgatagcttctggccaattagacgagtccatacgagagaatgtcagagaagctcttctgaagagacatcatcatcagaatgagaaaagattcaccagtcggattcctcttgttcgatcttttgcagatataggggaaggcctttcagcctcccgccactctttgcgaacaggtctgtctgcctcaaacctttccttgagaggagaatcacctttatctcttcttcttggtcatcttcttccttcttcaagagctggaacccctgcaggctcaaggtgtacaaccccagtacccacccctcaaaacagtcctccttctagccctagcatcagccgcctgacctccagaagttcccaagagagtcagcgtcaggccccagaactactggtttcacctgccagtgatgatattcccacagtagtaattcatccgcctgaggaagacttagaagcagcgctgaaaggcgaggagcagaagaatgaggaaaatgttgacttaactccaggtattttggcctctccccagtctgctcctggaaacttggacaatagtaaaagtggagaaattaaaggtaatggaagtggtggaagcagagaaaatagtactgttgacttcagcaaggttgatatgaatttcatgagaaaaattcctacgggtgctgaggcatccaacgtcctggtgggcgaagtagactttttggaaaggccaataattgcatttgtgagactggctcctgctgtcctccttacagggttgactgaggtccctgttccaaccaggtttttgtttttgttattgggtccagcgggcaaggcaccacagtaccatgaaattggacgatcaatagccactctcatgacagatgagattttccatgatgtagcttataaagcaaaagacagaaatgacctcttatctggaattgatgaatttttagatcaagtaactgtcctacctccaggagagtgggatccttctatacgcatagaaccaccaaaaagtgtcccttctcaggaaaagagaaagattcctgtgtttcacaatggatctacccccacactgggtgagactcctaaagaggccgctcatcatgctgggcctgagctacagaggactggacgagtgcaatagagtctctttttggagcatcattaactgggattgcctattcattgtttgctgggcaacctctaacaatattggggagcacaggtccagttctagtgtttgaaaaaattttatataaattctgcagagattatcaactttcttatctgtctttaagaaccagtattggtctgtggacttcttttttgtgcattgttttggttgcaacagatgcaagcagccttgtgtgttatattactcgatttacagaagaggcttttgcagcccttatttgcatcatattcatctacgaggctttggagaagctctttgatttaggagaaacatatgcatttaatatgcacaacaacttagataaactgaccagctactcatgtgtatgtactgaacctccaaaccccagcaatgaaactctagcacaatggaagaaagataatataacagcacacaatatttcctggagaaatcttactgtttctgaatgtaaaaaacttcgtggtgtattcttggggtcagcttgtggtcatcatggaccttatattccagatgtgctcttttggtgtgtcatcttgtttttcacaacattttttctgtcttcattcctcaagcaatttaagaccaagcgttactttcctaccaaggtgcgatcgacaatcagtgattttgctgtatttctcacaatagtaataatggttacaattgactaccttgtaggagttccatctcctaaacttcatgttcctgaaaaatttgagcctactcatccagagagagggtggatcataagcccactgggagataatccttggtggaccttattaatagctgctattcctgctttgctttgtaccattctcatctttatggatcaacaaatcacagctgtaattataaacagaaaggaacacaaattgaagaaaggagctggctatcaccttgatttgctcatggttggcgttatgttgggagtttgctctgtcatgggacttccatggtttgtggctgcaacagtgttgtcaataagtcatgtcaacagcttaaaagttgaatctgaatgttctgctccaggggaacaacccaagtttttgggaattcgtgaacagcgggttacagggctaatgatttttattctaatgggcctctctgtgttcatgacttcagtcctaaagtttattccaatgcctgttctgtatggtgttttcctttatatgggagtttcctcattaaaaggaatccagttatttgaccgtataaaattatttggaatgcctgctaagcatcagcctgatttgatatacctccgttatgtgccgctctggaaggtccatattttcacagtcattcagcttacttgtttggtccttttatgggtgataaaagtttcagctgctgcagtggtttttcccatgatggttcttgcattagtgtttgtgcgcaaactcatggacctgtgtttcacgaagagagaacttagttggcttgatgatcttatgccagaaagtaagaaaaagaaagaagatgacaaaaagaaaaaagagaaagaggaagctgaacggatgcttcaagatgatgatgatactgtgcaccttccatttgaagggggaagtctcttgcaaattccagtcaaggccctaaaatatagtgttgatccctcaattgttaacatatcagatgaaatggccaaaactgcacagtggaaggcactttccatgaatactgagaatgccaaagtaaccagatctaacatgagtcctgataaacctgtgagtgtgaaaataagttttgaagatgaaccaagaaagaaatacgtggatgctgaaacttcattatagaattgaaccaagaggcattatacatatagatatatacatatgtaatgtgtgcgtatcatgtcactatatataagaatattgtatgtcatgctgtttatgtgtgactaccgggtttttaaaagtagtgtctggagtttgtaatgagcaccgtggagact

SEQ ID NO: 29171 - DNA, 7385 bp, Homo sapiens
  source 1..7385: mol_type = unassigned DNA
ctcactgtccctggaatcttcaagggagttactgcattacatcatcagaaacaaggcatttctatattactatggaaagatttcgtctggagaagaagttacctggtcctgatgaagaagctgttgtggatcttggcaaaactagctcaactgtgaacaccaagtttgaaaaagaagaactagaaagtcatagagctgtatatattggtgttcacgtcccgtttagtaaagagagtcgtcggcgtcataggcatcgcggacacaaacatcaccaccggagaagaaaagataaagaatcagataaagaagatggacgggaatctccttcttatgatacaccatcccagagagttcagtttatccttggtactgaagatgatgatgaagaacatattccccatgatctcttcacggaaatggatgaactgtgttacagagatggagaagaatatgaatggaaagaaactgctagatggctgaaatttgaagaggatgttgaagatggcggtgaccgatggagtaaaccttatgtggcaactctctctttgcacagtctttttgaactaaggagttgcatcctcaatggaacagtcatgctggatatgagagcaagcactctagatgaaatagcagatatggtattagacaacatgatagcttctggccaattagacgagtccatacgagagaatgtcagagaagctcttctgaagagacatcatcatcagaatgagaaaagattcaccagtcggattcctcttgttcgatcttttgcagatataggcaagaaacattctgaccctcacttgcttgaaaggaatggtattttggcctctccccagtctgctcctggaaacttggacaatagtaaaagtggagaaattaaaggtaatggaagtggtggaagcagagaaaatagtactgttgacttcagcaaggttgatatgaatttcatgagaaaaattcctacgggtgctgaggcatccaacgtcctggtgggcgaagtagactttttggaaaggccaataattgcatttgtgagactggctcctgctgtcctccttacagggttgactgaggtccctgttccaaccaggtttttgtttttgttattgggtccagcgggcaaggcaccacagtaccatgaaattggacgatcaatagccactctcatgacagatgagattttccatgatgtagcttataaagcaaaagacagaaatgacctcttatctggaattgatgaatttttagatcaagtaactgtcctacctccaggagagtgggatccttctatacgcatagaaccaccaaaaagtgtcccttctcaggaaaagagaaagattcctgtgtttcacaatggatctacccccacactgggtgagactcctaaagaggccgctcatcatgctgggcctgagctacagaggactggacggctttttggtggtttgatacttgacatcaaaaggaaagcaccttttttcttgagtgacttcaaggatgcattaagcctgcagtgcctggcctcgattcttttcctatactgtgcctgtatgtctcctgtaatcacttttggagggctgcttggagaagctacagaaggcagaataagtgcaatagagtctctttttggagcatcattaactgggattgcctattcattgtttgctgggcaacctctaacaatattggggagcacaggtccagttctagtgtttgaaaaaattttatataaattctgcagagattatcaactttcttatctgtctttaagaaccagtattggtctgtggacttcttttttgtgcattgttttggttgcaacagatgcaagcagccttgtgtgttatattactcgatttacagaagaggcttttgcagcccttatttgcatcatattcatctacgaggctttggagaagctctttgatttaggagaaacatatgcatttaatatgcacaacaacttagataaactgaccagctactcatgtgtatgtactgaacctccaaaccccagcaatgaaactctagcacaatggaagaaagataatataacagcacacaatatttcctggagaaatcttactgtttctgaatgtaaaaaacttcgtggtgtattcttggggtcagcttgtggtcatcatggaccttatattccagatgtgctcttttggtgtgtcatcttgtttttcacaacattttttctgtcttcattcctcaagcaatttaagaccaagcgttactttcctaccaaggtgcgatcgacaatcagtgattttgctgtatttctcacaatagtaataatggttacaattgactaccttgtaggagttccatctcctaaacttcatgttcctgaaaaatttgagcctactcatccagagagagggtggatcataagcccactgggagataatccttggtggaccttattaatagctgctattcctgctttgctttgtaccattctcatctttatggatcaacaaatcacagctgtaattataaacagaaaggaacacaaattgaagaaaggagctggctatcaccttgatttgctcatggttggcgttatgttgggagtttgctctgtcatgggacttccatggtttgtggctgcaacagtgttgtcaataagtcatgtcaacagcttaaaagttgaatctgaatgttctgctccaggggaacaacccaagtttttgggaattcgtgaacagcgggttacagggctaatgatttttattctaatgggcctctctgtgttcatgacttcagtcctaaagtttattccaatgcctgttctgtatggtgttttcctttatatgggagtttcctcattaaaaggaatccagttatttgaccgtataaaattatttggaatgcctgctaagcatcagcctgatttgatatacctccgttatgtgccgctctggaaggtccatattttcacagtcattcagcttacttgtttggtccttttatgggtgataaaagtttcagctgctgcagtggtttttcccatgatggttcttgcattagtgtttgtgcgcaaactcatggacctgtgtttcacgaagagagaacttagttggcttgatgatcttatgccagaaagtaagaaaaagaaagaagatgacaaaaagaaaaaagagaaagaggaagctgaacggatgcttcaagatgatgatgatactgtgcaccttccatttgaagggggaagtctcttgcaaattccagtcaaggccctaaaatatagtcctgataaacctgtgagtgtgaaaataagttttgaagatgaaccaagaaagaaatacgtggatgctgaaacttcattatagaattgaaccaagaggcattatacatatagatatatacatatgtaatgtgtgcgtatcatgtcactatatataagaatattgtatgtcatgctgtttatgtgtgactaccgggtttttaaaagtagtgtctggagtttgtaatgagcaccgtggagactatgtatttaatgaaatgctctctttgaagtgaggtacatggttcttaactattcaaatatttattctgttagaaaaaaaaattttctgttttgcaatagaaggatgtggagaaatgctttcagtctacttttcttaaatctctgttcatcagtggcaattcgtaaaaaccttaagtgatactttgtttatatgtttataatttttaggtgtttcctgaaattttcacatattatttcacttttgttagtgctttatgggaagaatagggagtctataccagtgctgtgggaaaaatggtaacatttcagggcttctctatttgtgtttcatttctgtagatgtccatcgtgtttcactaactggcgttttcttagccatagagatgactgtagaacaatagaaactttaataatgatagtttttaacttttatgtttaaattttttttaaatcttaaaaccttcatatctaggtatccattgtgacagacaagtaaaattgcaggtgatttgataattaagcacccataccatttataacttctgaatttaaaaagttatacaatgccagtttgcaatagttgattttgatgcctttgtagaatattttttctgaatccttatgctcttttaaagccaatgattcccactctgttctctgccttgtctctctttgtcttaaaatgctttagtttccatcaggttcaagttcttgactattattctcttataagtagtaggcgtaaataatcaggagttagaattctctcagaagggtctatgatcagtattactttattaagaattacctttcattttctctttatgttattctttcacttttgtagattacatttaatagcttgttacctgtgattttattttaaaatatttattttgatatgatgcttaaatattatataaacatttggaaaagtaacaaatagagtaaattgttaatgtaaatagttggtgcttactttcatttatgtttattatcttaaagcaattgatagattttacatctttgatataaagcactgccatatttatattttaaaaggaaattagacattttatatgtagctcagattaatgacatttttattttgtgtattagtttttgcttttctgagctttttaaagtctaacaaatctttttagtcatcttttatatacttttagttccacatgaaataaatgttgttaagcctgtaggactggatgaatggggttgtgaaactgatttgacaagagaataatttacaaaaatcaaatgagtattgagaagccacagaaatatcaaaaatggtgacatcactattaggatgaaaattttatgaaattccaatgctccctttaaccatataattaaattacaaaggtatacataattaatctaataaaggatcatgaggaatgccaaaagctgaaattttagcaagtctggtgttttaaattcattataaactatttattaactaatgtaatgtcctcctctaagaccatattgtaagagtcttgttaaaatgatggattcaacttctgcctcggatgagaggttggaaatgtagctgcttttctttagaaaatatgtagctgtcatcatttggtactgcctaaaaagagttagactctattggcaattgatagagtattacccacggtgcttattattgtttatgagcttccattgtaatgattcctttttatttgtagcagcataattatttccaaagaccccagtatttgctgctatttttaaaactcccctgatgtacctgaacaagaggatttcctcacatcatttccttgtgtctggacatcaggggtaacaactgtacttactttacaggaagaaattttaaaactgaaaactacctgggatcatagtgtttctgtgattttatttaattgtgtatagtaattatccagtgccagaaaaaccgtcacttgcaaaatactttgcactcaaaatgtttttacaatgcttctaaatgttactggtttctgctttcttttgactacttgactgacaaaatgatctgactactccatttaagagcaaaggtaactcatgtttaggtaattaactgcttgttttaagtgattatatttcttccactgtttttgaaaaataatcaaagatagcattcattgagagacagtgacagatataatttactacatatattgatttttaaataaagttgccttaaataagtgtatgtaagcagtagtagttgctatgtactgatttacctcaaggtgcaaaataattaaacctgtacatattccatttacaaaataaattcagccctgcactttctttagatgccttgatttccagaatggagcttagtgctactgaataccctggccacagagccacctcaggatattcttttctccaccctagtttatttatttatagatatctgtttacaaagtctgtagtaaatcctgatgctgaccatctgaaatgtactttttttctgaatgctgtttcaatctaaaatagcagcttttgagaaaacaatgatgtaaattccttatgataaaaggatgattctatatattctttaatgatattaaatatgccgaagccaagcacacagtctttctaaagtgtgtgtatgtttgtgtgaatgtgaatgatactgatcttatatctgttaaaagttgttttaaaaagctgtggcatcccattgttcatatttgccaagtcttctgtaaagatgtctaggacgaaatattttatgtgctaatgcatgtatttgtaaaccagatttgtttaccactcaaaattaacttgttttcttcatccaaaaaagtttatttcttccacgtacttaaattttctgtgtgggtataatatagctttctaatttttttctttcacaaaggcaggttcaaaattctgttgaaagaaaaatgctttctgaaactgaggtataacaccagagcttgctgtttaaaggattatatgatgtacatcagttctataaatgtgctcagcagtttaacatgtgaatcctgttttaaagtgctcagatttcaactgtgtaagccattgatataacgctgtaattaaaaatgtttatatgaaataacttaatgttttaaatttatttatgtagatcacatcatttttatcgtatgcagtgcaaatatgtgaaatgtcttttggtttattccaacaattatttattttagaaagtaagtttaaagactttaaggacattcaaagtttaaaatagtgttcaaattgcaaaatttggcaatcttcatataaattggtttcttttctaacttttcaaaaactaacattaaatgtcaattataggaaaacatagttggaaatgtaatcatccaaagatcatttttaaaatgaaatttaattagcacatattgaacatttgacttaattgttaaaccccagttttgttttgtttttttaatcagatttttgcacactgattagtttttgtgttgtggcttttgttgctttattattcaaggttttttttttttttcttccccatgggggagattgtcttccaatgtttaactacgtttaaataaataaaaattgaattttattgttcatttatataaaatctgataccttgatgtaatttcacaatacagttccaatttttatggcttttataattacaatgatattttcttctataataaaatccaaagtaaacatttaaattgtagaactgatatttttcatttatatgaagtataagcctctactgggtctatattgtgaatcatcctgcctttcaaatttgtttcataattgttagatgaaaactatttttttggagatgttactgaagttgattgagcaataaaagtctacttaatta

SEQ ID NO: 29172 - DNA, 3787 bp, Homo sapiens
  source 1..3787: mol_type = unassigned DNA
cctactaaagccagcccagcagtcgcagcgcgcacacgcacgccccgcgtctcccgcgcccggcgcccggctctccccacgcgcgcacacctcgcgcacggacgcacccacgtttgtcctcgcgcgccgggggctcggcggcggcggcaggggcagcggcagaagcaggcagaccgcgcggggcagtaccgtagcggccgtcacgggctggccggccggccatggaggctgatggggccggcgagcagatgagaccgctactcacccgggtaacgagcaggggtcctgatgaagaagctgttgtggatcttggcaaaactagctcaactgtgaacaccaagtttgaaaaagaagaactagaaagtcatagagctgtatatattggtgttcacgtcccgtttagtaaagagagtcgtcggcgtcataggcatcgcggacacaaacatcaccaccggagaagaaaagataaagaatcagataaagaagatggacgggaatctccttcttatgatacaccatcccagagagttcagtttatccttggtactgaagatgatgatgaagaacatattccccatgatctcttcacggaaatggatgaactgtgttacagagatggagaagaatatgaatggaaagaaactgctagatggctgaaatttgaagaggatgttgaagatggcggtgaccgatggagtaaaccttatgtggcaactctctctttgcacagtctttttgaactaaggagttgcatcctcaatggaacagtcatgctggatatgagagcaagcactctagatgaaatagcagatatggtattagacaacatgatagcttctggccaattagacgagtccatacgagagaatgtcagagaagctcttctgaagagacatcatcatcagaatgagaaaagattcaccagtcggattcctcttgttcgatcttttgcagatataggcaagaaacattctgaccctcacttgcttgaaaggaatggtattttggcctctccccagtctgctcctggaaacttggacaatagtaaaagtggagaaattaaaggtaatggaagtggtggaagcagagaaaatagtactgttgacttcagcaaggttgatatgaatttcatgagaaaaattcctacgggtgctgaggcatccaacgtcctggtgggcgaagtagactttttggaaaggccaataattgcatttgtgagactggctcctgctgtcctccttacagggttgactgaggtccctgttccaaccaggtttttgtttttgttattgggtccagcgggcaaggcaccacagtaccatgaaattggacgatcaatagccactctcatgacagatgagattttccatgatgtagcttataaagcaaaagacagaaatgacctcttatctggaattgatgaatttttagatcaagtaactgtcctacctccaggagagtgggatccttctatacgcatagaaccaccaaaaagtgtcccttctcaggaaaagagaaagattcctgtgtttcacaatggatctacccccacactgggtgagactcctaaagaggccgctcatcatgctgggcctgagctacagaggactggacggctttttggtggtttgatacttgacatcaaaaggaaagcaccttttttcttgagtgacttcaaggatgcattaagcctgcagtgcctggcctcgattcttttcctatactgtgcctgtatgtctcctgtaatcacttttggagggctgcttggagaagctacagaaggcagaataagtgcaatagagtctctttttggagcatcattaactgggattgcctattcattgtttgctgggcaacctctaacaatattggggagcacaggtccagttctagtgtttgaaaaaattttatataaattctgcagagattatcaactttcttatctgtctttaagaaccagtattggtctgtggacttcttttttgtgcattgttttggttgcaacagatgcaagcagccttgtgtgttatattactcgatttacagaagaggcttttgcagcccttatttgcatcatattcatctacgaggctttggagaagctctttgatttaggagaaacatatgcatttaatatgcacaacaacttagataaactgaccagctactcatgtgtatgtactgaacctccaaaccccagcaatgaaactctagcacaatggaagaaagataatataacagcacacaatatttcctggagaaatcttactgtttctgaatgtaaaaaacttcgtggtgtattcttggggtcagcttgtggtcatcatggaccttatattccagatgtgctcttttggtgtgtcatcttgtttttcacaacattttttctgtcttcattcctcaagcaatttaagaccaagcgttactttcctaccaaggtgcgatcgacaatcagtgattttgctgtatttctcacaatagtaataatggttacaattgactaccttgtaggagttccatctcctaaacttcatgttcctgaaaaatttgagcctactcatccagagagagggtggatcataagcccactgggagataatccttggtggaccttattaatagctgctattcctgctttgctttgtaccattctcatctttatggatcaacaaatcacagctgtaattataaacagaaaggaacacaaattgaagaaaggagctggctatcaccttgatttgctcatggttggcgttatgttgggagtttgctctgtcatgggacttccatggtttgtggctgcaacagtgttgtcaataagtcatgtcaacagcttaaaagttgaatctgaatgttctgctccaggggaacaacccaagtttttgggaattcgtgaacagcgggttacagggctaatgatttttattctaatgggcctctctgtgttcatgacttcagtcctaaagtttattccaatgcctgttctgtatggtgttttcctttatatgggagtttcctcattaaaaggaatccagttatttgaccgtataaaattatttggaatgcctgctaagcatcagcctgatttgatatacctccgttatgtgccgctctggaaggtccatattttcacagtcattcagcttacttgtttggtccttttatgggtgataaaagtttcagctgctgcagtggtttttcccatgatggttcttgcattagtgtttgtgcgcaaactcatggacctgtgtttcacgaagagagaacttagttggcttgatgatcttatgccagaaagtaagaaaaagaaagaagatgacaaaaagaaaaaagagaaagaggaagctgaacggatgcttcaagatgatgatgatactgtgcaccttccatttgaagggggaagtctcttgcaaattccagtcaaggccctaaaatatagtgttgatccctcaattgttaacatatcagatgaaatggccaaaactgcacagtggaaggcactttccatgaatactgagaatgccaaagtaaccagatctaacatgagtcctgataaacctgtgagtgtgaaaataagttttgaagatgaaccaagaaagaaatacgtggatgctgaaacttcattatagaattgaaccaagaggcattatacatatagatatatacatatgtaatgtgtgcgtatcatgtcactatatataagaatattgtatgtcatgctgtttatgtgtgactaccgggtttttaaaagtagtgtctggagtttgtaatgagcaccgtggagact

SEQ ID NO: 29173 - DNA, 3667 bp, Homo sapiens
  source 1..3667: mol_type = unassigned DNA
cctactaaagccagcccagcagtcgcagcgcgcacacgcacgccccgcgtctcccgcgcccggcgcccggctctccccacgcgcgcacacctcgcgcacggacgcacccacgtttgtcctcgcgcgccgggggctcggcggcggcggcaggggcagcggcagaagcaggcagaccgcgcggggcagtaccgtagcggccgtcacgggctggccggccggccatggaggctgatggggccggcgagcagatgagaccgctactcacccggggtcctgatgaagaagctgttgtggatcttggcaaaactagctcaactgtgaacaccaagtttgaaaaagaagaactagaaagtcatagagctgtatatattggtgttcacgtcccgtttagtaaagagagtcgtcggcgtcataggcatcgcggacacaaacatcaccaccggagaagaaaagataaagaatcagataaagaagatggacgggaatctccttcttatgatacaccatcccagagagttcagtttatccttggtactgaagatgatgatgaagaacatattccccatgatctcttcacggaaatggatgaactgtgttacagagatggagaagaatatgaatggaaagaaactgctagatggctgaaatttgaagaggatgttgaagatggcggtgaccgatggagtaaaccttatgtggcaactctctctttgcacagtctttttgaactaaggagttgcatcctcaatggaacagtcatgctggatatgagagcaagcactctagatgaaatagcagatatggtattagacaacatgatagcttctggccaattagacgagtccatacgagagaatgtcagagaagctcttctgaagagacatcatcatcagaatgagaaaagattcaccagtcggattcctcttgttcgatcttttgcagatataggcaagaaacattctgaccctcacttgcttgaaaggaatggtattttggcctctccccagtctgctcctggaaacttggacaatagtaaaagtggagaaattaaaggtaatggaagtggtggaagcagagaaaatagtactgttgacttcagcaaggttgatatgaatttcatgagaaaaattcctacgggtgctgaggcatccaacgtcctggtgggcgaagtagactttttggaaaggccaataattgcatttgtgagactggctcctgctgtcctccttacagggttgactgaggtccctgttccaaccaggtttttgtttttgttattgggtccagcgggcaaggcaccacagtaccatgaaattggacgatcaatagccactctcatgacagatgagattttccatgatgtagcttataaagcaaaagacagaaatgacctcttatctggaattgatgaatttttagatcaagtaactgtcctacctccaggagagtgggatccttctatacgcatagaaccaccaaaaagtgtcccttctcaggaaaagagaaagattcctgtgtttcacaatggatctacccccacactgggtgagactcctaaagaggccgctcatcatgctgggcctgagctacagaggactggacggctttttggtggtttgatacttgacatcaaaaggaaagcaccttttttcttgagtgacttcaaggatgcattaagcctgcagtgcctggcctcgattcttttcctatactgtgcctgtatgtctcctgtaatcacttttggagggctgcttggagaagctacagaaggcagaataagtgcaatagagtctctttttggagcatcattaactgggattgcctattcattgtttgctgggcaacctctaacaatattggggagcacaggtccagttctagtgtttgaaaaaattttatataaattctgcagagattatcaactttcttatctgtctttaagaaccagtattggtctgtggacttcttttttgtgcattgttttggttgcaacagatgcaagcagccttgtgtgttatattactcgatttacagaagaggcttttgcagcccttatttgcatcatattcatctacgaggctttggagaagctctttgatttaggagaaacatatgcatttaatatgcacaacaacttagataaactgaccagctactcatgtgtatgtactgaacctccaaaccccagcaatgaaactctagcacaatggaagaaagataatataacagcacacaatatttcctggagaaatcttactgtttctgaatgtaaaaaacttcgtggtgtattcttggggtcagcttgtggtcatcatggaccttatattccagatgtgctcttttggtgtgtcatcttgtttttcacaacattttttctgtcttcattcctcaagcaatttaagaccaagcgttactttcctaccaaggtgcgatcgacaatcagtgattttgctgtatttctcacaatagtaataatggttacaattgactaccttgtaggagttccatctcctaaacttcatgttcctgaaaaatttgagcctactcatccagagagagggtggatcataagcccactgggagataatccttggtggaccttattaatagctgctattcctgctttgctttgtaccattctcatctttatggatcaacaaatcacagctgtaattataaacagaaaggaacacaaattgaagaaaggagctggctatcaccttgatttgctcatggttggcgttatgttgggagtttgctctgtcatgggacttccatggtttgtggctgcaacagtgttgtcaataagtcatgtcaacagcttaaaagttgaatctgaatgttctgctccaggggaacaacccaagtttttgggaattcgtgaacagcgggttacagggctaatgatttttattctaatgggcctctctgtgttcatgacttcagtcctaaagtttattccaatgcctgttctgtatggtgttttcctttatatgggagtttcctcattaaaaggaatccagttatttgaccgtataaaattatttggaatgcctgctaagcatcagcctgatttgatatacctccgttatgtgccgctctggaaggtccatattttcacagtcattcagcttacttgtttggtccttttatgggtgataaaagtttcagctgctgcagtggtttttcccatgatggttcttgcattagtgtttgtgcgcaaactcatggacctgtgtttcacgaagagagaacttagttggcttgatgatcttatgccagaaagtaagaaaaagaaagaagatgacaaaaagaaaaaagagaaagaggaagctgaacggatgcttcaagatgatgatgatactgtgcaccttccatttgaagggggaagtctcttgcaaattccagtcaaggccctaaaatatagtcctgataaacctgtgagtgtgaaaataagttttgaagatgaaccaagaaagaaatacgtggatgctgaaacttcattatagaattgaaccaagaggcattatacatatagatatatacatatgtaatgtgtgcgtatcatgtcactatatataagaatattgtatgtcatgctgtttatgtgtgactaccgggtttttaaaagtagtgtctggagtttgtaatgagcaccgtggagact

SEQ ID NO: 29174 - DNA, 3407 bp, Homo sapiens
  source 1..3407: mol_type = unassigned DNA
gctctcctccttcccgctcggtccgccggttcgctcagttctagcttcaggttccacgccgcggcctcgctctcctactaaagccagcccagcagtcgcagcgcgcacacgcacgccccgcgtctcccgcgcccggcgcccggctctccccacgcgcgcacacctcgcgcacggacgcacccacgtttgtcctcgcgcgccgggggctcggcggcggcggcaggggcagcggcagaagcaggcagaccgcgcggggcagtaccgtagcggccgtcacgggctggccggccggccatggaggctgatggggccggcgagcagatgagaccgctactcacccggggtcctgatgaagaagctgttgtggatcttggcaaaactagctcaactgtgaacaccaagtttgaaaaagaagaactagaaagtcatagagctgtatatattggtgttcacgtcccgtttagtaaagagagtcgtcggcgtcataggcatcgcggacacaaacatcaccaccggagaagaaaagataaagaatcagataaagaagatggacgggaatctccttcttatgatacaccatcccagagagttcagtttatccttggtactgaagatgatgatgaagaacatattccccatgatctcttcacggaaatggatgaactgtgttacagagatggagaagaatatgaatggaaagaaactgctagatggctgaaatttgaagaggatgttgaagatggcggtgaccgatggagtaaaccttatgtggcaactctctctttgcacagtctttttgaactaaggagttgcatcctcaatggaacagtcatgctggatatgagagcaagcactctagatgaaatagcagatatggtattagacaacatgatagcttctggccaattagacgagtccatacgagagaatgtcagagaagctcttctgaagagacatcatcatcagaatgagaaaagattcaccagtcggattcctcttgttcgatcttttgcagatataggcaagaaacattctgaccctcacttgcttgaaaggaatggtattttggcctctccccagtctgctcctggaaacttggacaatagtaaaagtggagaaattaaaggtaatggaagtggtggaagcagagaaaatagtactgttgacttcagcaaggttgatatgaatttcatgagaaaaattcctacgggtgctgaggcatccaacgtcctggtgggcgaagtagactttttggaaaggccaataattgcatttgtgagactggctcctgctgtcctccttacagggttgactgaggtccctgttccaaccaggtttttgtttttgttattgggtccagcgggcaaggcaccacagtaccatgaaattggacgatcaatagccactctcatgacagatgagattttccatgatgtagcttataaagcaaaagacagaaatgacctcttatctggaattgatgaatttttagatcaagtaactgtcctacctccaggagagtgggatccttctatacgcatagaaccaccaaaaagtgtcccttctcaggaaaagagaaagattcctgtgtttcacaatggatctacccccacactgggtgagactcctaaagaggccgctcatcatgctgggcctgagctacagaggactggacgagtgcaatagagtctctttttggagcatcattaactgggattgcctattcattgtttgctgggcaacctctaacaatattggggagcacaggtccagttctagtgtttgaaaaaattttatataaattctgcagagattatcaactttcttatctgtctttaagaaccagtattggtctgtggacttcttttttgtgcattgttttggttgcaacagatgcaagcagccttgtgtgttatattactcgatttacagaagaggcttttgcagcccttatttgcatcatattcatctacgaggctttggagaagctctttgatttaggagaaacatatgcatttaatatgcacaacaacttagataaactgaccagctactcatgtgtatgtactgaacctccaaaccccagcaatgaaactctagcacaatggaagaaagataatataacagcacacaatatttcctggagaaatcttactgtttctgaatgtaaaaaacttcgtggtgtattcttggggtcagcttgtggtcatcatggaccttatattccagatgtgctcttttggtgtgtcatcttgtttttcacaacattttttctgtcttcattcctcaagcaatttaagaccaagcgttactttcctaccaaggtgcgatcgacaatcagtgattttgctgtatttctcacaatagtaataatggttacaattgactaccttgtaggagttccatctcctaaacttcatgttcctgaaaaatttgagcctactcatccagagagagggtggatcataagcccactgggagataatccttggtggaccttattaatagctgctattcctgctttgctttgtaccattctcatctttatggatcaacaaatcacagctgtaattataaacagaaaggaacacaaattgaagaaaggagctggctatcaccttgatttgctcatggttggcgttatgttgggagtttgctctgtcatgggacttccatggtttgtggctgcaacagtgttgtcaataagtcatgtcaacagcttaaaagttgaatctgaatgttctgctccaggggaacaacccaagtttttgggaattcgtgaacagcgggttacagggctaatgatttttattctaatgggcctctctgtgttcatgacttcagtcctaaagtttattccaatgcctgttctgtatggtgttttcctttatatgggagtttcctcattaaaaggaatccagttatttgaccgtataaaattatttggaatgcctgctaagcatcagcctgatttgatatacctccgttatgtgccgctctggaaggtccatattttcacagtcattcagcttacttgtttggtccttttatgggtgataaaagtttcagctgctgcagtggtttttcccatgatggttcttgcattagtgtttgtgcgcaaactcatggacctgtgtttcacgaagagagaacttagttggcttgatgatcttatgccagaaagtaagaaaaagaaagaagatgacaaaaagaaaaaagagaaagaggaagctgaacggatgcttcaagatgatgatgatactgtgcaccttccatttgaagggggaagtctcttgcaaattccagtcaaggccctaaaatatagtcctgataaacctgtgagtgtgaaaataagttttgaagatgaaccaagaaagaaatacgtggatgctgaaacttcattatag

SEQ ID NO: 29175 - DNA, 3825 bp, Homo sapiens
  source 1..3825: mol_type = unassigned DNA
cctactaaagccagcccagcagtcgcagcgcgcacacgcacgccccgcgtctcccgcgcccggcgcccggctctccccacgcgcgcacacctcgcgcacggacgcacccacgtttgtcctcgcgcgccgggggctcggcggcggcggcaggggcagcggcagaagcaggcagaccgcgcggggcagtaccgtagcggccgtcacgggctggccggccggccatggaggctgatggggccggcgagcagatgagaccgctactcacccggggtcctgatgaagaagctgttgtggatcttggcaaaactagctcaactgtgaacaccaagtttgaaaaagaagaactagaaagtcatagagctgtatatattggtgttcacgtcccgtttagtaaagagagtcgtcggcgtcataggcatcgcggacacaaacatcaccaccggagaagaaaagataaagaatcagataaagaagatggacgggaatctccttcttatgatacaccatcccagagagttcagtttatccttggtactgaagatgatgatgaagaacatattccccatgatctcttcacggaaatggatgaactgtgttacagagatggagaagaatatgaatggaaagaaactgctagatggctgaaatttgaagaggatgttgaagatggcggtgaccgatggagtaaaccttatgtggcaactctctctttgcacagtctttttgaactaaggagttgcatcctcaatggaacagtcatgctggatatgagagcaagcactctagatgaaatagcagatatggtattagacaacatgatagcttctggccaattagacgagtccatacgagagaatgtcagagaagctcttctgaagagacatcatcatcagaatgagaaaagattcaccagtcggattcctcttgttcgatcttttgcagatataggggaaggcctttcagcctcccgccactctttgcgaacaggtctgtctgcctcaaacctttccttgagaggagaatcacctttatctcttcttcttggtcatcttcttccttcttcaagagctggaacccctgcaggctcaaggtgtacaaccccagtacccacccctcaaaacagtcctccttctagccctagcatcagccgcctgacctccagaagttcccaagagagtcagcgtcaggccccagaactactggtttcacctgccagtgatgatattcccacagtagtaattcatccgcctgaggaagacttagaagcagcgctgaaaggcgaggagcagaagaatgaggaaaatgttgacttaactccaggtattttggcctctccccagtctgctcctggaaacttggacaatagtaaaagtggagaaattaaaggtaatggaagtggtggaagcagagaaaatagtactgttgacttcagcaaggttgatatgaatttcatgagaaaaattcctacgggtgctgaggcatccaacgtcctggtgggcgaagtagactttttggaaaggccaataattgcatttgtgagactggctcctgctgtcctccttacagggttgactgaggtccctgttccaaccaggtttttgtttttgttattgggtccagcgggcaaggcaccacagtaccatgaaattggacgatcaatagccactctcatgacagatgagattttccatgatgtagcttataaagcaaaagacagaaatgacctcttatctggaattgatgaatttttagatcaagtaactgtcctacctccaggagagtgggatccttctatacgcatagaaccaccaaaaagtgtcccttctcaggaaaagagaaagattcctgtgtttcacaatggatctacccccacactgggtgagactcctaaagaggccgctcatcatgctgggcctgagctacagaggactggacgagtgcaatagagtctctttttggagcatcattaactgggattgcctattcattgtttgctgggcaacctctaacaatattggggagcacaggtccagttctagtgtttgaaaaaattttatataaattctgcagagattatcaactttcttatctgtctttaagaaccagtattggtctgtggacttcttttttgtgcattgttttggttgcaacagatgcaagcagccttgtgtgttatattactcgatttacagaagaggcttttgcagcccttatttgcatcatattcatctacgaggctttggagaagctctttgatttaggagaaacatatgcatttaatatgcacaacaacttagataaactgaccagctactcatgtgtatgtactgaacctccaaaccccagcaatgaaactctagcacaatggaagaaagataatataacagcacacaatatttcctggagaaatcttactgtttctgaatgtaaaaaacttcgtggtgtattcttggggtcagcttgtggtcatcatggaccttatattccagatgtgctcttttggtgtgtcatcttgtttttcacaacattttttctgtcttcattcctcaagcaatttaagaccaagcgttactttcctaccaaggtgcgatcgacaatcagtgattttgctgtatttctcacaatagtaataatggttacaattgactaccttgtaggagttccatctcctaaacttcatgttcctgaaaaatttgagcctactcatccagagagagggtggatcataagcccactgggagataatccttggtggaccttattaatagctgctattcctgctttgctttgtaccattctcatctttatggatcaacaaatcacagctgtaattataaacagaaaggaacacaaattgaagaaaggagctggctatcaccttgatttgctcatggttggcgttatgttgggagtttgctctgtcatgggacttccatggtttgtggctgcaacagtgttgtcaataagtcatgtcaacagcttaaaagttgaatctgaatgttctgctccaggggaacaacccaagtttttgggaattcgtgaacagcgggttacagggctaatgatttttattctaatgggcctctctgtgttcatgacttcagtcctaaagtttattccaatgcctgttctgtatggtgttttcctttatatgggagtttcctcattaaaaggaatccagttatttgaccgtataaaattatttggaatgcctgctaagcatcagcctgatttgatatacctccgttatgtgccgctctggaaggtccatattttcacagtcattcagcttacttgtttggtccttttatgggtgataaaagtttcagctgctgcagtggtttttcccatgatggttcttgcattagtgtttgtgcgcaaactcatggacctgtgtttcacgaagagagaacttagttggcttgatgatcttatgccagaaagtaagaaaaagaaagaagatgacaaaaagaaaaaagagaaagaggaagctgaacggatgcttcaagatgatgatgatactgtgcaccttccatttgaagggggaagtctcttgcaaattccagtcaaggccctaaaatatagtcctgataaacctgtgagtgtgaaaataagttttgaagatgaaccaagaaagaaatacgtggatgctgaaacttcattatagaattgaaccaagaggcattatacatatagatatatacatatgtaatgtgtgcgtatcatgtcactatatataagaatattgtatgtcatgctgtttatgtgtgactaccgggtttttaaaagtagtgtctggagtttgtaatgagcaccgtggagact

SEQ ID NO: 29176 - DNA, 4120 bp, Homo sapiens
  source 1..4120: mol_type = unassigned DNA
cctactaaagccagcccagcagtcgcagcgcgcacacgcacgccccgcgtctcccgcgcccggcgcccggctctccccacgcgcgcacacctcgcgcacggacgcacccacgtttgtcctcgcgcgccgggggctcggcggcggcggcaggggcagcggcagaagcaggcagaccgcgcggggcagtaccgtagcggccgtcacgggctggccggccggccatggaggctgatggggccggcgagcagatgagaccgctactcacccgggtaacgagcaggggtcctgatgaagaagctgttgtggatcttggcaaaactagctcaactgtgaacaccaagtttgaaaaagaagaactagaaagtcatagagctgtatatattggtgttcacgtcccgtttagtaaagagagtcgtcggcgtcataggcatcgcggacacaaacatcaccaccggagaagaaaagataaagaatcagataaagaagatggacgggaatctccttcttatgatacaccatcccagagagttcagtttatccttggtactgaagatgatgatgaagaacatattccccatgatctcttcacggaaatggatgaactgtgttacagagatggagaagaatatgaatggaaagaaactgctagatggctgaaatttgaagaggatgttgaagatggcggtgaccgatggagtaaaccttatgtggcaactctctctttgcacagtctttttgaactaaggagttgcatcctcaatggaacagtcatgctggatatgagagcaagcactctagatgaaatagcagatatggtattagacaacatgatagcttctggccaattagacgagtccatacgagagaatgtcagagaagctcttctgaagagacatcatcatcagaatgagaaaagattcaccagtcggattcctcttgttcgatcttttgcagatataggggaaggcctttcagcctcccgccactctttgcgaacaggtctgtctgcctcaaacctttccttgagaggagaatcacctttatctcttcttcttggtcatcttcttccttcttcaagagctggaacccctgcaggctcaaggtgtacaaccccagtacccacccctcaaaacagtcctccttctagccctagcatcagccgcctgacctccagaagttcccaagagagtcagcgtcaggccccagaactactggtttcacctgccagtgatgatattcccacagtagtaattcatccgcctgaggaagacttagaagcagcgctgaaaggcgaggagcagaagaatgaggaaaatgttgacttaactccaggtattttggcctctccccagtctgctcctggaaacttggacaatagtaaaagtggagaaattaaaggtaatggaagtggtggaagcagagaaaatagtactgttgacttcagcaaggttgatatgaatttcatgagaaaaattcctacgggtgctgaggcatccaacgtcctggtgggcgaagtagactttttggaaaggccaataattgcatttgtgagactggctcctgctgtcctccttacagggttgactgaggtccctgttccaaccaggtttttgtttttgttattgggtccagcgggcaaggcaccacagtaccatgaaattggacgatcaatagccactctcatgacagatgagattttccatgatgtagcttataaagcaaaagacagaaatgacctcttatctggaattgatgaatttttagatcaagtaactgtcctacctccaggagagtgggatccttctatacgcatagaaccaccaaaaagtgtcccttctcaggaaaagagaaagattcctgtgtttcacaatggatctacccccacactgggtgagactcctaaagaggccgctcatcatgctgggcctgagctacagaggactggacggctttttggtggtttgatacttgacatcaaaaggaaagcaccttttttcttgagtgacttcaaggatgcattaagcctgcagtgcctggcctcgattcttttcctatactgtgcctgtatgtctcctgtaatcacttttggagggctgcttggagaagctacagaaggcagaataagtgcaatagagtctctttttggagcatcattaactgggattgcctattcattgtttgctgggcaacctctaacaatattggggagcacaggtccagttctagtgtttgaaaaaattttatataaattctgcagagattatcaactttcttatctgtctttaagaaccagtattggtctgtggacttcttttttgtgcattgttttggttgcaacagatgcaagcagccttgtgtgttatattactcgatttacagaagaggcttttgcagcccttatttgcatcatattcatctacgaggctttggagaagctctttgatttaggagaaacatatgcatttaatatgcacaacaacttagataaactgaccagctactcatgtgtatgtactgaacctccaaaccccagcaatgaaactctagcacaatggaagaaagataatataacagcacacaatatttcctggagaaatcttactgtttctgaatgtaaaaaacttcgtggtgtattcttggggtcagcttgtggtcatcatggaccttatattccagatgtgctcttttggtgtgtcatcttgtttttcacaacattttttctgtcttcattcctcaagcaatttaagaccaagcgttactttcctaccaaggtgcgatcgacaatcagtgattttgctgtatttctcacaatagtaataatggttacaattgactaccttgtaggagttccatctcctaaacttcatgttcctgaaaaatttgagcctactcatccagagagagggtggatcataagcccactgggagataatccttggtggaccttattaatagctgctattcctgctttgctttgtaccattctcatctttatggatcaacaaatcacagctgtaattataaacagaaaggaacacaaattgaagaaaggagctggctatcaccttgatttgctcatggttggcgttatgttgggagtttgctctgtcatgggacttccatggtttgtggctgcaacagtgttgtcaataagtcatgtcaacagcttaaaagttgaatctgaatgttctgctccaggggaacaacccaagtttttgggaattcgtgaacagcgggttacagggctaatgatttttattctaatgggcctctctgtgttcatgacttcagtcctaaagtttattccaatgcctgttctgtatggtgttttcctttatatgggagtttcctcattaaaaggaatccagttatttgaccgtataaaattatttggaatgcctgctaagcatcagcctgatttgatatacctccgttatgtgccgctctggaaggtccatattttcacagtcattcagcttacttgtttggtccttttatgggtgataaaagtttcagctgctgcagtggtttttcccatgatggttcttgcattagtgtttgtgcgcaaactcatggacctgtgtttcacgaagagagaacttagttggcttgatgatcttatgccagaaagtaagaaaaagaaagaagatgacaaaaagaaaaaagagaaagaggaagctgaacggatgcttcaagatgatgatgatactgtgcaccttccatttgaagggggaagtctcttgcaaattccagtcaaggccctaaaatatagtgttgatccctcaattgttaacatatcagatgaaatggccaaaactgcacagtggaaggcactttccatgaatactgagaatgccaaagtaaccagatctaacatgagtcctgataaacctgtgagtgtgaaaataagttttgaagatgaaccaagaaagaaatacgtggatgctgaaacttcattatagaattgaaccaagaggcattatacatatagatatatacatatgtaatgtgtgcgtatcatgtcactatatataagaatattgtatgtcatgctgtttatgtgtgactaccgggtttttaaaagtagtgtctggagtttgtaatgagcaccgtggagact

SEQ ID NO: 29177 - DNA, 4159 bp, Homo sapiens
  source 1..4159: mol_type = unassigned DNA
cctactaaagccagcccagcagtcgcagcgcgcacacgcacgccccgcgtctcccgcgcccggcgcccggctctccccacgcgcgcacacctcgcgcacggacgcacccacgtttgtcctcgcgcgccgggggctcggcggcggcggcaggggcagcggcagaagcaggcagaccgcgcggggcagtaccgtagcggccgtcacgggctggccggccggccatggaggctgatggggccggcgagcagatgagaccgctactcacccgggtaacgagcaggggtcctgatgaagaagctgttgtggatcttggcaaaactagctcaactgtgaacaccaagtttgaaaaagaagaactagaaagtcatagagctgtatatattggtgttcacgtcccgtttagtaaagagagtcgtcggcgtcataggcatcgcggacacaaacatcaccaccggagaagaaaagataaagaatcagataaagaagatggacgggaatctccttcttatgatacaccatcccagagagttcagtttatccttggtactgaagatgatgatgaagaacatattccccatgatctcttcacggaaatggatgaactgtgttacagagatggagaagaatatgaatggaaagaaactgctagatggctgaaatttgaagaggatgttgaagatggcggtgaccgatggagtaaaccttatgtggcaactctctctttgcacagtctttttgaactaaggagttgcatcctcaatggaacagtcatgctggatatgagagcaagcactctagatgaaatagcagatatggtattagacaacatgatagcttctggccaattagacgagtccatacgagagaatgtcagagaagctcttctgaagagacatcatcatcagaatgagaaaagattcaccagtcggattcctcttgttcgatcttttgcagatataggcaagaaacattctgaccctcacttgcttgaaaggaatggggaaggcctttcagcctcccgccactctttgcgaacaggtctgtctgcctcaaacctttccttgagaggagaatcacctttatctcttcttcttggtcatcttcttccttcttcaagagctggaacccctgcaggctcaaggtgtacaaccccagtacccacccctcaaaacagtcctccttctagccctagcatcagccgcctgacctccagaagttcccaagagagtcagcgtcaggccccagaactactggtttcacctgccagtgatgatattcccacagtagtaattcatccgcctgaggaagacttagaagcagcgctgaaaggcgaggagcagaagaatgaggaaaatgttgacttaactccaggtattttggcctctccccagtctgctcctggaaacttggacaatagtaaaagtggagaaattaaaggtaatggaagtggtggaagcagagaaaatagtactgttgacttcagcaaggttgatatgaatttcatgagaaaaattcctacgggtgctgaggcatccaacgtcctggtgggcgaagtagactttttggaaaggccaataattgcatttgtgagactggctcctgctgtcctccttacagggttgactgaggtccctgttccaaccaggtttttgtttttgttattgggtccagcgggcaaggcaccacagtaccatgaaattggacgatcaatagccactctcatgacagatgagattttccatgatgtagcttataaagcaaaagacagaaatgacctcttatctggaattgatgaatttttagatcaagtaactgtcctacctccaggagagtgggatccttctatacgcatagaaccaccaaaaagtgtcccttctcaggaaaagagaaagattcctgtgtttcacaatggatctacccccacactgggtgagactcctaaagaggccgctcatcatgctgggcctgagctacagaggactggacggctttttggtggtttgatacttgacatcaaaaggaaagcaccttttttcttgagtgacttcaaggatgcattaagcctgcagtgcctggcctcgattcttttcctatactgtgcctgtatgtctcctgtaatcacttttggagggctgcttggagaagctacagaaggcagaataagtgcaatagagtctctttttggagcatcattaactgggattgcctattcattgtttgctgggcaacctctaacaatattggggagcacaggtccagttctagtgtttgaaaaaattttatataaattctgcagagattatcaactttcttatctgtctttaagaaccagtattggtctgtggacttcttttttgtgcattgttttggttgcaacagatgcaagcagccttgtgtgttatattactcgatttacagaagaggcttttgcagcccttatttgcatcatattcatctacgaggctttggagaagctctttgatttaggagaaacatatgcatttaatatgcacaacaacttagataaactgaccagctactcatgtgtatgtactgaacctccaaaccccagcaatgaaactctagcacaatggaagaaagataatataacagcacacaatatttcctggagaaatcttactgtttctgaatgtaaaaaacttcgtggtgtattcttggggtcagcttgtggtcatcatggaccttatattccagatgtgctcttttggtgtgtcatcttgtttttcacaacattttttctgtcttcattcctcaagcaatttaagaccaagcgttactttcctaccaaggtgcgatcgacaatcagtgattttgctgtatttctcacaatagtaataatggttacaattgactaccttgtaggagttccatctcctaaacttcatgttcctgaaaaatttgagcctactcatccagagagagggtggatcataagcccactgggagataatccttggtggaccttattaatagctgctattcctgctttgctttgtaccattctcatctttatggatcaacaaatcacagctgtaattataaacagaaaggaacacaaattgaagaaaggagctggctatcaccttgatttgctcatggttggcgttatgttgggagtttgctctgtcatgggacttccatggtttgtggctgcaacagtgttgtcaataagtcatgtcaacagcttaaaagttgaatctgaatgttctgctccaggggaacaacccaagtttttgggaattcgtgaacagcgggttacagggctaatgatttttattctaatgggcctctctgtgttcatgacttcagtcctaaagtttattccaatgcctgttctgtatggtgttttcctttatatgggagtttcctcattaaaaggaatccagttatttgaccgtataaaattatttggaatgcctgctaagcatcagcctgatttgatatacctccgttatgtgccgctctggaaggtccatattttcacagtcattcagcttacttgtttggtccttttatgggtgataaaagtttcagctgctgcagtggtttttcccatgatggttcttgcattagtgtttgtgcgcaaactcatggacctgtgtttcacgaagagagaacttagttggcttgatgatcttatgccagaaagtaagaaaaagaaagaagatgacaaaaagaaaaaagagaaagaggaagctgaacggatgcttcaagatgatgatgatactgtgcaccttccatttgaagggggaagtctcttgcaaattccagtcaaggccctaaaatatagtgttgatccctcaattgttaacatatcagatgaaatggccaaaactgcacagtggaaggcactttccatgaatactgagaatgccaaagtaaccagatctaacatgagtcctgataaacctgtgagtgtgaaaataagttttgaagatgaaccaagaaagaaatacgtggatgctgaaacttcattatagaattgaaccaagaggcattatacatatagatatatacatatgtaatgtgtgcgtatcatgtcactatatataagaatattgtatgtcatgctgtttatgtgtgactaccgggtttttaaaagtagtgtctggagtttgtaatgagcaccgtggagact

SEQ ID NO: 29178 - DNA, 3775 bp, Homo sapiens
  source 1..3775: mol_type = unassigned DNA
cctactaaagccagcccagcagtcgcagcgcgcacacgcacgccccgcgtctcccgcgcccggcgcccggctctccccacgcgcgcacacctcgcgcacggacgcacccacgtttgtcctcgcgcgccgggggctcggcggcggcggcaggggcagcggcagaagcaggcagaccgcgcggggcagtaccgtagcggccgtcacgggctggccggccggccatggaggctgatggggccggcgagcagatgagaccgctactcacccggggtcctgatgaagaagctgttgtggatcttggcaaaactagctcaactgtgaacaccaagtttgaaaaagaagaactagaaagtcatagagctgtatatattggtgttcacgtcccgtttagtaaagagagtcgtcggcgtcataggcatcgcggacacaaacatcaccaccggagaagaaaagataaagaatcagataaagaagatggacgggaatctccttcttatgatacaccatcccagagagttcagtttatccttggtactgaagatgatgatgaagaacatattccccatgatctcttcacggaaatggatgaactgtgttacagagatggagaagaatatgaatggaaagaaactgctagatggctgaaatttgaagaggatgttgaagatggcggtgaccgatggagtaaaccttatgtggcaactctctctttgcacagtctttttgaactaaggagttgcatcctcaatggaacagtcatgctggatatgagagcaagcactctagatgaaatagcagatatggtattagacaacatgatagcttctggccaattagacgagtccatacgagagaatgtcagagaagctcttctgaagagacatcatcatcagaatgagaaaagattcaccagtcggattcctcttgttcgatcttttgcagatataggcaagaaacattctgaccctcacttgcttgaaaggaatggtattttggcctctccccagtctgctcctggaaacttggacaatagtaaaagtggagaaattaaaggtaatggaagtggtggaagcagagaaaatagtactgttgacttcagcaaggttgatatgaatttcatgagaaaaattcctacgggtgctgaggcatccaacgtcctggtgggcgaagtagactttttggaaaggccaataattgcatttgtgagactggctcctgctgtcctccttacagggttgactgaggtccctgttccaaccaggtttttgtttttgttattgggtccagcgggcaaggcaccacagtaccatgaaattggacgatcaatagccactctcatgacagatgagattttccatgatgtagcttataaagcaaaagacagaaatgacctcttatctggaattgatgaatttttagatcaagtaactgtcctacctccaggagagtgggatccttctatacgcatagaaccaccaaaaagtgtcccttctcaggaaaagagaaagattcctgtgtttcacaatggatctacccccacactgggtgagactcctaaagaggccgctcatcatgctgggcctgagctacagaggactggacggctttttggtggtttgatacttgacatcaaaaggaaagcaccttttttcttgagtgacttcaaggatgcattaagcctgcagtgcctggcctcgattcttttcctatactgtgcctgtatgtctcctgtaatcacttttggagggctgcttggagaagctacagaaggcagaataagtgcaatagagtctctttttggagcatcattaactgggattgcctattcattgtttgctgggcaacctctaacaatattggggagcacaggtccagttctagtgtttgaaaaaattttatataaattctgcagagattatcaactttcttatctgtctttaagaaccagtattggtctgtggacttcttttttgtgcattgttttggttgcaacagatgcaagcagccttgtgtgttatattactcgatttacagaagaggcttttgcagcccttatttgcatcatattcatctacgaggctttggagaagctctttgatttaggagaaacatatgcatttaatatgcacaacaacttagataaactgaccagctactcatgtgtatgtactgaacctccaaaccccagcaatgaaactctagcacaatggaagaaagataatataacagcacacaatatttcctggagaaatcttactgtttctgaatgtaaaaaacttcgtggtgtattcttggggtcagcttgtggtcatcatggaccttatattccagatgtgctcttttggtgtgtcatcttgtttttcacaacattttttctgtcttcattcctcaagcaatttaagaccaagcgttactttcctaccaaggtgcgatcgacaatcagtgattttgctgtatttctcacaatagtaataatggttacaattgactaccttgtaggagttccatctcctaaacttcatgttcctgaaaaatttgagcctactcatccagagagagggtggatcataagcccactgggagataatccttggtggaccttattaatagctgctattcctgctttgctttgtaccattctcatctttatggatcaacaaatcacagctgtaattataaacagaaaggaacacaaattgaagaaaggagctggctatcaccttgatttgctcatggttggcgttatgttgggagtttgctctgtcatgggacttccatggtttgtggctgcaacagtgttgtcaataagtcatgtcaacagcttaaaagttgaatctgaatgttctgctccaggggaacaacccaagtttttgggaattcgtgaacagcgggttacagggctaatgatttttattctaatgggcctctctgtgttcatgacttcagtcctaaagtttattccaatgcctgttctgtatggtgttttcctttatatgggagtttcctcattaaaaggaatccagttatttgaccgtataaaattatttggaatgcctgctaagcatcagcctgatttgatatacctccgttatgtgccgctctggaaggtccatattttcacagtcattcagcttacttgtttggtccttttatgggtgataaaagtttcagctgctgcagtggtttttcccatgatggttcttgcattagtgtttgtgcgcaaactcatggacctgtgtttcacgaagagagaacttagttggcttgatgatcttatgccagaaagtaagaaaaagaaagaagatgacaaaaagaaaaaagagaaagaggaagctgaacggatgcttcaagatgatgatgatactgtgcaccttccatttgaagggggaagtctcttgcaaattccagtcaaggccctaaaatatagtgttgatccctcaattgttaacatatcagatgaaatggccaaaactgcacagtggaaggcactttccatgaatactgagaatgccaaagtaaccagatctaacatgagtcctgataaacctgtgagtgtgaaaataagttttgaagatgaaccaagaaagaaatacgtggatgctgaaacttcattatagaattgaaccaagaggcattatacatatagatatatacatatgtaatgtgtgcgtatcatgtcactatatataagaatattgtatgtcatgctgtttatgtgtgactaccgggtttttaaaagtagtgtctggagtttgtaatgagcaccgtggagact

SEQ ID NO: 29179 - DNA, 3600 bp, Homo sapiens
  source 1..3600: mol_type = unassigned DNA
cctactaaagccagcccagcagtcgcagcgcgcacacgcacgccccgcgtctcccgcgcccggcgcccggctctccccacgcgcgcacacctcgcgcacggacgcacccacgtttgtcctcgcgcgccgggggctcggcggcggcggcaggggcagcggcagaagcaggcagaccgcgcggggcagtaccgtagcggccgtcacgggctggccggccggccatggaggctgatggggccggcgagcagatgagaccgctactcacccggggtcctgatgaagaagctgttgtggatcttggcaaaactagctcaactgtgaacaccaagtttgaaaaagaagaactagaaagtcatagagctgtatatattggtgttcacgtcccgtttagtaaagagagtcgtcggcgtcataggcatcgcggacacaaacatcaccaccggagaagaaaagataaagaatcagataaagaagatggacgggaatctccttcttatgatacaccatcccagagagttcagtttatccttggtactgaagatgatgatgaagaacatattccccatgatctcttcacggaaatggatgaactgtgttacagagatggagaagaatatgaatggaaagaaactgctagatggctgaaatttgaagaggatgttgaagatggcggtgaccgatggagtaaaccttatgtggcaactctctctttgcacagtctttttgaactaaggagttgcatcctcaatggaacagtcatgctggatatgagagcaagcactctagatgaaatagcagatatggtattagacaacatgatagcttctggccaattagacgagtccatacgagagaatgtcagagaagctcttctgaagagacatcatcatcagaatgagaaaagattcaccagtcggattcctcttgttcgatcttttgcagatataggcaagaaacattctgaccctcacttgcttgaaaggaatggtattttggcctctccccagtctgctcctggaaacttggacaatagtaaaagtggagaaattaaaggtaatggaagtggtggaagcagagaaaatagtactgttgacttcagcaaggttgatatgaatttcatgagaaaaattcctacgggtgctgaggcatccaacgtcctggtgggcgaagtagactttttggaaaggccaataattgcatttgtgagactggctcctgctgtcctccttacagggttgactgaggtccctgttccaaccaggtttttgtttttgttattgggtccagcgggcaaggcaccacagtaccatgaaattggacgatcaatagccactctcatgacagatgagattttccatgatgtagcttataaagcaaaagacagaaatgacctcttatctggaattgatgaatttttagatcaagtaactgtcctacctccaggagagtgggatccttctatacgcatagaaccaccaaaaagtgtcccttctcaggaaaagagaaagattcctgtgtttcacaatggatctacccccacactgggtgagactcctaaagaggccgctcatcatgctgggcctgagctacagaggactggacgagtgcaatagagtctctttttggagcatcattaactgggattgcctattcattgtttgctgggcaacctctaacaatattggggagcacaggtccagttctagtgtttgaaaaaattttatataaattctgcagagattatcaactttcttatctgtctttaagaaccagtattggtctgtggacttcttttttgtgcattgttttggttgcaacagatgcaagcagccttgtgtgttatattactcgatttacagaagaggcttttgcagcccttatttgcatcatattcatctacgaggctttggagaagctctttgatttaggagaaacatatgcatttaatatgcacaacaacttagataaactgaccagctactcatgtgtatgtactgaacctccaaaccccagcaatgaaactctagcacaatggaagaaagataatataacagcacacaatatttcctggagaaatcttactgtttctgaatgtaaaaaacttcgtggtgtattcttggggtcagcttgtggtcatcatggaccttatattccagatgtgctcttttggtgtgtcatcttgtttttcacaacattttttctgtcttcattcctcaagcaatttaagaccaagcgttactttcctaccaaggtgcgatcgacaatcagtgattttgctgtatttctcacaatagtaataatggttacaattgactaccttgtaggagttccatctcctaaacttcatgttcctgaaaaatttgagcctactcatccagagagagggtggatcataagcccactgggagataatccttggtggaccttattaatagctgctattcctgctttgctttgtaccattctcatctttatggatcaacaaatcacagctgtaattataaacagaaaggaacacaaattgaagaaaggagctggctatcaccttgatttgctcatggttggcgttatgttgggagtttgctctgtcatgggacttccatggtttgtggctgcaacagtgttgtcaataagtcatgtcaacagcttaaaagttgaatctgaatgttctgctccaggggaacaacccaagtttttgggaattcgtgaacagcgggttacagggctaatgatttttattctaatgggcctctctgtgttcatgacttcagtcctaaagtttattccaatgcctgttctgtatggtgttttcctttatatgggagtttcctcattaaaaggaatccagttatttgaccgtataaaattatttggaatgcctgctaagcatcagcctgatttgatatacctccgttatgtgccgctctggaaggtccatattttcacagtcattcagcttacttgtttggtccttttatgggtgataaaagtttcagctgctgcagtggtttttcccatgatggttcttgcattagtgtttgtgcgcaaactcatggacctgtgtttcacgaagagagaacttagttggcttgatgatcttatgccagaaagtaagaaaaagaaagaagatgacaaaaagaaaaaagagaaagaggaagctgaacggatgcttcaagatgatgatgatactgtgcaccttccatttgaagggggaagtctcttgcaaattccagtcaaggccctaaaatatagtgttgatccctcaattgttaacatatcagatgaaatggccaaaactgcacagtggaaggcactttccatgaatactgagaatgccaaagtaaccagatctaacatgagtcctgataaacctgtgagtgtgaaaataagttttgaagatgaaccaagaaagaaatacgtggatgctgaaacttcattatagaattgaaccaagaggcattatacatatagatatatacatatgtaatgtgtgcgtatcatgtcactatatataagaatattgtatgtcatgctgtttatgtgtgactaccgggtttttaaaagtagtgtctggagtttgtaatgagcaccgtggagact

SEQ ID NO: 29180 - DNA, 3834 bp, Homo sapiens
  source 1..3834: mol_type = unassigned DNA
tagttcggctccgccatgccggccgccgggagtaacgagccggacggcgtcctcagctatcagagaccagatgaagaagctgtggtggatcagggtgggaccagtacaattctcaacattcactatgaaaaagaagagctggaaggtcacagaactctgtatgtgggagttcggatgccgcttggccggcagagccatcggcatcaccgcactcatggccagaagcaccggagacgagggcggggcaaaggagccagccagggggaggaaggcctggaagccctggcccacgacacaccatctcagcgtgttcagttcattcttggcaccgaggaagatgaagagcatgtgcctcatgagctgtttacagagctggatgagatctgtatgaaagagggagaagatgctgagtggaaggaaacagccaggtggctgaagtttgaagaagatgttgaagatgggggagaacgctggagcaagccttatgtggcaaccctttcattgcacagcctgtttgagctaaggagctgccttattaatggaacagtcctcctggatatgcatgcaaatagcatagaagaaatttcagacctgatcctggatcagcaagaactgtccagtgacctgaatgacagcatgagggttaaagtgcgggaagcccttctcaaaaagcatcatcatcagaatgaaaagaagagaaacaacctcattcccattgttcgctcctttgctgaggttggcaagaagcagtctgatcctcatttgatggataaacatggtcaaaccgtgtctcctcagtctgttccaactacaaatcttgaagtaaaaaatggagtgaattgtgaacatagtcctgtggatttaagcaaggtagaccttcatttcatgaaaaaaattcctactggggccgaggcctccaatgtcctggttggagaggtggatattttggaccgtcccattgttgcctttgtgaggctgtctccagctgttcttctctcaggcctaacagaagtgccaatcccaacaagatttttgtttatcttattgggtccagtagggaaaggtcagcagtaccatgagattggcagatccatggccaccatcatgacagatgagatttttcatgacgtagcatataaggcaaaagagcgagatgatctcctggcggggattgatgagttcctagaccaggtgacggtgctccctccaggagagtgggatccctccattagaattgagccacccaaaaatgtcccttcccaggagaaaaggaaaatgcctggagttccaaatggaaatgtttgccacatagaacaggaaccacatgggggtcacagtgggccagaacttcagcgcactgggcggctatttgggggcttggtgctggacatcaagcggaaggccccctggtactggagcgactaccgagatgcactcagcttacagtgtttggcttcctttctgttcctgtactgtgcctgcatgtcacctgtcatcacctttgggggactgcttggagaagccactgagggacgcataagtgcaattgaatccttgtttggagcttccatgactgggattgcttattccttgtttgcgggacaggctctcaccatcctgggaagtactggaccagtgcttgtgtttgaaaagattttgttcaaattctgcaaagactatgctctttcatacctctccctgcgagcttgtattggactgtggaccgctttcctgtgtattgtccttgtggcaactgatgccagttcccttgtctgctacattacccgtttcactgaagaagcatttgcctccctaatttgcattattttcatctatgaagcaatagaaaaactgattcacctggcagagacctaccccatccacatgcacagccagctggaccaccttagcctctattactgcaggtgtactctgccagagaatccaaacaatcacaccctccagtactggaaggaccacaacatcgtgacagcagaagtccactgggctaacctgactgtcagtgaatgccaggagatgcatggagagttcatgggatctgcgtgcggccatcatggaccctacactcctgatgtcctcttttggtcctgtattctctttttcaccaccttcatcctctcaagcaccttaaagacgtttaagacgagccgttatttcccaaccagagtacgctccatggtgagtgactttgctgttttcctcactatcttcacaatggtgattattgattttttgattggagtcccatcaccaaagcttcaagttcccagtgtgttcaagccaacaagggatgatcgcggatggattattaatcccattggccccaatccctggtggactgtgatagctgcaattatcccagctcttctctgtactatcttgatattcatggatcagcagatcacagccgtcattattaacaggaaggaacataagctcaagaaaggctgtggctaccacctggacctactgatggtggccatcatgctgggtgtctgctccatcatgggcctgccctggtttgtagctgcaactgtcttgtccatcacacatgtgaacagcctcaagctagaatctgaatgctctgctcctggagaacagcccaagttcctgggcatccgagaacagagagtgacaggccttatgatctttgtgctgatgggctgctcagtcttcatgacggctatcttaaagtttattccaatgccagtactctacggagttttcctttacatgggagtttcttcactacagggaattcagttctttgatcgtctaaagctctttgggatgcccgcaaagcaccagccagatttcatctacctgcggcatgtgccgctgcgcaaagtgcacctcttcaccctcatccagttgacctgtctcgtcctgctctgggtcatcaaggcatctccagctgccattgttttcccaatgatggttttggccttggtctttgtcaggaaagtcatggatctctgtttctctaagcgagagctgagctggctagatgatctcatgcctgaaagcaaaaagaagaagttggatgatgccaaaaagaaggccaaggaggaagaggtcatagtccttgcaccaactgtatacctgggggcctcaaattacagaacataggaagggtcatgtgaaaagtcagcatgtctggaatcccgagggttatatttaggagctgggaagattacccccaaagatgttctcagctaagaatggattagggattcttgcttctgtctgttcttaatttttgggtttgacaaccacttattttttcctttgtttacaatctactcaccaggctcatacctacaatgtgaacatacagtatgcccttattagcagattcaatggctcacattctttcaaaaggtctaatttgacaaatacataagacccattatttcctagaatgtttgtaatatatctaattgcaaatggtgctgtggttggcaccatgcaaagataacttgcataggactttctgtcttttttcatttccctcagcacttggcatcttgtcatctacacaatggaccctcaataaatggcctatatgtgcaaagaaagaatgtgtagcaaatgaaaataccagaccaagaaatgagtgagctgggaagtgtttccaaatacagttagtgcctaaaatagtgtcctttgaaaaaacttttaaaagacttttttttaggccaggcataatgggttatccctgtaattccagggcttttgggagttgaagctggaggattacttgaggccagaagtttgagactagcctaggcaatataatgagaccctgtctct

SEQ ID NO: 29181 - DNA, 3900 bp, Homo sapiens
  source 1..3900: mol_type = unassigned DNA
atgttcaacaagaacaacagcaacaaactcagaagcactcctcgctaccgccggggagacccaggatacctaaactttactgagttggggccactcaagcctgaacagaaggatcagtggagccaacatagaccagatgaagaagctgtggtggatcagggtgggaccagtacaattctcaacattcactatgaaaaagaagagctggaaggtcacagaactctgtatgtgggagttcggatgccgcttggccggcagagccatcggcatcaccgcactcatggccagaagcaccggagacgagggcggggcaaaggagccagccagggggaggaaggcctggaagccctggcccacgacacaccatctcagcgtgttcagttcattcttggcaccgaggaagatgaagagcatgtgcctcatgagctgtttacagagctggatgagatctgtatgaaagagggagaagatgctgagtggaaggaaacagccaggtggctgaagtttgaagaagatgttgaagatgggggagaacgctggagcaagccttatgtggcaaccctttcattgcacagcctgtttgagctaaggagctgccttattaatggaacagtcctcctggatatgcatgcaaatagcatagaagaaatttcagacctgatcctggatcagcaagaactgtccagtgacctgaatgacagcatgagggttaaagtgcgggaagcccttctcaaaaagcatcatcatcagaatgaaaagaagagaaacaacctcattcccattgttcgctcctttgctgaggttggcaagaagcagtctgatcctcatttgatggataaacatggtcaaaccgtgtctcctcagtctgttccaactacaaatcttgaagtaaaaaatggagtgaattgtgaacatagtcctgtggatttaagcaaggtagaccttcatttcatgaaaaaaattcctactggggccgaggcctccaatgtcctggttggagaggtggatattttggaccgtcccattgttgcctttgtgaggctgtctccagctgttcttctctcaggcctaacagaagtgccaatcccaacaagatttttgtttatcttattgggtccagtagggaaaggtcagcagtaccatgagattggcagatccatggccaccatcatgacagatgagatttttcatgacgtagcatataaggcaaaagagcgagatgatctcctggcggggattgatgagttcctagaccaggtgacggtgctccctccaggagagtgggatccctccattagaattgagccacccaaaaatgtcccttcccaggagaaaaggaaaatgcctggagttccaaatggaaatgtttgccacatagaacaggaaccacatgggggtcacagtgggccagaacttcagcgcactgggcggctatttgggggcttggtgctggacatcaagcggaaggccccctggtactggagcgactaccgagatgcactcagcttacagtgtttggcttcctttctgttcctgtactgtgcctgcatgtcacctgtcatcacctttgggggactgcttggagaagccactgagggacgcataagtgcaattgaatccttgtttggagcttccatgactgggattgcttattccttgtttgcgggacaggctctcaccatcctgggaagtactggaccagtgcttgtgtttgaaaagattttgttcaaattctgcaaagactatgctctttcatacctctccctgcgagcttgtattggactgtggaccgctttcctgtgtattgtccttgtggcaactgatgccagttcccttgtctgctacattacccgtttcactgaagaagcatttgcctccctaatttgcattattttcatctatgaagcaatagaaaaactgattcacctggcagagacctaccccatccacatgcacagccagctggaccaccttagcctctattactgcaggtgtactctgccagagaatccaaacaatcacaccctccagtactggaaggaccacaacatcgtgacagcagaagtccactgggctaacctgactgtcagtgaatgccaggagatgcatggagagttcatgggatctgcgtgcggccatcatggaccctacactcctgatgtcctcttttggtcctgtattctctttttcaccaccttcatcctctcaagcaccttaaagacgtttaagacgagccgttatttcccaaccagagtacgctccatggtgagtgactttgctgttttcctcactatcttcacaatggtgattattgattttttgattggagtcccatcaccaaagcttcaagttcccagtgtgttcaagccaacaagggatgatcgcggatggattattaatcccattggccccaatccctggtggactgtgatagctgcaattatcccagctcttctctgtactatcttgatattcatggatcagcagatcacagccgtcattattaacaggaaggaacataagctcaagaaaggctgtggctaccacctggacctactgatggtggccatcatgctgggtgtctgctccatcatgggcctgccctggtttgtagctgcaactgtcttgtccatcacacatgtgaacagcctcaagctagaatctgaatgctctgctcctggagaacagcccaagttcctgggcatccgagaacagagagtgacaggccttatgatctttgtgctgatgggctgctcagtcttcatgacggctatcttaaagtttattccaatgccagtactctacggagttttcctttacatgggagtttcttcactacagggaattcagttctttgatcgtctaaagctctttgggatgcccgcaaagcaccagccagatttcatctacctgcggcatgtgccgctgcgcaaagtgcacctcttcaccctcatccagttgacctgtctcgtcctgctctgggtcatcaaggcatctccagctgccattgttttcccaatgatggttttggccttggtctttgtcaggaaagtcatggatctctgtttctctaagcgagagctgagctggctagatgatctcatgcctgaaagcaaaaagaagaagttggatgatgccaaaaagaaggccaaggaggaagaggtcatagtccttgcaccaactgtatacctgggggcctcaaattacagaacataggaagggtcatgtgaaaagtcagcatgtctggaatcccgagggttatatttaggagctgggaagattacccccaaagatgttctcagctaagaatggattagggattcttgcttctgtctgttcttaatttttgggtttgacaaccacttattttttcctttgtttacaatctactcaccaggctcatacctacaatgtgaacatacagtatgcccttattagcagattcaatggctcacattctttcaaaaggtctaatttgacaaatacataagacccattatttcctagaatgtttgtaatatatctaattgcaaatggtgctgtggttggcaccatgcaaagataacttgcataggactttctgtcttttttcatttccctcagcacttggcatcttgtcatctacacaatggaccctcaataaatggcctatatgtgcaaagaaagaatgtgtagcaaatgaaaataccagaccaagaaatgagtgagctgggaagtgtttccaaatacagttagtgcctaaaatagtgtcctttgaaaaaacttttaaaagacttttttttaggccaggcataatgggttatccctgtaattccagggcttttgggagttgaagctggaggattacttgaggccagaagtttgagactagcctaggcaatataatgagaccctgtctct

SEQ ID NO: 29182 - DNA, 2581 bp, Homo sapiens
  source 1..2581: mol_type = unassigned DNA
attggttgcggcggatgcctcgcgggccggtggctatggaggcggcggcggttgatggttgaccgttggctccggggtgggggtcgccgttcgagtgatctgctcagacccgaccagagggcgcgggctgctgatgcttggcttggagcccgtgggggagacctagttcggctccgccatgccggccgccgggagtaacgagccggacggcgtcctcagctatcagagaccagatgaagaagctgtggtggatcagggtgggaccagtacaattctcaacattcactatgaaaaagaagagctggaaggtcacagaactctgtatgtgggagttcggatgccgcttggccggcagagccatcggcatcaccgcactcatggccagaagcaccggagacgagggcggggcaaaggagccagccagggggaggaaggcctggaagccctggcccacgacacaccatctcagcgtgttcagttcattcttggcaccgaggaagatgaagagcatgtgcctcatgagctgtttacagagctggatgagatctgtatgaaagagggagaagatgctgagtggaaggaaacagccaggtggctgaagtttgaagaagatgttgaagatgggggagaacgctggagcaagccttatgtggcaaccctttcattgcacagcctgtttgagctaaggagctgccttattaatggaacagtcctcctggatatgcatgcaaatagcatagaagaaatttcagacctgatcctggatcagcaagaactgtccagtgacctgaatgacagcatgagggttaaagtgcgggaagcccttctcaaaaagcatcatcatcagaatgaaaagaagagaaacaacctcattcccattgttcgctcctttgctgaggttggcaagaagcagtctgatcctcatttgatggataaacatggtcaaaccgtgtctcctcagtctgttccaactacaaatcttgaagtaaaaaatggagtgaattgtgaacatagtcctgtggatttaagcaaggtagaccttcatttcatgaaaaaaattcctactggggccgaggcctccaatgtcctggttggagaggtggatattttggaccgtcccattgttgcctttgtgaggctgtctccagctgttcttctctcaggcctaacagaagtgccaatcccaacaagatttttgtttatcttattgggtccagtagggaaaggtcagcagtaccatgagattggcagatccatggccaccatcatgacagatgagatttttcatgacgtagcatataaggcaaaagagcgagatgatctcctggcggggattgatgagttcctagaccaggtgacggtgctccctccaggagagtgggatccctccattagaattgagccacccaaaaatgtcccttcccaggagaaaaggaaaatgcctggagttccaaatggaaatgtttgccacatagaacaggaaccacatgggggtcacagtgggccagaacttcagcgcactgggcggctatttgggggcttggtgctggacatcaagcggaaggccccctggtactggagcgactaccgagatgcactcagcttacagtgtttggcttcctttctgttcctgtactgtgcctgcatgtcacctgtcatcacctttgggggactgcttggagaagccactgagggacgcataagtgcaattgaatccttgtttggagcttccatgactgggattgcttattccttgtttgcgggacaggctctcaccatcctgggaagtactggaccagtgcttgtgtttgaaaagattttgttcaaattctgcaaagactatgctctttcatacctctccctgcgagcttgtattggactgtggaccgctttcctgtgtattgtccttgtggcaactgatgccagttcccttgtctgctacattacccgtttcactgaagaagcatttgcctccctaatttgcattattttcatctatgaagcaatagaaaaactgattcacctggcagagacctaccccatccacatgcacagccagctggaccaccttagcctctattactgcaggtgtactctgccagagaatccaaacaatcacaccctccagtactggaaggaccacaacatcgtgacagcagaagtccactgggctaacctgactgtcagtgaatgccaggagatgcatggagagttcatgggatctgcgtgcggccatcatggaccctacactcctgatgtcctcttttggtcctgtattctctttttcaccaccttcatcctctcaagcaccttaaagacgtttaagacgagccgttatttcccaaccagaatggagtcttgctctgtcgcctggctggagtgcggtggtgtgatcttggctcactgcaacctccgcctcctcccgagtagctgggactacaggcacgcaccaccacagccagctaatttttgtatttttagtagagacggggtttccccatgttggccaggatggtctcaatctcttgacctcgtgatctgcctgcctcggcctcccaaaatgctgggattacaagcatga

SEQ ID NO: 29183 - DNA, 4395 bp, Homo sapiens
  source 1..4395: mol_type = unassigned DNA
gtgctccgcgccctgattggctgcgcaggcctctcgctgattggttgcggcggatgcctcgcgggccggtggctatggaggcggcggcggttgatggttgaccgttggctccggggtgggggtcgccgttcgagtgatctgctcagacccgaccagagggcgcgggctgctgatgcttggcttggagcccgtgggggagacctagttcggctccgccatgccggccgccgggagtaacgagccggacggcgtcctcagctatcagagaccagatgaagaagctgtggtggatcagggtgggaccagtacaattctcaacattcactatgaaaaagaagagctggaaggtcacagaactctgtatgtgggagttcggatgccgcttggccggcagagccatcggcatcaccgcactcatggccagaagcaccggagacgagggcggggcaaaggagccagccagggggaggaaggcctggaagccctggcccacgacacaccatctcagcgtgttcagttcattcttggcaccgaggaagatgaagagcatgtgcctcatgagctgtttacagagctggatgagatctgtatgaaagagggagaagatgctgagtggaaggaaacagccaggtggctgaagtttgaagaagatgttgaagatgggggagaacgctggagcaagccttatgtggcaaccctttcattgcacagcctgtttgagctaaggagctgccttattaatggaacagtcctcctggatatgcatgcaaatagcatagaagaaatttcagacctgatcctggatcagcaagaactgtccagtgacctgaatgacagcatgagggttaaagtgcgggaagcccttctcaaaaagcatcatcatcagaatgaaaagaagagaaacaacctcattcccattgttcgctcctttgctgaggttggcaagaagcagtctgatcctcatttgatggataaacatggtcaaaccgtgtctcctcagtctgttccaactacaaatcttgaagtaaaaaatggagtgaattgtgaacatagtcctgtggatttaagcaaggtagaccttcatttcatgaaaaaaattcctactggggccgaggcctccaatgtcctggttggagaggtggatattttggaccgtcccattgttgcctttgtgaggctgtctccagctgttcttctctcaggcctaacagaagtgccaatcccaacaagatttttgtttatcttattgggtccagtagggaaaggtcagcagtaccatgagattggcagatccatggccaccatcatgacagatgagatttttcatgacgtagcatataaggcaaaagagcgagatgatctcctggcggggattgatgagttcctagaccaggtgacggtgctccctccaggagagtgggatccctccattagaattgagccacccaaaaatgtcccttcccaggagaaaaggaaaatgcctggagttccaaatggaaatgtttgccacatagaacaggaaccacatgggggtcacagtgggccagaacttcagcgcactgggcggctatttgggggcttggtgctggacatcaagcggaaggccccctggtactggagcgactaccgagatgcactcagcttacagtgtttggcttcctttctgttcctgtactgtgcctgcatgtcacctgtcatcacctttgggggactgcttggagaagccactgagggacgcataagtgcaattgaatccttgtttggagcttccatgactgggattgcttattccttgtttgcgggacaggctctcaccatcctgggaagtactggaccagtgcttgtgtttgaaaagattttgttcaaattctgcaaagactatgctctttcatacctctccctgcgagcttgtattggactgtggaccgctttcctgtgtattgtccttgtggcaactgatgccagttcccttgtctgctacattacccgtttcactgaagaagcatttgcctccctaatttgcattattttcatctatgaagcaatagaaaaactgattcacctggcagagacctaccccatccacatgcacagccagctggaccaccttagcctctattactgcaggtgtactctgccagagaatccaaacaatcacaccctccagtactggaaggaccacaacatcgtgacagcagaagtccactgggctaacctgactgtcagtgaatgccaggagatgcatggagagttcatgggatctgcgtgcggccatcatggaccctacactcctgatgtcctcttttggtcctgtattctctttttcaccaccttcatcctctcaagcaccttaaagacgtttaagacgagccgttatttcccaaccagagtacgctccatggtgagtgactttgctgttttcctcactatcttcacaatggtgattattgattttttgattggagtcccatcaccaaagcttcaagttcccagtgtgttcaagccaacaagggatgatcgcggatggattattaatcccattggccccaatccctggtggactgtgatagctgcaattatcccagctcttctctgtactatcttgatattcatggatcagcagatcacagccgtcattattaacaggaaggaacataagctcaagaaaggctgtggctaccacctggacctactgatggtggccatcatgctgggtgtctgctccatcatgggcctgccctggtttgtagctgcaactgtcttgtccatcacacatgtgaacagcctcaagctagaatctgaatgctctgctcctggagaacagcccaagttcctgggcatccgagaacagagagtgacaggccttatgatctttgtgctgatgggctgctcagtcttcatgacggctatcttaaagtttattccaatgccagtactctacggagttttcctttacatgggagtttcttcactacagggaattcagttctttgatcgtctaaagctctttgggatgcccgcaaagcaccagccagatttcatctacctgcggcatgtgccgctgcgcaaagtgcacctcttcaccctcatccagttgacctgtctcgtcctgctctgggtcatcaaggcatctccagctgccattgttttcccaatgatggttttggccttggtctttgtcaggaaagtcatggatctctgtttctctaagcgagagctgagctggctagatgatctcatgcctgaaagcaaaaagaagaagttggatgatgccaaaaagaaggccaaggaggaagaggaggctgagaaaatgttagaaattgggggagacaagtttcccttagagagcaggaagttactaagtagtcctggaaagaacatcagttgcagatgtgacccctctgagattaatatatctgatgaaatgcctaaaactacagtttggaaagctctcagtatgaattctggaaatgcaaaggaaaagagtctcttcaactaagagtctttgctgggatggaagatttgggccgtgtggtgcctcagggaagttctggttacagagaaaatggcgagtctctcagagaagaagcaagaccaagtctggccctgtccttggtcatctcaaagccatgccgaagcattcagttattcttggtgtgcattggaaggcatccagctatccccataccagcagccagtcaccagatgtgaatgtggaagcagaagaccacctcctgttggttcttctcctcttccttctttttctctttagaacggccaccattgaagacctagcttcccattttccagacgttttctctgaaattctctgctggcctgccaagccatatggattcattctgccactgaggagtccttcagtgaggtccctcttcctaaaggacagagtggggagtaggaggggaacagagaggacatcctctctggctctccagtgctcttagtgtctacaggctcctaggcagccctgggccttggtttgattacctcccctgggggatgctggtcagacccagaggttgtcaggaggtcagctaccaggaagatccatgatctgggcattggcagtgcctgccaccacagccaggaagatgcctctgacctgggtgcatctccatcactccttagcagcagcctgcataactggcaagaatcttggatgatacaagagccaagaagggacatttgagttgtgtcgcttagataggaaagggatccagggaaaatcaacagtaagtgaggatgagcagtgtctcttggttttcattgaggatagagtaagagattgagtttagattgcaacagaaggaattagtttagataccaggaagaacttcctagcctgaagatttgtcatagtgtctgctttctaga

SEQ ID NO: 29184 - DNA, 2255 bp, Homo sapiens
  source 1..2255: mol_type = unassigned DNA
attcatctcgtaagcgccaaggtggaggggggtcctaccgagggaggagctacaggccaccgcgaccagcagagagcgaaggcaggagggaccagcctggcccagccccttcattttactgtcgggggtagtgaggaggaagaggaagaggcgaaggctggcggaggaggagagaccagatgaagaagctgtggtggatcagggtgggaccagtacaattctcaacattcactatgaaaaagaagagctggaaggtcacagaactctgtatgtgggagttcggatgccgcttggccggcagagccatcggcatcaccgcactcatggccagaagcaccggagacgagggcggggcaaaggagccagccagggggaggaaggcctggaagccctggcccacgacacaccatctcagcgtgttcagttcattcttggcaccgaggaagatgaagagcatgtgcctcatgagctgtttacagagctggatgagatctgtatgaaagagggagaagatgctgagtggaaggaaacagccaggtggctgaagtttgaagaagatgttgaagatgggggagaacgctggagcaagccttatgtggcaaccctttcattgcacagcctgtttgagctaaggagctgccttattaatggaacagtcctcctggatatgcatgcaaatagcatagaagaaatttcagacctgatcctggatcagcaagaactgtccagtgacctgaatgacagcatgagggttaaagtgcgggaagcccttctcaaaaagcatcatcatcagaatgaaaagaagagaaacaacctcattcccattgttcgctcctttgctgaggttggcaagaagcagtctgatcctcatttgatggataaacatggtcaaaccgtgtctcctcagtctgttccaactacaaatcttgaagtaaaaaatggagtgaattgtgaacatagtcctgtggatttaagcaaggtagaccttcatttcatgaaaaaaattcctactggggccgaggcctccaatgtcctggttggagaggtggatattttggaccgtcccattgttgcctttgtgaggctgtctccagctgttcttctctcaggcctaacagaagtgccaatcccaacaagatttttgtttatcttattgggtccagtagggaaaggtcagcagtaccatgagattggcagatccatggccaccatcatgacagatgagatttttcatgacgtagcatataaggcaaaagagcgagatgatctcctggcggggattgatgagttcctagaccaggtgacggtgctccctccaggagagtgggatccctccattagaattgagccacccaaaaatgtcccttcccaggagaaaaggaaaatgcctggagttccaaatggaaatgtttgccacatagaacaggaaccacatgggggtcacagtgggccagaacttcagcgcactgggcggctatttgggggcttggtgctggacatcaagcggaaggccccctggtactggagcgactaccgagatgcactcagcttacagtgtttggcttcctttctgttcctgtactgtgcctgcatgtcacctgtcatcacctttgggggactgcttggagaagccactgagggacgcataagtgcaattgaatccttgtttggagcttccatgactgggattgcttattccttgtttgcgggacaggctctcaccatcctgggaagtactggaccagtgcttgtgtttgaaaagattttgttcaaattctgcaaagactatgctctttcatacctctccctgcgagcttgtattggactgtggaccgctttcctgtgtattgtccttgtggcaactgatgccagttcccttgtctgctacattacccgtttcactgaagaagcatttgcctccctaatttgcattattttcatctatgaagcaatagaaaaactgattcacctggcagagacctaccccatccacatgcacagccagctggaccaccttagcctctattactgcaggtgtactctgccagagaatccaaacaatcacaccctccagtactggaaggaccacaacatcgtgacagcagaagtccactgggctaacctgactgtcagtgtaagtctgggagctgccagatgtcctagcattgtgaccacaggtttaggagggacttctaagtgaaggggaggagtagccctttggccaaactctggcatttaccgaaataaagcttttt

SEQ ID NO: 29185 - DNA, 4005 bp, Homo sapiens
  source 1..4005: mol_type = unassigned DNA
agaccagatgaagaagctgtggtggatcagggtgggaccagtacaattctcaacattcactatgaaaaagaagagctggaagtcttcacaagatccctgtgaagtttgcaggcatgtgcaggacaaaggaagagaccttcaactccaaaatctctatatctttactcctggaagtctttgaagttttgttgttccagagctgtgaccagaccaaagaactgtgatatttttttctcttaactatgctaggctttttgttgttgttgttttttaaaactaaaggagttctctccacagaccttctgcttctttccaggtcacagaactctgtatgtgggagttcggatgccgcttggccggcagagccatcggcatcaccgcactcatggccagaagcaccggagacgagggcggggcaaaggagccagccagggggaggaaggcctggaagccctggcccacgacacaccatctcagcgtgttcagttcattcttggcaccgaggaagatgaagagcatgtgcctcatgagctgtttacagagctggatgagatctgtatgaaagagggagaagatgctgagtggaaggaaacagccaggtggctgaagtttgaagaagatgttgaagatgggggagaacgctggagcaagccttatgtggcaaccctttcattgcacagcctgtttgagctaaggagctgccttattaatggaacagtcctcctggatatgcatgcaaatagcatagaagaaatttcagacctgatcctggatcagcaagaactgtccagtgacctgaatgacagcatgagggttaaagtgcgggaagcccttctcaaaaagcatcatcatcagaatgaaaagaagagaaacaacctcattcccattgttcgctcctttgctgaggttggcaagaagcagtctgatcctcatttgatggataaacatggtcaaaccgtgtctcctcagtctgttccaactacaaatcttgaagtaaaaaatggagtgaattgtgaacatagtcctgtggatttaagcaaggtagaccttcatttcatgaaaaaaattcctactggggccgaggcctccaatgtcctggttggagaggtggatattttggaccgtcccattgttgcctttgtgaggctgtctccagctgttcttctctcaggcctaacagaagtgccaatcccaacaagatttttgtttatcttattgggtccagtagggaaaggtcagcagtaccatgagattggcagatccatggccaccatcatgacagatgagatttttcatgacgtagcatataaggcaaaagagcgagatgatctcctggcggggattgatgagttcctagaccaggtgacggtgctccctccaggagagtgggatccctccattagaattgagccacccaaaaatgtcccttcccaggagaaaaggaaaatgcctggagttccaaatggaaatgtttgccacatagaacaggaaccacatgggggtcacagtgggccagaacttcagcgcactgggcggctatttgggggcttggtgctggacatcaagcggaaggccccctggtactggagcgactaccgagatgcactcagcttacagtgtttggcttcctttctgttcctgtactgtgcctgcatgtcacctgtcatcacctttgggggactgcttggagaagccactgagggacgcataagtgcaattgaatccttgtttggagcttccatgactgggattgcttattccttgtttgcgggacaggctctcaccatcctgggaagtactggaccagtgcttgtgtttgaaaagattttgttcaaattctgcaaagactatgctctttcatacctctccctgcgagcttgtattggactgtggaccgctttcctgtgtattgtccttgtggcaactgatgccagttcccttgtctgctacattacccgtttcactgaagaagcatttgcctccctaatttgcattattttcatctatgaagcaatagaaaaactgattcacctggcagagacctaccccatccacatgcacagccagctggaccaccttagcctctattactgcaggtgtactctgccagagaatccaaacaatcacaccctccagtactggaaggaccacaacatcgtgacagcagaagtccactgggctaacctgactgtcagtgaatgccaggagatgcatggagagttcatgggatctgcgtgcggccatcatggaccctacactcctgatgtcctcttttggtcctgtattctctttttcaccaccttcatcctctcaagcaccttaaagacgtttaagacgagccgttatttcccaaccagagtacgctccatggtgagtgactttgctgttttcctcactatcttcacaatggtgattattgattttttgattggagtcccatcaccaaagcttcaagttcccagtgtgttcaagccaacaagggatgatcgcggatggattattaatcccattggccccaatccctggtggactgtgatagctgcaattatcccagctcttctctgtactatcttgatattcatggatcagcagatcacagccgtcattattaacaggaaggaacataagctcaagaaaggctgtggctaccacctggacctactgatggtggccatcatgctgggtgtctgctccatcatgggcctgccctggtttgtagctgcaactgtcttgtccatcacacatgtgaacagcctcaagctagaatctgaatgctctgctcctggagaacagcccaagttcctgggcatccgagaacagagagtgacaggccttatgatctttgtgctgatgggctgctcagtcttcatgacggctatcttaaagtttattccaatgccagtactctacggagttttcctttacatgggagtttcttcactacagggaattcagttctttgatcgtctaaagctctttgggatgcccgcaaagcaccagccagatttcatctacctgcggcatgtgccgctgcgcaaagtgcacctcttcaccctcatccagttgacctgtctcgtcctgctctgggtcatcaaggcatctccagctgccattgttttcccaatgatggttttggccttggtctttgtcaggaaagtcatggatctctgtttctctaagcgagagctgagctggctagatgatctcatgcctgaaagcaaaaagaagaagttggatgatgccaaaaagaaggccaaggaggaagaggtcatagtccttgcaccaactgtatacctgggggcctcaaattacagaacataggaagggtcatgtgaaaagtcagcatgtctggaatcccgagggttatatttaggagctgggaagattacccccaaagatgttctcagctaagaatggattagggattcttgcttctgtctgttcttaatttttgggtttgacaaccacttattttttcctttgtttacaatctactcaccaggctcatacctacaatgtgaacatacagtatgcccttattagcagattcaatggctcacattctttcaaaaggtctaatttgacaaatacataagacccattatttcctagaatgtttgtaatatatctaattgcaaatggtgctgtggttggcaccatgcaaagataacttgcataggactttctgtcttttttcatttccctcagcacttggcatcttgtcatctacacaatggaccctcaataaatggcctatatgtgcaaagaaagaatgtgtagcaaatgaaaataccagaccaagaaatgagtgagctgggaagtgtttccaaatacagttagtgcctaaaatagtgtcctttgaaaaaacttttaaaagacttttttttaggccaggcataatgggttatccctgtaattccagggcttttgggagttgaagctggaggattacttgaggccagaagtttgagactagcctaggcaatataatgagaccctgtctct

SEQ ID NO: 29186 - DNA, 3414 bp, Homo sapiens
  source 1..3414: mol_type = unassigned DNA
gatccgaatactaagcagagcgagtgccgggctgagtgtaagacactgaagacactgcagagcaaggtgcttattccagaggcgttacaaaacatggagattaaagaccagggagcccaaatggagccgctgctgcctacgagaaatgatgaagaagcagttgtggatagaggtggaactcgttctattctcaaaacacactttgagaaagaagatttagaaggtcatcgaacactatttattggagtacatgtgcccttgggaggaagaaaaagccatcgacgtcacaggcatcgtggtcataaacacagaaagagagacagagaaagagattcaggattagaggatggaagggagtcaccttcttttgacaccccatcacagagggtacagtttattcttggaaccgaggatgatgacgaggaacacattcctcatgaccttttcacagaactggatgagatttgttggcgtgaaggtgaggacgctgagtggcgagaaacagccaggtggttgaagtttgaagaagatgtggaagatggaggagaaaggtggagcaagccttatgtggctactctttcattgcacagcttgtttgaattgagaagttgtattctgaatggaactgtgttgctggacatgcatgccaacactttagaagaaattgcagatatggttcttgaccaacaagtgagctcaggtcagctgaatgaagatgtacgccatagggtccatgaggcattgatgaaacagcatcatcatcagaatcagaaaaaactcaccaacaggattcccattgttcgttcctttgctgatattggcaagaaacagtcagaaccaaattccatggacaaaaatgcaggtcaggttgtttctcctcagtctgctccagcctgtgttgaaaataaaaatgatgttagcagagaaaacagcactgttgactttagcaaggttgatctgcattttatgaaaaagattcctccaggtgctgaagcatcgaacatcttagtgggagaactggagttcttggatcgaacagtagttgcgtttgtcaggttgtctccagctgtattgcttcaaggactggctgaagtcccaatcccaaccagatttttgttcattcttctgggacccctgggaaagggtcaacagtaccatgagattggcagatcaattgcaaccctaatgacagatgaggtatttcatgatgttgcctataaagctaaagatcgtaatgacttggtatcaggaattgatgagtttctggatcaggttactgttctccctcctggagaatgggatccaagcattcgaatagagcctcccaaaaatgttccttcccaggagaagaggaagattcctgctgtaccaaatggaacagcagctcatggggaagcagagccccacggaggacatagtggacctgaactccagcgaactggaaggatttttgggggacttattttagatatcaaaagaaaagctccatacttctggagtgacttcagagatgctttcagcctgcagtgcttagcatcttttctatttctctactgcgcgtgtatgtctcctgtcatcacgtttggaggactgctgggagaagcaactgaagggcgtataagtgcaattgaatctctctttggagcatccatgaccgggatagcctattctctctttggtggacagcctcttaccatattaggcagtacaggaccagttttggtgtttgaaaagattttgtttaaattttgcaaagaatatgggctgtcatacctatctttaagagctagcattggactttggactgcaactctatgtatcatacttgtggccacagatgctagttcccttgtctgctacatcactcggtttactgaagaagcttttgcttccctgatttgcatcattttcatttatgaggccctggagaagttgtttgaactcagtgaagcatatccaatcaacatgcataatgatctggaactgctgacacaatactcgtgtaactgtgtggaaccgcataatcccagcaatggcacattgaaggaatggagggaatccaatatttctgcctctgacataatttgggagaacctaactgtgtcagaatgcaaatcattgcatggagagtatgttggacgggcctgtggccatgatcacccatatgttccagatgttctattttggtctgtgatcctgttcttttccacagttactctgtcagccaccctgaagcagttcaagactagcagatattttccaaccaaggttcgatccatagtgagtgactttgctgtctttcttacaattctgtgtatggttttaattgactatgccattgggatcccatctccaaaactacaagtaccaagtgttttcaagcccactagagatgatcgtggctggtttgttacgcctttaggtccaaacccatggtggacagtaatagctgctataattccagctctgctttgtactattctaatttttatggaccaacagattacagctgtcatcatcaacaggaaagagcataagctaaagaaaggttgtgggtaccatctggacctattaatggtggctgtcatgctcggtgtatgctccatcatgggcctgccatggtttgtggctgccacagtcctctccatcactcatgtcaatagcctaaaactggaatcagaatgctcagctccaggagaacaacccaaatttctcggcattcgggagcaaagggttactgggcttatgatttttattcttatgggttcatcagtctttatgaccagtattctgaagtttattcccatgccagtgctatatggagtgtttctttatatgggtgcttcatctctaaagggaattcagttctttgataggataaagctcttctggatgccggcaaaacatcaaccagattttatatacctaaggcacgtaccgcttcgaaaagtgcatctcttcacaattattcagatgagttgccttggccttttgtggataataaaagtttcaagagctgctattgtctttcccatgatggtgttagccctggtatttgtaagaaagttgatggacttgttgttcacgaagcgggaactcagctggttggatgatttgatgcccgagagtaagaaaaagaaactggaagatgctgaaaaagaagaagaacaaagtatgctagctatggaagatgagggcacagtacaactcccattggaagggcactatagagatgatccatctgtgatcaatatatctgatgaaatgtcaaagactgccttgtggaggaaccttctgattactgccgataactcaaaagataaggagtcaagctttccttccaaaagcattgaaagccgaaaagagaagaaagctgactcagggaaaggtgttgacagggagacttgtctatga

SEQ ID NO: 29187 - DNA, 5710 bp, Homo sapiens
  source 1..5710: mol_type = unassigned DNA
gtgcaaaacctggccagcagcccgagtgagtaggagccatgtgactctggtgagttggagtgtgcaattgcctcctgcttcagagctacctgatccgaatactaagcagagcgagtgccgggctgagtgtaagacactgaagacactgcagagcaaggtgcttattccagaggcgttacaaaacatggagattaaagaccagggagcccaaatggagccgctgctgcctacgccctgaagatgctgagacatagagatggctgtgattatcttttgtaagacaggaaatgcagtctttaggggtttctggaaatagaaaggtcatgcagtctggaacctgtgagccttttcaatctctaagtcatcagagaaatgatgaagaagcagttgtggatagaggtggaactcgttctattctcaaaacacactttgagaaagaagatttagaaggtcatcgaacactatttattggagtacatgtgcccttgggaggaagaaaaagccatcgacgtcacaggcatcgtggtcataaacacagaaagagagacagagaaagagattcaggattagaggatggaagggagtcaccttcttttgacaccccatcacagagggtacagtttattcttggaaccgaggatgatgacgaggaacacattcctcatgaccttttcacagaactggatgagatttgttggcgtgaaggtgaggacgctgagtggcgagaaacagccaggtggttgaagtttgaagaagatgtggaagatggaggagaaaggtggagcaagccttatgtggctactctttcattgcacagcttgtttgaattgagaagttgtattctgaatggaactgtgttgctggacatgcatgccaacactttagaagaaattgcagatatggttcttgaccaacaagtgagctcaggtcagctgaatgaagatgtacgccatagggtccatgaggcattgatgaaacagcatcatcatcagaatcagaaaaaactcaccaacaggattcccattgttcgttcctttgctgatattggcaagaaacagtcagaaccaaattccatggacaaaaatgcaggtcaggttgtttctcctcagtctgctccagcctgtgttgaaaataaaaatgatgttagcagagaaaacagcactgttgactttagcaaggttgatctgcattttatgaaaaagattcctccaggtgctgaagcatcgaacatcttagtgggagaactggagttcttggatcgaacagtagttgcgtttgtcaggttgtctccagctgtattgcttcaaggactggctgaagtcccaatcccaaccagatttttgttcattcttctgggacccctgggaaagggtcaacagtaccatgagattggcagatcaattgcaaccctaatgacagatgaggtatttcatgatgttgcctataaagctaaagatcgtaatgacttggtatcaggaattgatgagtttctggatcaggttactgttctccctcctggagaatgggatccaagcattcgaatagagcctcccaaaaatgttccttcccaggagaagaggaagattcctgctgtaccaaatggaacagcagctcatggggaagcagagccccacggaggacatagtggacctgaactccagcgaactggaaggatttttgggggacttattttagatatcaaaagaaaagctccatacttctggagtgacttcagagatgctttcagcctgcagtgcttagcatcttttctatttctctactgcgcgtgtatgtctcctgtcatcacgtttggaggactgctgggagaagcaactgaagggcgtataagtgcaattgaatctctctttggagcatccatgaccgggatagcctattctctctttggtggacagcctcttaccatattaggcagtacaggaccagttttggtgtttgaaaagattttgtttaaattttgcaaagaatatgggctgtcatacctatctttaagagctagcattggactttggactgcaactctatgtatcatacttgtggccacagatgctagttcccttgtctgctacatcactcggtttactgaagaagcttttgcttccctgatttgcatcattttcatttatgaggccctggagaagttgtttgaactcagtgaagcatatccaatcaacatgcataatgatctggaactgctgacacaatactcgtgtaactgtgtggaaccgcataatcccagcaatggcacattgaaggaatggagggaatccaatatttctgcctctgacataatttgggagaacctaactgtgtcagaatgcaaatcattgcatggagagtatgttggacgggcctgtggccatgatcacccatatgttccagatgttctattttggtctgtgatcctgttcttttccacagttactctgtcagccaccctgaagcagttcaagactagcagatattttccaaccaaggttcgatccatagtgagtgactttgctgtctttcttacaattctgtgtatggttttaattgactatgccattgggatcccatctccaaaactacaagtaccaagtgttttcaagcccactagagatgatcgtggctggtttgttacgcctttaggtccaaacccatggtggacagtaatagctgctataattccagctctgctttgtactattctaatttttatggaccaacagattacagctgtcatcatcaacaggaaagagcataagctaaagaaaggttgtgggtaccatctggacctattaatggtggctgtcatgctcggtgtatgctccatcatgggcctgccatggtttgtggctgccacagtcctctccatcactcatgtcaatagcctaaaactggaatcagaatgctcagctccaggagaacaacccaaatttctcggcattcgggagcaaagggttactgggcttatgatttttattcttatgggttcatcagtctttatgaccagtattctgaagtttattcccatgccagtgctatatggagtgtttctttatatgggtgcttcatctctaaagggaattcagttctttgataggataaagctcttctggatgccggcaaaacatcaaccagattttatatacctaaggcacgtaccgcttcgaaaagtgcatctcttcacaattattcagatgagttgccttggccttttgtggataataaaagtttcaagagctgctattgtctttcccatgatggtgttagccctggtatttgtaagaaagttgatggacttgttgttcacgaagcgggaactcagctggttggatgatttgatgcccgagagtaagaaaaagaaactggaagatgctgaaaaagaagaagaacaaagtatgctagctatggaagatgagggcacagtacaactcccattggaagggcactatagagatgatccatctgtgatcaatatatctgatgaaatgtcaaagactgccttgtggaggaaccttctgattactgccgataactcaaaagataaggagtcaagctttccttccaaaagctccccttcctaatcactctagaagctgattccccaaagcattgaaagccgaaaagagaagaaagctgactcagggaaaggtgttgacagggagacttgtctatgactcgatcttcaatttattttttacatatatatgagaagagtgtcacaattattaataaaactgctttgatcatgtattgtaaattctgtccctcaacccaaatccaccttcatactgtaagtagtgcaatacttgtttcatttctgtgtttaaacttctgagcagtgagacatccctgtgagcagatacaatagccaatgcaagaatctgtgtgttccttgctgtacgttagacatttgtaaactggattctgattgtcagttttatgagagcaatagcttccttaaagagataagtcatatttacctagtttgtattttcctactttagtgacctgaagatgcctgataatttcattcagaagaatttttgaaaggtagtcttacttctttttagtttttatagcttagcattagtgacttatttcaaaagacccaaatcaaaaagttagtttgaaagcattttttaataattgtatttatgcatttccttgatttaatatgataaatttaatacttaacaatttatatgtaactaaaacttaaagtcatttgaaaaatatatagaaacctatttacaacttgttaaggacaatcagacataatgcagagttaagtagtatttgcttaaaattcaagttgtgactaatgatcaaatactaggcttgtacgaaatgctttagaaaaactttgtaacagttttgtgggatttttcaatataaacctttatcagaaatatactaagtttgtctcccactgacaacagatgttttccaaataaacatattctatacatacttgtggaatgccacatggtgaatcattgtatatgaaattccactcctgtacagttactctgcagctaatggtcatgcactgcttaatgctggtcctgaatcatgttctcatgttagaccaacagctctccaattgtcattttttttctgcagagttttttttttccacttttaaattaaatgcatgttgtggaaaaacagtcttttaaaatgaaatttcagattccatttgagaaggttctgtagatatttcagtccatataaaataatacatctttactaaacttatataaggggagagaaagttatgaagttttggacattactaaaagtacagtatttgatttcactttcaatgaatgtgaagttaataaaactaaatctcataatgctcttggttcctaagaatgagtagtaatcatcaactttataatactccaatattccgttttataataattcagagccctgtggcttttacacaccgttaattatgtactctgttggaagtgcacatgaaaagtgaagaaaagttcctcttgtgattaaactaatgggaggaaataaatcaacaaagtctccattaagttctacattttgagaccttttaaaaattcccctcacaattctttaaggagcccccctttttatggaacatgagcctaaaaattatagaaagaagaattttaagttaataaagtttgtatttataaatgctgaaaaaatacagaaactttctgttccaaatgtgttgcctttgtgtattttataatacagatactacattgtaaacatttccattgttttatgatttagccagtgattccccaaagcagcctcttagtgttttaatatattaataactgttttgttaaaaatgatcatagtgaatttaaatcttcacatgatcacctatttgaataagcaatcatatccaatgaaattctgtatttctgagtatttttatagtcattttgttcttgtgtgaattttaaagctatccctatgttaatcctaatattttgaaatcatataaaatataataaaaatgtagtattatatatttacttctaatttcagattcctggtcaaaattactaaatatcttgaatgtaatttagtgccaagtttaaataatgtgtaaatgtgactaggatattgtgtttttcacaattaagaaatgttatgtggaaataaatatttatcctaacttccttgcacattttaaattgtg

SEQ ID NO: 29188 - DNA, 3354 bp, Homo sapiens
  source 1..3354: mol_type = unassigned DNA
atggagattaaagaccagggagcccaaatggagccgctgctgcctacgagaaatgatgaagaagcagttgtggatagaggtggaactcgttctattctcaaaacacactttgagaaagaagatttagaaggtcatcgaacactatttattggagtacatgtgcccttgggaggaagaaaaagccatcgacgtcacaggcatcgtggtcataaacacagaaagagagacagagaaagagattcaggattagaggatggaagggagtcaccttcttttgacaccccatcacagagggtacagtttattcttggaaccgaggatgatgacgaggaacacattcctcatgaccttttcacagaactggatgagatttgttggcgtgaaggtgaggacgctgagtggcgagaaacagccaggtggttgaagtttgaagaagatgtggaagatggaggagaaaggtggagcaagccttatgtggctactctttcattgcacagcttgtttgaattgagaagttgtattctgaatggaactgtgttgctggacatgcatgccaacactttagaagaaattgcagatatggttcttgaccaacaagtgagctcaggtcagctgaatgaagatgtacgccatagggtccatgaggcattgatgaaacagcatcatcatcagaatcagaaaaaactcaccaacaggattcccattgttcgttcctttgctgatattggcaagaaacagtcagaaccaaattccatggacaaaaatggtcaggttgtttctcctcagtctgctccagcctgtgttgaaaataaaaatgatgttagcagagaaaacagcactgttgactttagcaagggactgggaggccaacaaaaggggcatactagtccatgtgggatgaaacaaaggcatgaaaaaggacctccacaccagcaagagagagaggttgatctgcattttatgaaaaagattcctccaggtgctgaagcatcgaacatcttagtgggagaactggagttcttggatcgaacagtagttgcgtttgtcaggttgtctccagctgtattgcttcaaggactggctgaagtcccaatcccaaccagatttttgttcattcttctgggacccctgggaaagggtcaacagtaccatgagattggcagatcaattgcaaccctaatgacagatgaggtatttcatgatgttgcctataaagctaaagatcgtaatgacttggtatcaggaattgatgagtttctggatcaggttactgttctccctcctggagaatgggatccaagcattcgaatagagcctcccaaaaatgttccttcccaggagaagaggaagattcctgctgtaccaaatggaacagcagctcatggggaagcagagccccacggaggacatagtggacctgaactccagcgaactggaaggatttttgggggacttattttagatatcaaaagaaaagctccatacttctggagtgacttcagagatgctttcagcctgcagtgcttagcatcttttctatttctctactgcgcgtgtatgtctcctgtcatcacgtttggaggactgctgggagaagcaactgaagggcgtataagtgcaattgaatctctctttggagcatccatgaccgggatagcctattctctctttggtggacagcctcttaccatattaggcagtacaggaccagttttggtgtttgaaaagattttgtttaaattttgcaaagaatatgggctgtcatacctatctttaagagctagcattggactttggactgcaactctatgtatcatacttgtggccacagatgctagttcccttgtctgctacatcactcggtttactgaagaagcttttgcttccctgatttgcatcattttcatttatgaggccctggagaagttgtttgaactcagtgaagcatatccaatcaacatgcataatgatctggaactgctgacacaatactcgtgtaactgtgtggaaccgcataatcccagcaatggcacattgaaggaatggagggaatccaatatttctgcctctgacataatttgggagaacctaactgtgtcagaatgcaaatcattgcatggagagtatgttggacgggcctgtggccatgatcacccatatgttccagatgttctattttggtctgtgatcctgttcttttccacagttactctgtcagccaccctgaagcagttcaagactagcagatattttccaaccaaggttcgatccatagtgagtgactttgctgtctttcttacaattctgtgtatggttttaattgactatgccattgggatcccatctccaaaactacaagtaccaagtgttttcaagcccactagagatgatcgtggctggtttgttacgcctttaggtccaaacccatggtggacagtaatagctgctataattccagctctgctttgtactattctaatttttatggaccaacagattacagctgtcatcatcaacaggaaagagcataagctaaagaaaggttgtgggtaccatctggacctattaatggtggctgtcatgctcggtgtatgctccatcatgggcctgccatggtttgtggctgccacagtcctctccatcactcatgtcaatagcctaaaactggaatcagaatgctcagctccaggagaacaacccaaatttctcggcattcgggagcaaagggttactgggcttatgatttttattcttatgggttcatcagtctttatgaccagtattctgaagtttattcccatgccagtgctatatggagtgtttctttatatgggtgcttcatctctaaagggaattcagttctttgataggataaagctcttctggatgccggcaaaacatcaaccagattttatatacctaaggcacgtaccgcttcgaaaagtgcatctcttcacaattattcagatgagttgccttggccttttgtggataataaaagtttcaagagctgctattgtctttcccatgatggtgttagccctggtatttgtaagaaagttgatggacttgttgttcacgaagcgggaactcagctggttggatgatttgatgcccgagagtaagaaaaagaaactggaagatgctgaaaaagaagaagaacaaagtatgctagctatggaagatgagggcacagtacaactcccattggaagggcactatagagatgatccatctgtgatcaatatatctgatgaaatgtcaaagactgccttgtggaggaaccttctgattactgccgataactcaaaagataaggagtcaagctttccttccaaaagctccccttcctaa

SEQ ID NO: 29189 - DNA, 5578 bp, Homo sapiens
  source 1..5578: mol_type = unassigned DNA
caaaacctggccagcagcccgagtgagtaggagccatgtgactctggtgagttggagtgtgcaattgcctcctgcttcagagctacctgatccgaatactaagcagagcgagtgccgggctgagtgtaagacactgaagacactgcagagcaaggtgcttattccagaggcgttacaaaacatggagattaaagaccagggagcccaaatggagccgctgctgcctacgagaaatgatgaagaagcagttgtggatagaggtggaactcgttctattctcaaaacacactttgagaaagaagatttagaaggtcatcgaacactatttattggagtacatgtgcccttgggaggaagaaaaagccatcgacgtcacaggcatcgtggtcataaacacagaaagagagacagagaaagagattcaggattagaggatggaagggagtcaccttcttttgacaccccatcacagagggtacagtttattcttggaaccgaggatgatgacgaggaacacattcctcatgaccttttcacagaactggatgagatttgttggcgtgaaggtgaggacgctgagtggcgagaaacagccaggtggttgaagtttgaagaagatgtggaagatggaggagaaaggtggagcaagccttatgtggctactctttcattgcacagcttgtttgaattgagaagttgtattctgaatggaactgtgttgctggacatgcatgccaacactttagaagaaattgcagatatggttcttgaccaacaagtgagctcaggtcagctgaatgaagatgtacgccatagggtccatgaggcattgatgaaacagcatcatcatcagaatcagaaaaaactcaccaacaggattcccattgttcgttcctttgctgatattggcaagaaacagtcagaaccaaattccatggacaaaaatgcaggtcaggttgtttctcctcagtctgctccagcctgtgttgaaaataaaaatgatgttagcagagaaaacagcactgttgactttagcaaggttgatctgcattttatgaaaaagattcctccaggtgctgaagcatcgaacatcttagtgggagaactggagttcttggatcgaacagtagttgcgtttgtcaggttgtctccagctgtattgcttcaaggactggctgaagtcccaatcccaaccagatttttgttcattcttctgggacccctgggaaagggtcaacagtaccatgagattggcagatcaattgcaaccctaatgacagatgaggtatttcatgatgttgcctataaagctaaagatcgtaatgacttggtatcaggaattgatgagtttctggatcaggttactgttctccctcctggagaatgggatccaagcattcgaatagagcctcccaaaaatgttccttcccaggagaagaggaagattcctgctgtaccaaatggaacagcagctcatggggaagcagagccccacggaggacatagtggacctgaactccagcgaactggaaggatttttgggggacttattttagatatcaaaagaaaagctccatacttctggagtgacttcagagatgctttcagcctgcagtgcttagcatcttttctatttctctactgcgcgtgtatgtctcctgtcatcacgtttggaggactgctgggagaagcaactgaagggcgtataagtgcaattgaatctctctttggagcatccatgaccgggatagcctattctctctttggtggacagcctcttaccatattaggcagtacaggaccagttttggtgtttgaaaagattttgtttaaattttgcaaagaatatgggctgtcatacctatctttaagagctagcattggactttggactgcaactctatgtatcatacttgtggccacagatgctagttcccttgtctgctacatcactcggtttactgaagaagcttttgcttccctgatttgcatcattttcatttatgaggccctggagaagttgtttgaactcagtgaagcatatccaatcaacatgcataatgatctggaactgctgacacaatactcgtgtaactgtgtggaaccgcataatcccagcaatggcacattgaaggaatggagggaatccaatatttctgcctctgacataatttgggagaacctaactgtgtcagaatgcaaatcattgcatggagagtatgttggacgggcctgtggccatgatcacccatatgttccagatgttctattttggtctgtgatcctgttcttttccacagttactctgtcagccaccctgaagcagttcaagactagcagatattttccaaccaaggttcgatccatagtgagtgactttgctgtctttcttacaattctgtgtatggttttaattgactatgccattgggatcccatctccaaaactacaagtaccaagtgttttcaagcccactagagatgatcgtggctggtttgttacgcctttaggtccaaacccatggtggacagtaatagctgctataattccagctctgctttgtactattctaatttttatggaccaacagattacagctgtcatcatcaacaggaaagagcataagctaaagaaaggttgtgggtaccatctggacctattaatggtggctgtcatgctcggtgtatgctccatcatgggcctgccatggtttgtggctgccacagtcctctccatcactcatgtcaatagcctaaaactggaatcagaatgctcagctccaggagaacaacccaaatttctcggcattcgggagcaaagggttactgggcttatgatttttattcttatgggttcatcagtctttatgaccagtattctgaagtttattcccatgccagtgctatatggagtgtttctttatatgggtgcttcatctctaaagggaattcagttctttgataggataaagctcttctggatgccggcaaaacatcaaccagattttatatacctaaggcacgtaccgcttcgaaaagtgcatctcttcacaattattcagatgagttgccttggccttttgtggataataaaagtttcaagagctgctattgtctttcccatgatggtgttagccctggtatttgtaagaaagttgatggacttgttgttcacgaagcgggaactcagctggttggatgatttgatgcccgagagtaagaaaaagaaactggaagatgctgaaaaagaagaagaacaaagtatgctagctatggaagatgagggcacagtacaactcccattggaagggcactatagagatgatccatctgtgatcaatatatctgatgaaatgtcaaagactgccttgtggaggaaccttctgattactgccgataactcaaaagataaggagtcaagctttccttccaaaagctccccttcctaatcactctagaagctgattccccaaagcattgaaagccgaaaagagaagaaagctgactcagggaaaggtgttgacagggagacttgtctatgactcgatcttcaatttattttttacatatatatgagaagagtgtcacaattattaataaaactgctttgatcatgtattgtaaattctgtccctcaacccaaatccaccttcatactgtaagtagtgcaatacttgtttcatttctgtgtttaaacttctgagcagtgagacatccctgtgagcagatacaatagccaatgcaagaatctgtgtgttccttgctgtacgttagacatttgtaaactggattctgattgtcagttttatgagagcaatagcttccttaaagagataagtcatatttacctagtttgtattttcctactttagtgacctgaagatgcctgataatttcattcagaagaatttttgaaaggtagtcttacttctttttagtttttatagcttagcattagtgacttatttcaaaagacccaaatcaaaaagttagtttgaaagcattttttaataattgtatttatgcatttccttgatttaatatgataaatttaatacttaacaatttatatgtaactaaaacttaaagtcatttgaaaaatatatagaaacctatttacaacttgttaaggacaatcagacataatgcagagttaagtagtatttgcttaaaattcaagttgtgactaatgatcaaatactaggcttgtacgaaatgctttagaaaaactttgtaacagttttgtgggatttttcaatataaacctttatcagaaatatactaagtttgtctcccactgacaacagatgttttccaaataaacatattctatacatacttgtggaatgccacatggtgaatcattgtatatgaaattccactcctgtacagttactctgcagctaatggtcatgcactgcttaatgctggtcctgaatcatgttctcatgttagaccaacagctctccaattgtcattttttttctgcagagttttttttttccacttttaaattaaatgcatgttgtggaaaaacagtcttttaaaatgaaatttcagattccatttgagaaggttctgtagatatttcagtccatataaaataatacatctttactaaacttatataaggggagagaaagttatgaagttttggacattactaaaagtacagtatttgatttcactttcaatgaatgtgaagttaataaaactaaatctcataatgctcttggttcctaagaatgagtagtaatcatcaactttataatactccaatattccgttttataataattcagagccctgtggcttttacacaccgttaattatgtactctgttggaagtgcacatgaaaagtgaagaaaagttcctcttgtgattaaactaatgggaggaaataaatcaacaaagtctccattaagttctacattttgagaccttttaaaaattcccctcacaattctttaaggagcccccctttttatggaacatgagcctaaaaattatagaaagaagaattttaagttaataaagtttgtatttataaatgctgaaaaaatacagaaactttctgttccaaatgtgttgcctttgtgtattttataatacagatactacattgtaaacatttccattgttttatgatttagccagtgattccccaaagcagcctcttagtgttttaatatattaataactgttttgttaaaaatgatcatagtgaatttaaatcttcacatgatcacctatttgaataagcaatcatatccaatgaaattctgtatttctgagtatttttatagtcattttgttcttgtgtgaattttaaagctatccctatgttaatcctaatattttgaaatcatataaaatataataaaaatgtagtattatatatttacttctaatttcagattcctggtcaaaattactaaatatcttgaatgtaatttagtgccaagtttaaataatgtgtaaatgtgactaggatattgtgtttttcacaattaagaaatgttatgtggaaataaatatttatcctaacttccttgcacattttaaattgtgatacaaa

SEQ ID NO: 29190 - DNA, 3398 bp, Homo sapiens
  source 1..3398: mol_type = unassigned DNA
gtgtaagacactgaagacactgcagagcaaggtgcttattccagaggcgttacaaaacatggagattaaagaccagggagcccaaatggagccgctgctgcctacgagaaatgatgaagaagcagttgtggatagaggtggaactcgttctattctcaaaacacactttgagaaagaagatttagaaggtcatcgaacactatttattggagtacatgtgcccttgggaggaagaaaaagccatcgacgtcacaggcatcgtggtcataaacacagaaagagagacagagaaagagattcaggattagaggatggaagggagtcaccttcttttgacaccccatcacagagggtacagtttattcttggaaccgaggatgatgacgaggaacacattcctcatgaccttttcacagaactggatgagatttgttggcgtgaaggtgaggacgctgagtggcgagaaacagccaggtggttgaagtttgaagaagatgtggaagatggaggagaaaggtggagcaagccttatgtggctactctttcattgcacagcttgtttgaattgagaagttgtattctgaatggaactgtgttgctggacatgcatgccaacactttagaagaaattgcagatatggttcttgaccaacaagtgagctcaggtcagctgaatgaagatgtacgccatagggtccatgaggcattgatgaaacagcatcatcatcagaatcagaaaaaactcaccaacaggattcccattgttcgttcctttgctgatattggcaagaaacagtcagaaccaaattccatggacaaaaatgcaggtcaggttgtttctcctcagtctgctccagcctgtgttgaaaataaaaatgatgttagcagagaaaacagcactgttgactttagcaagggactgggaggccaacaaaaggggcatactagtccatgtgggatgaaacaaaggcatgaaaaaggacctccacaccagcaagagagagaggttgatctgcattttatgaaaaagattcctccaggtgctgaagcatcgaacatcttagtgggagaactggagttcttggatcgaacagtagttgcgtttgtcaggttgtctccagctgtattgcttcaaggactggctgaagtcccaatcccaaccagatttttgttcattcttctgggacccctgggaaagggtcaacagtaccatgagattggcagatcaattgcaaccctaatgacagatgaggtatttcatgatgttgcctataaagctaaagatcgtaatgacttggtatcaggaattgatgagtttctggatcaggttactgttctccctcctggagaatgggatccaagcattcgaatagagcctcccaaaaatgttccttcccaggagaagaggaagattcctgctgtaccaaatggaacagcagctcatggggaagcagagccccacggaggacatagtggacctgaactccagcgaactggaaggatttttgggggacttattttagatatcaaaagaaaagctccatacttctggagtgacttcagagatgctttcagcctgcagtgcttagcatcttttctatttctctactgcgcgtgtatgtctcctgtcatcacgtttggaggactgctgggagaagcaactgaagggcgtataagtgcaattgaatctctctttggagcatccatgaccgggatagcctattctctctttggtggacagcctcttaccatattaggcagtacaggaccagttttggtgtttgaaaagattttgtttaaattttgcaaagaatatgggctgtcatacctatctttaagagctagcattggactttggactgcaactctatgtatcatacttgtggccacagatgctagttcccttgtctgctacatcactcggtttactgaagaagcttttgcttccctgatttgcatcattttcatttatgaggccctggagaagttgtttgaactcagtgaagcatatccaatcaacatgcataatgatctggaactgctgacacaatactcgtgtaactgtgtggaaccgcataatcccagcaatggcacattgaaggaatggagggaatccaatatttctgcctctgacataatttgggagaacctaactgtgtcagaatgcaaatcattgcatggagagtatgttggacgggcctgtggccatgatcacccatatgttccagatgttctattttggtctgtgatcctgttcttttccacagttactctgtcagccaccctgaagcagttcaagactagcagatattttccaaccaaggttcgatccatagtgagtgactttgctgtctttcttacaattctgtgtatggttttaattgactatgccattgggatcccatctccaaaactacaagtaccaagtgttttcaagcccactagagatgatcgtggctggtttgttacgcctttaggtccaaacccatggtggacagtaatagctgctataattccagctctgctttgtactattctaatttttatggaccaacagattacagctgtcatcatcaacaggaaagagcataagctaaagaaaggttgtgggtaccatctggacctattaatggtggctgtcatgctcggtgtatgctccatcatgggcctgccatggtttgtggctgccacagtcctctccatcactcatgtcaatagcctaaaactggaatcagaatgctcagctccaggagaacaacccaaatttctcggcattcgggagcaaagggttactgggcttatgatttttattcttatgggttcatcagtctttatgaccagtattctgaagtttattcccatgccagtgctatatggagtgtttctttatatgggtgcttcatctctaaagggaattcagttctttgataggataaagctcttctggatgccggcaaaacatcaaccagattttatatacctaaggcacgtaccgcttcgaaaagtgcatctcttcacaattattcagatgagttgccttggccttttgtggataataaaagtttcaagagctgctattgtctttcccatgatggtgttagccctggtatttgtaagaaagttgatggacttgttgttcacgaagcgggaactcagctggttggatgatttgatgcccgagagtaagaaaaagaaactggaagatgctgaaaaagaacattgaaagccgaaaagagaagaaagctgactcagggaaaggtgttgacagggagacttgtctatgactcgatcttcaatttattttttacatatatatgagaagagtgtcacaattattaataaaactgctttgatcatgtattgtaaattctgtccctcaacccaaatccaccttcata

SEQ ID NO: 29191 - DNA, 5551 bp, Homo sapiens
  source 1..5551: mol_type = unassigned DNA
gatccgaatactaagcagagcgagtgccgggctgagtgtaagacactgaagacactgcagagcaaggtgcttattccagaggcgttacaaaacatggagattaaagaccagggagcccaaatggagccgctgctgcctacgagaaatgatgaagaagcagttgtggatagaggtggaactcgttctattctcaaaacacactttgagaaagaagatttagaaggtcatcgaacactatttattggagtacatgtgcccttgggaggaagaaaaagccatcgacgtcacaggcatcgtggtcataaacacagaaagagagacagagaaagagattcaggattagaggatggaagggagtcaccttcttttgacaccccatcacagagggtacagtttattcttggaaccgaggatgatgacgaggaacacattcctcatgaccttttcacagaactggatgagatttgttggcgtgaaggtgaggacgctgagtggcgagaaacagccaggtggttgaagtttgaagaagatgtggaagatggaggagaaaggtggagcaagccttatgtggctactctttcattgcacagcttgtttgaattgagaagttgtattctgaatggaactgtgttgctggacatgcatgccaacactttagaagaaattgcagatatggttcttgaccaacaagtgagctcaggtcagctgaatgaagatgtacgccatagggtccatgaggcattgatgaaacagcatcatcatcagaatcagaaaaaactcaccaacaggattcccattgttcgttcctttgctgatattggcaagaaacagtcagaaccaaattccatggacaaaaatgcaggtcaggttgtttctcctcagtctgctccagcctgtgttgaaaataaaaatgatgttagcagagaaaacagcactgttgactttagcaagggactgggaggccaacaaaaggggcatactagtccatgtgggatgaaacaaaggcatgaaaaaggacctccacaccagcaagagagagaggttgatctgcattttatgaaaaagattcctccaggtgctgaagcatcgaacatcttagtgggagaactggagttcttggatcgaacagtagttgcgtttgtcaggttgtctccagctgtattgcttcaaggactggctgaagtcccaatcccaaccagatttttgttcattcttctgggacccctgggaaagggtcaacagtaccatgagattggcagatcaattgcaaccctaatgacagatgaggtatttcatgatgttgcctataaagctaaagatcgtaatgacttggtatcaggaattgatgagtttctggatcaggttactgttctccctcctggagaatgggatccaagcattcgaatagagcctcccaaaaatgttccttcccaggagaagaggaagattcctgctgtaccaaatggaacagcagctcatggggaagcagagccccacggaggacatagtggacctgaactccagcgaactggaaggatttttgggggacttattttagatatcaaaagaaaagctccatacttctggagtgacttcagagatgctttcagcctgcagtgcttagcatcttttctatttctctactgcgcgtgtatgtctcctgtcatcacgtttggaggactgctgggagaagcaactgaagggcgtataagtgcaattgaatctctctttggagcatccatgaccgggatagcctattctctctttggtggacagcctcttaccatattaggcagtacaggaccagttttggtgtttgaaaagattttgtttaaattttgcaaagaatatgggctgtcatacctatctttaagagctagcattggactttggactgcaactctatgtatcatacttgtggccacagatgctagttcccttgtctgctacatcactcggtttactgaagaagcttttgcttccctgatttgcatcattttcatttatgaggccctggagaagttgtttgaactcagtgaagcatatccaatcaacatgcataatgatctggaactgctgacacaatactcgtgtaactgtgtggaaccgcataatcccagcaatggcacattgaaggaatggagggaatccaatatttctgcctctgacataatttgggagaacctaactgtgtcagaatgcaaatcattgcatggagagtatgttggacgggcctgtggccatgatcacccatatgttccagatgttctattttggtctgtgatcctgttcttttccacagttactctgtcagccaccctgaagcagttcaagactagcagatattttccaaccaaggttcgatccatagtgagtgactttgctgtctttcttacaattctgtgtatggttttaattgactatgccattgggatcccatctccaaaactacaagtaccaagtgttttcaagcccactagagatgatcgtggctggtttgttacgcctttaggtccaaacccatggtggacagtaatagctgctataattccagctctgctttgtactattctaatttttatggaccaacagattacagctgtcatcatcaacaggaaagagcataagctaaagaaaggttgtgggtaccatctggacctattaatggtggctgtcatgctcggtgtatgctccatcatgggcctgccatggtttgtggctgccacagtcctctccatcactcatgtcaatagcctaaaactggaatcagaatgctcagctccaggagaacaacccaaatttctcggcattcgggagcaaagggttactgggcttatgatttttattcttatgggttcatcagtctttatgaccagtattctgaagtttattcccatgccagtgctatatggagtgtttctttatatgggtgcttcatctctaaagggaattcagttctttgataggataaagctcttctggatgccggcaaaacatcaaccagattttatatacctaaggcacgtaccgcttcgaaaagtgcatctcttcacaattattcagatgagttgccttggccttttgtggataataaaagtttcaagagctgctattgtctttcccatgatggtgttagccctggtatttgtaagaaagttgatggacttgttgttcacgaagcgggaactcagctggttggatgatttgatgcccgagagtaagaaaaagaaactggaagatgctgaaaaagaagaagaacaaagtatgctagctatggaagatgagggcacagtacaactcccattggaagggcactatagagatgatccatctgtgatcaatatatctgatgaaatgtcaaagactgccttgtggaggaaccttctgattactgccgataactcaaaagataaggagtcaagctttccttccaaaagctccccttcctaatcactctagaagctgattccccaaagcattgaaagccgaaaagagaagaaagctgactcagggaaaggtgttgacagggagacttgtctatgactcgatcttcaatttattttttacatatatatgagaagagtgtcacaattattaataaaactgctttgatcatgtattgtaaattctgtccctcaacccaaatccaccttcatactgtaagtagtgcaatacttgtttcatttctgtgtttaaacttctgagcagtgagacatccctgtgagcagatacaatagccaatgcaagaatctgtgtgttccttgctgtacgttagacatttgtaaactggattctgattgtcagttttatgagagcaatagcttccttaaagagataagtcatatttacctagtttgtattttcctactttagtgacctgaagatgcctgataatttcattcagaagaatttttgaaaggtagtcttacttctttttagtttttatagcttagcattagtgacttatttcaaaagacccaaatcaaaaagttagtttgaaagcattttttaataattgtatttatgcatttccttgatttaatatgataaatttaatacttaacaatttatatgtaactaaaacttaaagtcatttgaaaaatatatagaaacctatttacaacttgttaaggacaatcagacataatgcagagttaagtagtatttgcttaaaattcaagttgtgactaatgatcaaatactaggcttgtacgaaatgctttagaaaaactttgtaacagttttgtgggatttttcaatataaacctttatcagaaatatactaagtttgtctcccactgacaacagatgttttccaaataaacatattctatacatacttgtggaatgccacatggtgaatcattgtatatgaaattccactcctgtacagttactctgcagctaatggtcatgcactgcttaatgctggtcctgaatcatgttctcatgttagaccaacagctctccaattgtcattttttttctgcagagttttttttttccacttttaaattaaatgcatgttgtggaaaaacagtcttttaaaatgaaatttcagattccatttgagaaggttctgtagatatttcagtccatataaaataatacatctttactaaacttatataaggggagagaaagttatgaagttttggacattactaaaagtacagtatttgatttcactttcaatgaatgtgaagttaataaaactaaatctcataatgctcttggttcctaagaatgagtagtaatcatcaactttataatactccaatattccgttttataataattcagagccctgtggcttttacacaccgttaattatgtactctgttggaagtgcacatgaaaagtgaagaaaagttcctcttgtgattaaactaatgggaggaaataaatcaacaaagtctccattaagttctacattttgagaccttttaaaaattcccctcacaattctttaaggagcccccctttttatggaacatgagcctaaaaattatagaaagaagaattttaagttaataaagtttgtatttataaatgctgaaaaaatacagaaactttctgttccaaatgtgttgcctttgtgtattttataatacagatactacattgtaaacatttccattgttttatgatttagccagtgattccccaaagcagcctcttagtgttttaatatattaataactgttttgttaaaaatgatcatagtgaatttaaatcttcacatgatcacctatttgaataagcaatcatatccaatgaaattctgtatttctgagtatttttatagtcattttgttcttgtgtgaattttaaagctatccctatgttaatcctaatattttgaaatcatataaaatataataaaaatgtagtattatatatttacttctaatttcagattcctggtcaaaattactaaatatcttgaatgtaatttagtgccaagtttaaataatgtgtaaatgtgactaggatattgtgtttttcacaattaagaaatgttatgtggaaataaatatttatcctaact

SEQ ID NO: 29192 - DNA, 3411 bp, Homo sapiens
  source 1..3411: mol_type = unassigned DNA
gatccgaatactaagcagagcgagtgccgggctgagtgtaagacactgaagacactgcagagcaaggtgcttattccagaggcgttacaaaacatggagattaaagaccagggagcccaaatggagccgctgctgcctacgagaaatgatgaagaagcagttgtggatagaggtggaactcgttctattctcaaaacacactttgagaaagaagatttagaaggtcatcgaacactatttattggagtacatgtgcccttgggaggaagaaaaagccatcgacgtcacaggcatcgtggtcataaacacagaaagagagacagagaaagagattcaggattagaggatggaagggagtcaccttcttttgacaccccatcacagagggtacagtttattcttggaaccgaggatgatgacgaggaacacattcctcatgaccttttcacagaactggatgagatttgttggcgtgaaggtgaggacgctgagtggcgagaaacagccaggtggttgaagtttgaagaagatgtggaagatggaggagaaaggtggagcaagccttatgtggctactctttcattgcacagcttgtttgaattgagaagttgtattctgaatggaactgtgttgctggacatgcatgccaacactttagaagaaattgcagatatggttcttgaccaacaagtgagctcaggtcagctgaatgaagatgtacgccatagggtccatgaggcattgatgaaacagcatcatcatcagaatcagaaaaaactcaccaacaggattcccattgttcgttcctttgctgatattggcaagaaacagtcagaaccaaattccatggacaaaaatggtcaggttgtttctcctcagtctgctccagcctgtgttgaaaataaaaatgatgttagcagagaaaacagcactgttgactttagcaaggttgatctgcattttatgaaaaagattcctccaggtgctgaagcatcgaacatcttagtgggagaactggagttcttggatcgaacagtagttgcgtttgtcaggttgtctccagctgtattgcttcaaggactggctgaagtcccaatcccaaccagatttttgttcattcttctgggacccctgggaaagggtcaacagtaccatgagattggcagatcaattgcaaccctaatgacagatgaggtatttcatgatgttgcctataaagctaaagatcgtaatgacttggtatcaggaattgatgagtttctggatcaggttactgttctccctcctggagaatgggatccaagcattcgaatagagcctcccaaaaatgttccttcccaggagaagaggaagattcctgctgtaccaaatggaacagcagctcatggggaagcagagccccacggaggacatagtggacctgaactccagcgaactggaaggatttttgggggacttattttagatatcaaaagaaaagctccatacttctggagtgacttcagagatgctttcagcctgcagtgcttagcatcttttctatttctctactgcgcgtgtatgtctcctgtcatcacgtttggaggactgctgggagaagcaactgaagggcgtataagtgcaattgaatctctctttggagcatccatgaccgggatagcctattctctctttggtggacagcctcttaccatattaggcagtacaggaccagttttggtgtttgaaaagattttgtttaaattttgcaaagaatatgggctgtcatacctatctttaagagctagcattggactttggactgcaactctatgtatcatacttgtggccacagatgctagttcccttgtctgctacatcactcggtttactgaagaagcttttgcttccctgatttgcatcattttcatttatgaggccctggagaagttgtttgaactcagtgaagcatatccaatcaacatgcataatgatctggaactgctgacacaatactcgtgtaactgtgtggaaccgcataatcccagcaatggcacattgaaggaatggagggaatccaatatttctgcctctgacataatttgggagaacctaactgtgtcagaatgcaaatcattgcatggagagtatgttggacgggcctgtggccatgatcacccatatgttccagatgttctattttggtctgtgatcctgttcttttccacagttactctgtcagccaccctgaagcagttcaagactagcagatattttccaaccaaggttcgatccatagtgagtgactttgctgtctttcttacaattctgtgtatggttttaattgactatgccattgggatcccatctccaaaactacaagtaccaagtgttttcaagcccactagagatgatcgtggctggtttgttacgcctttaggtccaaacccatggtggacagtaatagctgctataattccagctctgctttgtactattctaatttttatggaccaacagattacagctgtcatcatcaacaggaaagagcataagctaaagaaaggttgtgggtaccatctggacctattaatggtggctgtcatgctcggtgtatgctccatcatgggcctgccatggtttgtggctgccacagtcctctccatcactcatgtcaatagcctaaaactggaatcagaatgctcagctccaggagaacaacccaaatttctcggcattcgggagcaaagggttactgggcttatgatttttattcttatgggttcatcagtctttatgaccagtattctgaagtttattcccatgccagtgctatatggagtgtttctttatatgggtgcttcatctctaaagggaattcagttctttgataggataaagctcttctggatgccggcaaaacatcaaccagattttatatacctaaggcacgtaccgcttcgaaaagtgcatctcttcacaattattcagatgagttgccttggccttttgtggataataaaagtttcaagagctgctattgtctttcccatgatggtgttagccctggtatttgtaagaaagttgatggacttgttgttcacgaagcgggaactcagctggttggatgatttgatgcccgagagtaagaaaaagaaactggaagatgctgaaaaagaagaagaacaaagtatgctagctatggaagatgagggcacagtacaactcccattggaagggcactatagagatgatccatctgtgatcaatatatctgatgaaatgtcaaagactgccttgtggaggaaccttctgattactgccgataactcaaaagataaggagtcaagctttccttccaaaagcattgaaagccgaaaagagaagaaagctgactcagggaaaggtgttgacagggagacttgtctatga

SEQ ID NO: 29193 - DNA, 1841 bp, Homo sapiens
  source 1..1841: mol_type = unassigned DNA
gcaattgcctcctgcttcagagctacctgatccgaatactaagcagagcgagtgccgggctgagtgtaagacactgaagacactgcagagcaaggtgcttattccagaggcgttacaaaacatggagattaaagaccagggagcccaaatggagccgctgctgcctacgagaaatgatgaagaagcagttgtggatagaggtggaactcgttctattctcaaaacacactttgagaaagaagatttagaaggtcatcgaacactatttattggagtacatgtgcccttgggaggaagaaaaagccatcgacgtcacaggcatcgtggtcataaacacagaaagagagacagagaaagagattcaggattagaggatggaagggagtcaccttcttttgacaccccatcacagagggtacagtttattcttggaaccgaggatgatgacgaggaacacattcctcatgaccttttcacagaactggatgagatttgttggcgtgaaggtgaggacgctgagtggcgagaaacagccaggtggttgaagtttgaagaagatgtggaagatggaggagaaaggtggagcaagccttatgtggctactctttcattgcacagcttgtttgaattgagaagttgtattctgaatggaactgtgttgctggacatgcatgccaacactttagaagaaattgcagatatggttcttgaccaacaagtgagctcaggtcagctgaatgaagatgtacgccatagggtccatgaggcattgatgaaacagcatcatcatcagaatcagaaaaaactcaccaacaggattcccattgttcgttcctttgctgatattggcaagaaacagtcagaaccaaattccatggacaaaaatgcaggtcaggttgtttctcctcagtctgctccagcctgtgttgaaaataaaaatgatgttagcagagaaaacagcactgttgactttagcaagggactgggaggccaacaaaaggggcatactagtccatgtgggatgaaacaaaggcatgaaaaaggacctccacaccagcaagagagagaggttgatctgcattttatgaaaaagattcctccaggtgctgaagcatcgaacatcttagtgggagaactggagttcttggatcgaacagtagttgcgtttgtcaggttgtctccagctgtattgcttcaaggactggctgaagtcccaatcccaaccaggtatttcatgatgttgcctataaagctaaagatcgtaatgacttggtatcaggaattgatgagtttctggatcaggttactgttctccctcctggagaatgggatccaagcattcgaatagagcctcccaaaaatgttccttcccaggagaagaggaagattcctgctgtaccaaatggaacagcagctcatggggaagcagagccccacggaggacatagtggacctgaactccagcgaactggaaggtcaccaatatccggtatcttcgcttctccagagttcttccacagattctgttgctgacatgacttgaagtatccattactcatctgctctcctggagttgctggtgtacatctgggctgctcttgcactgttctctgatttttgggggacttattttagatatcaaaagaaaagctccatacttctggagtgacttcagagatgctttcagcctgcagtgcttagcatcttttctatttctctactgcgcgtgtatgtctcctgtcatcacgtttggaggactgctgggagaagcaactgaagggcgtataagtgcaattgaatctctctttggagcatccatgaccgggatagcctattctctc

SEQ ID NO: 29194 - DNA, 3094 bp, Homo sapiens
  source 1..3094: mol_type = unassigned DNA
ctttctccctagggtggcgtgggttgcatccctcggaagagcgaaggaatgagccaggtcggggggcggggagacaggtgcacacaggaggtccagggcttggtccatggggctggtgacctttctgcttcccttgcagaaaactctcccaccatgtcgcagaatggatacttcgaggattcaagctactacaagtgtgacacagatgacaccttcgaagcccgagaggagatcctgggggatgaggccttcgacactgccaactcctccatcgtgtctggcgagagtatccgtttttttgtcaatgtcaaccttgagatgcaggccaccaacactgagaatgaagcgacttccggtggctgtgtgctcctgcacacctcccgaaagtacctgaagttaaagaacttcaaggaagagatccgtgcgcaccgcgacctagatggcttcctggcgcaggccagcatcgtcctgaacgagacggccacctccctggataacgtgctgcggaccatgcttcgccgcttcgccagggaccctgacaacaatgagcccaactgcaacctggacctgctcatggccatgctcttcaccgatgccggggcacccatgcggggtaaagtccacctgctgtcagataccatccaaggggtcaccgccacagtgacaggggtgcggtaccagcagtcgtggctctgcatcatctgtaccatgaaggccctacagaagcggcacgtgtgcatcagccgcctggttcgcccacagaactggggggagaattcctgtgaggttcggttcgtcatcctggtgctggccccacccaagatgaaaagcactaagactgcgatggaggtggcgcgcacgtttgccaccatgttctcggatatcgccttccgccagaagctcctggagacccgcacagaggaggaattcaaggaggccttggtgcatcagagacagctgctcaccatggtgagccacggtccagtggcgccgagaacgaaggaacgcagcacagtctccctccctgcccacagacacccagagcccccaaagtgcaaggactttgtcccttttgggaagggcatccgggaggacatcgcacgcaggttccccttgtaccccttggacttcactgatggcattattgggaaaaacaaggctgtgggcaaatacatcaccaccaccctgttcctctacttcgcctgcctcctgcccaccatcgctttcgggtctctcaatgacgagaacacagacggggccatcgacgtgcagaagaccatagccgggcagagcatcgggggcctgctctacgcgctcttctctgggcagccattggtgattctgctgaccaccgcgcccctggcgctctacatccaggtgattcgtgtcatctgtgatgactatgacctggacttcaactccttctacgcatggacgggcctgtggaatagtttcttccttgcgctttatgcctttttcaacctcagcctggtcatgagtctcttcaagaggtcgacggaggagatcatcgccctcttcatttccatcacgtttgtgctggatgccgtcaagggcacggttaaaatcttctggaagtactactatgggcattacttggacgactatcacacaaaaaggacttcatcccttgtcagcctgtcaggcctcggcgccagcctcaacgccagcctccacactgccctcaacgccagcttcctcgccagccccacggagctgccctcggccacacactcaggccaggcgaccgccgtgctcagcctcctcatcatgctgggcacgctctggctgggctacaccctctaccaattcaagaagagcccctacctgcacccctgcgtgcgagagatcctgtccgactgcgccctgcccatcgcggtgctcgccttctccctcatcagctcccatggcttccgggaaatcgagatgagcaagttccgctacaaccccagcgagagcccctttgcgatggcgcagatccagtcgctgtccctgagggccgtcagcggtgccatgggcctcggcttcctgctgtccatgctcttcttcatcgagcagaacttggtggccgccttggtgaatgcaccggagaacaggctggtgaagggcactgcctaccactgggacctcctgctcctcgccatcatcaacacagggctgtctctgtttgggctgccttggatccatgccgcctacccccactccccgctgcacgtgcgagccctggccttagtggaggagcgtgtggagaacggacacatctatgacacgattgtgaacgtgaaggagacgcggctgacctcgctgggcgccagcgtcctggtgggcctgtccctgttgctgctgccggtcccgcttcagtggatccccaagcccgtgctctatggcctcttcctctacatcgcgctcacctccctcgatggcaaccagctcgtccagcgcgtggccctgctgctcaaggagcagactgcgtaccccccgacacactacatccggagggtgccccagaggaagatccactacttcacgggcctgcaggtgcttcagctgctgctgctgtgtgccttcggcatgagctccctgccctacatgaagatgatctttcccctcatcatgatcgccatgatccccatccgctatatcctgctgccccgaatcattgaagccaagtacttggatgtcatggacgctgagcacaggccttgactggcagaccctgcccacgccccattcgccagccctccacgtcctcccaggctggctctggagctgtgaggggaggtgtaggtgtgtgggtgactgctctgtgctgcgccttctcatggctgactcaggcctggggcatctgggcattgtaggggtgcagtggtatgtgcccacccctctcccattatcctttagctttaggccaagagcgttgctcagggcagcttctgcccagggtgggtgggactgagcaggatggattttcttttgataaaagagtcgatgcctgaaagagaaaccatttccttgattgtgtaaggaacttgctggacgcacattagagaataaagctcctgtttctaggctccta

SEQ ID NO: 29195 - DNA, 3229 bp, Homo sapiens
  source 1..3229: mol_type = unassigned DNA
cttccaggcggccgggacgcggtcccaggactggagaccgttgcctgtcggcccccgtgtgacccggggcgcgtgacgggggtcgggggaactgcgcctgcaatgggcgtttatggcccccaggaccggtctgagagtgagaagagggatgtgcagagagatcccccgccttggcatccgaggagagagggggagaggcccgctcgggcccggtcccttcctctcgctgcagcggggcagggttttctcaggaaaacctggattagcgaacatgaaaactctcccaccatgtcgcagaatggatacttcgaggattcaagctactacaagtgtgacacagatgacaccttcgaagcccgagaggagatcctgggggatgaggccttcgacactgccaactcctccatcgtgtctggcgagagtatccgtttttttgtcaatgtcaaccttgagatgcaggccaccaacactgagaatgaagcgacttccggtggctgtgtgctcctgcacacctcccgaaagtacctgaagttaaagaacttcaaggaagagatccgtgcgcaccgcgacctagatggcttcctggcgcaggccagcatcgtcctgaacgagacggccacctccctggataacgtgctgcggaccatgcttcgccgcttcgccagggaccctgacaacaatgagcccaactgcaacctggacctgctcatggccatgctcttcaccgatgccggggcacccatgcggggtaaagtccacctgctgtcagataccatccaaggggtcaccgccacagtgacaggggtgcggtaccagcagtcgtggctctgcatcatctgtaccatgaaggccctacagaagcggcacgtgtgcatcagccgcctggttcgcccacagaactggggggagaattcctgtgaggttcggttcgtcatcctggtgctggccccacccaagatgaaaagcactaagactgcgatggaggtggcgcgcacgtttgccaccatgttctcggatatcgccttccgccagaagctcctggagacccgcacagaggaggaattcaaggaggccttggtgcatcagagacagctgctcaccatggtgagccacggtccagtggcgccgagaacgaaggaacgcagcacagtctccctccctgcccacagacacccagagcccccaaagtgcaaggactttgtcccttttgggaagggcatccgggaggacatcgcacgcaggttccccttgtaccccttggacttcactgatggcattattgggaaaaacaaggctgtgggcaaatacatcaccaccaccctgttcctctacttcgcctgcctcctgcccaccatcgctttcgggtctctcaatgacgagaacacagacggggccatcgacgtgcagaagaccatagccgggcagagcatcgggggcctgctctacgcgctcttctctgggcagccattggtgattctgctgaccaccgcgcccctggcgctctacatccaggtgattcgtgtcatctgtgatgactatgacctggacttcaactccttctacgcatggacgggcctgtggaatagtttcttccttgcgctttatgcctttttcaacctcagcctggtcatgagtctcttcaagaggtcgacggaggagatcatcgccctcttcatttccatcacgtttgtgctggatgccgtcaagggcacggttaaaatcttctggaagtactactatgggcattacttggacgactatcacacaaaaaggacttcatcccttgtcagcctgtcaggcctcggcgccagcctcaacgccagcctccacactgccctcaacgccagcttcctcgccagccccacggagctgccctcggccacacactcaggccaggcgaccgccgtgctcagcctcctcatcatgctgggcacgctctggctgggctacaccctctaccaattcaagaagagcccctacctgcacccctgcgtgcgagagatcctgtccgactgcgccctgcccatcgcggtgctcgccttctccctcatcagctcccatggcttccgggaaatcgagatgagcaagttccgctacaaccccagcgagagcccctttgcgatggcgcagatccagtcgctgtccctgagggccgtcagcggtgccatgggcctcggcttcctgctgtccatgctcttcttcatcgagcagaacttggtggccgccttggtgaatgcaccggagaacaggctggtgaagggcactgcctaccactgggacctcctgctcctcgccatcatcaacacagggctgtctctgtttgggctgccttggatccatgccgcctacccccactccccgctgcacgtgcgagccctggccttagtggaggagcgtgtggagaacggacacatctatgacacgattgtgaacgtgaaggagacgcggctgacctcgctgggcgccagcgtcctggtgggcctgtccctgttgctgctgccggtcccgcttcagtggatccccaagcccgtgctctatggcctcttcctctacatcgcgctcacctccctcgatggcaaccagctcgtccagcgcgtggccctgctgctcaaggagcagactgcgtaccccccgacacactacatccggagggtgccccagaggaagatccactacttcacgggcctgcaggtgcttcagctgctgctgctgtgtgccttcggcatgagctccctgccctacatgaagatgatctttcccctcatcatgatcgccatgatccccatccgctatatcctgctgccccgaatcattgaagccaagtacttggatgtcatggacgctgagcacaggccttgactggcagaccctgcccacgccccattcgccagccctccacgtcctcccaggctggctctggagctgtgaggggaggtgtaggtgtgtgggtgactgctctgtgctgcgccttctcatggctgactcaggcctggggcatctgggcattgtaggggtgcagtggtatgtgcccacccctctcccattatcctttagctttaggccaagagcgttgctcagggcagcttctgcccagggtgggtgggactgagcaggatggattttcttttgataaaagagtcgatgcctgaaagagaaaccatttccttgattgtgtaaggaacttgctggacgcacattagagaataaagctcctgtttctaggctccta

SEQ ID NO: 29196 - DNA, 1020 bp, Homo sapiens
  source 1..1020: mol_type = unassigned DNA
gtcgccgagtttggggtccagaagcgccggagcgccgcgtgaggagcccggccgtgagtgcgcgagtgtgccatggccgcggccaccaggcgcgtgttccatctgcagccgtgcgaaaactctcccaccatgtcgcagaatggatacttcgaggattcaagctactacaagtgtgacacagatgacaccttcgaagcccgagaggagatcctgggggatgaggccttcgacactgccaactcctccatcgtgtctggcgagagtatccgtttttttgtcaatgtcaaccttgagatgcaggccaccaacactgagaatgaagcgacttccggtggctgtgtgctcctgcacacctcccgaaagtacctgaagttaaagaacttcaaggaagagatccgtgcgcaccgcgacctagatggcttcctggcgcaggccagcatcgtcctgaacgagacggccacctccctggataacgtgctgcggaccatgcttcgccgcttcgccagggaccctgacaacaatgagcccaactgcaacctggacctgctcatggccatgctcttcaccgatgccggggcacccatgcggggtaaagtccacctgctgtcagataccatccaaggggtcaccgccacagtgacaggggtgcggtaccagcagtcgtggctctgcatcatctgtaccatgaaggccctacagaagcggcacgtgtgcatcagccgcctggttcgcccacagaactggggggagaattcctgtgaggttcggttcgtcatcctggtgctggccccacccaagatgaaaagcactaagactgcgatggaggtggcgcgcacgtttgccaccatgttctcggatatcgccttccgccagaagctcctggagacccgcacagaggaggaattcaaggaggccttggtgcatcagagacagctgctcaccatggtgagccacggtccagtggcgccgagaacgaaggaacgcagcacagtctccctccctgcccacagacacccagag

SEQ ID NO: 29197 - DNA, 3101 bp, Homo sapiens
  source 1..3101: mol_type = unassigned DNA
gtgtcgccggctcccgccgccggcccgcccgagtcgccgagtttggggtccagaagcgccggagcgccgcgtgaggagcccggccgtgagtgcgcgagtgtgccatggccgcggccaccaggcgcgtgttccatctgcagccgtgcgaaaactctcccaccatgtcgcagaatggatacttcgaggattcaagctactacaagtgtgacacagatgacaccttcgaagcccgagaggagatcctgggggatgaggccttcgacactgccaactcctccatcgtgtctggcgagagtatccgtttttttgtcaatgtcaaccttgagatgcaggccaccaacactgagaatgaagcgacttccggtggctgtgtgctcctgcacacctcccgaaagtacctgaagttaaagaacttcaaggaagagatccgtgcgcaccgcgacctagatggcttcctggcgcaggccagcatcgtcctgaacgagacggccacctccctggataacgtgctgcggaccatgcttcgccgcttcgccagggaccctgacaacaatgagcccaactgcaacctggacctgctcatggccatgctcttcaccgatgccggggcacccatgcggggtaaagtccacctgctgtcagataccatccaaggggtcaccgccacagtgacaggggtgcggtaccagcagtcgtggctctgcatcatctgtaccatgaaggccctacagaagcggcacgtgtgcatcagccgcctggttcgcccacagaactggggggagaattcctgtgaggttcggttcgtcatcctggtgctggccccacccaagatgaaaagcactaagactgcgatggaggtggcgcgcacgtttgccaccatgttctcggatatcgccttccgccagaagctcctggagacccgcacagaggaggaattcaaggaggccttggtgcatcagagacagctgctcaccatggtgagccacggtccagtggcgccgagaacgaaggaacgcagcacagtctccctccctgcccacagacacccagagcccccaaagtgcaaggactttgtcccttttgggaagggcatccgggaggacatcgcacgcaggttccccttgtaccccttggacttcactgatggcattattgggaaaaacaaggctgtgggcaaatacatcaccaccaccctgttcctctacttcgcctgcctcctgcccaccatcgctttcgggtctctcaatgacgagaacacagacggggccatcgacgtgcagaagaccatagccgggcagagcatcgggggcctgctctacgcgctcttctctgggcagccattggtgattctgctgaccaccgcgcccctggcgctctacatccaggtgattcgtgtcatctgtgatgactatgacctggacttcaactccttctacgcatggacgggcctgtggaatagtttcttccttgcgctttatgcctttttcaacctcagcctggtcatgagtctcttcaagaggtcgacggaggagatcatcgccctcttcatttccatcacgtttgtgctggatgccgtcaagggcacggttaaaatcttctggaagtactactatgggcattacttggacgactatcacacaaaaaggacttcatcccttgtcagcctgtcaggcctcggcgccagcctcaacgccagcctccacactgccctcaacgccagcttcctcgccagccccacggagctgccctcggccacacactcaggccaggcgaccgccgtgctcagcctcctcatcatgctgggcacgctctggctgggctacaccctctaccaattcaagaagagcccctacctgcacccctgcgtgcgagagatcctgtccgactgcgccctgcccatcgcggtgctcgccttctccctcatcagctcccatggcttccgggaaatcgagatgagcaagttccgctacaaccccagcgagagcccctttgcgatggcgcagatccagtcgctgtccctgagggccgtcagcggtgccatgggcctcggcttcctgctgtccatgctcttcttcatcgagcagaacttggtggccgccttggtgaatgcaccggagaacaggctggtgaagggcactgcctaccactgggacctcctgctcctcgccatcatcaacacagggctgtctctgtttgggctgccttggatccatgccgcctacccccactccccgctgcacgtgcgagccctggccttagtggaggagcgtgtggagaacggacacatctatgacacgattgtgaacgtgaaggagacgcggctgacctcgctgggcgccagcgtcctggtgggcctgtccctgttgctgctgccggtcccgcttcagtggatccccaagcccgtgctctatggcctcttcctctacatcgcgctcacctccctcgatggcaaccagctcgtccagcgcgtggccctgctgctcaaggagcagactgcgtaccccccgacacactacatccggagggtgccccagaggaagatccactacttcacgggcctgcaggtgcttcagctgctgctgctgtgtgccttcggcatgagctccctgccctacatgaagatgatctttcccctcatcatgatcgccatgatccccatccgctatatcctgctgccccgaatcattgaagccaagtacttggatgtcatggacgctgagcacaggccttgactggcagaccctgcccacgccccattcgccagccctccacgtcctcccaggctggctctggagctgtgaggggaggtgtaggtgtgtgggtgactgctctgtgctgcgccttctcatggctgactcaggcctggggcatctgggcattgtaggggtgcagtggtatgtgcccacccctctcccattatcctttagctttaggccaagagcgttgctcagggcagcttctgcccagggtgggtgggactgagcaggatggattttcttttgataaaagagtcgatgcctgaaagagaaaccatttccttgattgtgtaaggaacttgctggacgcacattagagaataaagctcctgtttctaggctcct

SEQ ID NO: 29198 - DNA, 1480 bp, Homo sapiens
  source 1..1480: mol_type = unassigned DNA
acaaacagagcttggttttagccagggcgcccactgcagtcacgctggagacctctggtgcagatgggcgagactggacccagctttccagctttcttcccctttccataattctcctgaaagtgtaagcactggcctgtgtttgtggaggtgaaagaccttttgacattggtgccgcccctggtgggcctgaaggggaacctggagatgacactggcatccagactctccacagctgccaacactggacaaattgatgacccccaggagcagcacagagtcatcagcagcaacctggccctcatccaggtgcaggccactgtcgtggggctcttggctgctgtggctgcgctgctgttgggcgtggtgtctcgagaggaagtggatgtcgccaaggtggagttgctgtgtgccagcagtgtcctcactgccttccttgcagcctttgccctgggggtgctgatggtctgtatagtgattggtgctcgaaagctcggggtcaacccagacaacattgccacgcccattgcagccagcctgggagacctcatcacactgtccattctggctttggttagcagcttcttctacagacacaaagatagtcggtatctgacgccgctggtctgcctcagctttgcggctctgaccccagtgtgggtcctcattgccaagcagagcccacccatcgtgaagatcctgaagtttggctggttcccaatcatcctggccatggtcatcagcagtttcggaggactcatcttgagcaaaaccgtttctaaacagcagtacaaaggcatggcgatatttacccccgtcatatgtggtgttggtggcaatctggtggccattcagaccagccgaatctcaacctacctgcacatgtggagtgcacctggcgtcctgcccctccagatgaagaaattctggcccaacccgtgttctactttctgcacgtcagaaatcaattccatgtcagctcgagtcctgctcttgctggtggtcccaggccatctgattttcttctacatcatctacctggtggagggtcagtcagtcataaacagccagacctttgtggtgctctacctgctggcaggcctgatccaggtgacaatcctgctgtacctcgcagaagtgatggttcggctgacttggcaccaggccctggatcctgacaaccactgcatcccctaccttacagggctgggggacctgctcggtactggcctcctggcactctgctttttcactgactggctactgaagagcaaggcagagctgggtggcatctcagaactggcatctggacctccctaactgggccccgctggtcccatttgctcattagaatttcctctcacatcagtgggatacagaattcagtttctcccttgccaggtccttgggatggttgacccctgcctctgcagtagccttttgtgagtctgctaaggtagctctcacacacctcggctct

SEQ ID NO: 29199 - DNA, 4997 bp, Homo sapiens
  source 1..4997: mol_type = unassigned DNA
ccaccggcagccaaccagttgggcccgagtccgcgggcaagaagcgattgggggcgcgtgagctcggctccccggtcccccgtccgggtgcccccccgccgggcccgaagcgatatatcctgccctccccggccacctcccccgcgtggaagcggagcggcggcctcgctgtaacgcagaagcgaaatgtagcgagccgggtgtcgcggctggacgctcgccttggctgggggtgtgggggggcacgccgggggccaaggaggactgtcgaggaggagtgatgagaagagggggtgccctgcaccccccgagaccacgggccacgctgccacttgccaggcgccccccttcctcccaggcgaggggcaggtgttccacactgattctcgtgactttaaggaccagggatttgaagaggtattagctcttcccaggaagggaggaagtttctggaagagaagggaaagacggcagacgctgcgctgggaccagcagagcctgaggagctgtgggaagctgacagagcccagccaaaggagcgggaaggagccgcagccccaggctggcactgtgttctgaaagatttgaactcaagctgctttttacggaagaggggccacttcagagggcaccccagaatttggttgagctcttctactctggatgccccctgctctgaggagcctgccactgagaaccaaagaagataagaggacagatactttttcttcaagcacagagctggtgggttggagtcaggcatctgcacccctagtggctgtctggtgaggaatttcttgtttcttcccagcttgcggcttcagtgcttgatggggctgcctgttggtggatcagtttttgcagtgcctggtaggagtggagagccgtgggaagaggtcctgcggcgcccaagcctgggttcaccccaagactaagttctttcccaagttagagaagaagagagaaagcaaaaagaagagaggaaagttctcccttcccctcctccgtgcctgtcatgtcctctaagccagagccgaaggacgtccaccaactgaacgggactggcccttctgcctctccctgctcttcagatggcccagggagagagcccttggctgggacctcagagttcctggggcctgatggggctggggtagaggtggtgattgagtctcgggccaacgccaagggggttcgggaggaggacgccctgctggagaacgggagccagagcaacgaaagtgacgacgtcagcacagaccgtggccctgcgccaccttccccgctcaaggagacctccttttccatcgggctgcaagtactgtttccattcctcctggcaggctttgggaccgtggctgctggcatggtgttggacatcgtgcagcactgggaagtcttccagaaggtgacagaggtcttcatcctagtgcctgcgctgctggggctcaaagggaacctggaaatgaccctggcatcaaggctttccactgcagccaacattggacacatggacacacccaaggagctctggcggatgatcactgggaacatggccctcatccaggtgcaggccacggtggtgggcttcctggcgtccatcgcagccgtcgtctttggctggatccctgatggccacttcagtattccgcacgccttcctgctctgtgctagcagcgtggccacagccttcattgcctccctggtactgggtatgatcatgattggagtcatcattggctctcgcaagattgggatcaacccagacaacgtggccacacccattgctgccagcctgggcgacctcatcaccttggcgctgctctcaggcatcagctggggactctacctggaactgaatcactggcgatacatctacccactggtgtgtgctttctttgtggccctgctgcctgtctgggtggtgctggcccgacgaagtccagccacaagggaggtgttgtactcgggctgggagcctgttatcattgccatggccatcagcagtgtgggaggcctcatcttggacaagactgtctcagaccccaactttgctgggatggctgtcttcacgcctgtgattaatggtgttgggggcaatctggtggcagtgcaggccagccgcatctccaccttcctgcacatgaatggaatgcccggagagaactctgagcaagctcctcgccgctgtcccagtccttgtaccaccttcttcagccctgatgtgaattctcgctcagcccgggtcctcttcctcctcgtggtcccaggacacctggtgttcctctacaccatcagctgtatgcagggcgggcacaccaccctcacactcatcttcatcatcttctatatgacagctgcactgctccaggtgctgattctcctgtacatcgcagactggatggtgcactggatgtggggccggggcctggacccggacaacttctccatcccatacttgactgctctgggggacctgcttggcactgggctcctagcactcagcttccatgttctctggctcataggggaccgagacacggatgtcggggactagcttggtcactcaacattttccccatccctctgcactttctatttgaaatttttcttttgttcccctgtccctcctccaccccacactcccacctctttctaggacttcactttgataccaaattctcattattttcaatgggaatttttatacattgagccaagtttgtatagcaagaatttgggaaacacagatggcctgagataagcagtacaagtaggtttttgagacaatcaccaagtgcagtttcatggtgggtgcctccaggtgatgtggactggagcaggggagttttgtctggaatctggggacatggggtttggctttagcaacctgtcttggccctaatgagaaaccctttgtaagtgggctctggatttttggttttgttttctttttatctgttttgttttatttttggttttggttgaacagagggacagaagaataagtaacactcccaaacacagacatacttttgtagaagtggaccaacttcaaagctctggacaggagacacctgctccaggcccctgtgatcccagttctgttctcttgccctctggacctaagcgttcccactcgcagaaagagtaaggtggactgacttttcaatttgtgcacatgcctcttgttcaatggcctggtcaacatcaacaacccctccctctgatcatttccagttgattgtcatatccaggaaaaaatggaacagtgcactcttctccctgttgacccatgtccacctattggttccccaaaatccacattctccctgggcccaaatgactttgtctccctgggcccagattctttgtctctcttcaaccttcatctcaaattgtctctaagcactaccttccccagagcttgccaggttgggttttgagattagggtcaggtcatgggtatgtggagaatggtttggaggttgaggacaaccacaggtgtctcattgctgccatttctcctgaggacataatcacttggtcaccttggaccctgtcacttcctaaaattactcgttctgtcatgccatagaggtcagttttcctctttcttggcttctacccacaaacattcaccaatcatttattcgttcatttagcaaatatgcagcctccgcaagatgagctctcctgcagacaagcatggtctgaaacattctttgagcaatatttattgagtgcctactatgtgttaggtactgtgccaggcactgataagccagtggtaagggaaacacagctctaacctcacctcattctccaggttacaaaggccatgtgcccctttgaatctggcagagaaagtttcctcgttgtaagtatttgcatctacttcaagccagattcttctgcctctttctcctttccagacccctactctgtgcagtgctgaccacagctagagccaccgccccattgctcaaccagtatttatttccctaaacgacccttcctcacattcccttccctccacctctccttaccaagcacccaaaagaggatttagaactagcagggtggacatcatctggttgtttctacttttctctgcctagcacaaaattgggagaaaactggagcctccatccgcagtcacacgtgtacagatctggggatttggatgtaggctttttctaacttctctctcagaagcttctacagaaacccttccatctgtagcctcaagggcccacctccaagggaaggcttaggcaatgatcctgtttctaccaacactgcaccttatcccaggaacctgccctagacctccagagaccatattttctctccctccatttctacccagacctccaggcctccttctggaatcatagaaccgtagaattggaaggaattttagaggttttctagttggagttgtgtccaacagaattcattaacaccagcctgggcttgtttttcctcctccctctggacttttttcatcttttcctccacctcaaaaaatacttacacacagattcttcttgtacaggcatcaaaaccaactcctctgcccctaaggctgtgtccctgtggtctccagccacccctaccccagtcactcgccccttcctcatctctggaatttggccaggcagtcccagaagactctggagtgacctcctttgcctaaaaagcagacagataggcatgccccaggccctgagtgagcagaggaggactgtagggtgagagggaaagaaaatgaaggtgactttcatggaagtttcatttcttttccccgattgtaccaactgcatgtacttttggcctggctgcaaggagcaatattggtttactctcgtatccttaaaaagttacagaactgtgtcttaagagaattatttatagttactataactgaattgacaaatgtcaacttaactgataaattatatttggtaaaataaagaggacgtttatttaga

SEQ ID NO: 29200 - DNA, 4449 bp, Homo sapiens
  source 1..4449: mol_type = unassigned DNA
gtggaaatattttctacacaatgaagtcaacaacttaatttaaaccagtgtttgtgcggttctgattcatctgctgtggttcccgaagcttgagatctaaggagtacagggtcttttgtgatgacaatatgactaatagtaaaggaagatctattaccgataaaacaagtggtggtccaagtagtggaggaggttttgtagattggactttacgtttaaacacaattcaatccgacaagtttttaaatttactcttgagtatggttccagtgatttaccagaaaaaccaagaagacaggcacaaaaaagcaaacggcatttggcaagatggattatcaactgcagtacagacttttagtaatagatctgagcaacacatggagtatcacagtttctcagagcagtcttttcatgccaataatgggcacgcatcatcaagctgcagccaaaagtatgatgactatgccaattataattactgtgatggaagggagacttcagaaaccactgccatgttacaagatgaagatatatctagtgatggtgatgaagatgctattgtagaagtgaccccaaaattaccaaaggaatccagtggcatcatggcattgcaaatacttgtgccctttttgctagctggttttggaacagtttcagctggcatggtactggatatagtacagcactgggaggtgttcagaaaagttacagaagttttcattttagtccctgcacttcttggtctcaaagggaacttggaaatgacattggcatccagattatccactgcagtaaatattgggaagatggattcacccattgaaaagtggaacctaataattggcaacttggctttaaagcaggttcaggcaacagtagtgggttttctagcagctgtggcagcaattatattgggctggattccagaaggaaaatattaccttgatcattccatacttctgtgctctagcagtgtggcaactgccttcattgcatctcttctgcagggaataataatggttggggttatcgttggttcaaagaagactggtataaatcctgataatgttgctacacccattgctgctagttttggcgaccttataactcttgccatattggcttggataagtcagggcttatactcctgtcttgagacctattactacatttctccattagttggtgtatttttcttggctctaacccctatttggattataatagctgccaaacatccagccacaagaacagttctccactcaggctgggagcctgtcataacagctatggttataagtagcattgggggccttattctggacacaactgtatcagacccaaacttggttgggattgttgtttacacgccagttattaatggtattggtggtaatttggtggccattcaggctagcaggatttctacctacctccatttacatagcattccaggagaattgcctgatgaacccaaaggttgttactacccatttagaactttctttggtccaggagtaaataataagtctgctcaagttctactgcttttagtgattcctggacatttaattttcctctacactattcatttgatgaaaagtggtcatacttctttaactataatcttcatagtagtgtatttatttggcgctgtgttacaggtatttaccttgctgtggattgctgactggatggtccatcacttctggaggaaaggaaaggacccggatagtttctccatcccctacctaacagcattgggtgatctgctcgggacagctctgttagccttaagttttcattttctttggcttattggagatcgagatggagatgttggagactaataaattctacaaactgctctcaagttaccaaggaagaaaatacacgacaaccacttatggctctttttcaaaactcttaaatcagtagtttgacttttgccagggtaatcttcagttggccctgattcaattaaatggccttaatttttttttaaggaatttgtgtcaaaaccagaatgaagagtattcgtgctgcttttcatagaataaatgataatttgacatagacatagatataagttccagctctgaaattaattaggaaagaatataggatgtttacagtgaataattttaaaaccacaaacatagcagaaatgtactttattattaaatttgtaatgcaggattagaagaagcagagctctagtttagcctttcttgtctcacagatgtgctgtatcccaggcatactataaaacgaagagtgcccaaccaagctttgaatcgtattaacaatgcccacctctatgctagctgaggataaatttaccagttgctcatatttaaactgacctaaatatgttttgctgagcataagataaactcacttttacctccatctaaaattatcctgttctgatgccaattcaatttcagctctgcaagttcttgtcaggctaatctttaaacattgagtgatcttgagagattgttaatgaaagcagtgagtcattttttgatgattgatttgttggaaaaatgttgatgtgttttaaaaaatgtaatcttcaaaaacagaatataacctgagatgcatttgtagagacaagacggtacgagaatgtgtgtgtgtgtgtgtgtgagagagagagacttttgatgaagaactaaatcttggattgctgatagcaaagatcatagtgctgttggaatatcagcaatatagagttattcttaaacacattctattaacatgtttttgtcattgggtccaaaaattttgctgctgaccagaatttactatttgttacctatattctttttttttttttttttttttttttttgagacagagtcttgctctgtcgcccaggctggaatgcagtggtgtgatctcggctcactgctacctccacctcctggattcaagtgattctcctgcctcagcctcccgagtagctgggattacaggaatgcgccacaacgcccagctaatttgttacctacactctaattaataattaataatttcttattttaaaaagtagtactatttaatataatcaagataggagatttaaaatgagcaagtgattcatttgctcttttaaagaagcccgttgacttacgcttttaaaaaagaagttggtgggttacctcaattattgttcatgcttaaacatatccatttgtacaggcttatttctacgtgggacccaatcatatatactatatttctcaaataatttttctaaaactctggcctatattctaaacacttgaccaacaccttagttattgaataggtaaccatttttaaagtacatgtggttcattttttaaaattcaatctctcaagaccgttagatatttaataatttaagctgataagggtatcaaaatgcacattaactttgatcatcatgatttaagttgtaactttgtgttattatataaatattaggttgtttataaatatattgcagaaagtattcttgttaagctcttttaaatgaggggactgtggtttagagttatatatttttgcttatttttaaacttcaattattccattcttctgccttataataaaacttttaaggcagagaactgaactaattatagaatttctcctttggagagttataatgttacatagtgaacattcttataaaagaaagaataagtttaagttgatgaatatttagctgcaaagattttttacttaaaaaaatccatgaatatctttgattttattataaagcatttgtaaattatttgcatttgagctgtaagattcataaacatttacatttcccaatgatttctattttgatttttaaaaaatatacagggcaagctacatttttaaagcattaatcaacaactttattatattacacattccagtgcacaaacacacaatatcatttaatactcacagtagtacctgtgaaatatatcagatggatattcctatctctattttacagcagaggaaaccgaaattcagagaacttacatttctaaggttgtacagctgcaaaatgaccaaattgtgaagtccctaacatccaggttttcataatgccagtactctttctatgacatgtttatgaccctccaaatgtaccaaaactacctaactaattcactgagaggaagccaactgcaaaaataggatttttaaaagtacaatagagtattactacattttatggatttcagacaaagaaacctccgtttattatatcctgatggtgagtattgccagctctaaattattcatatttctaagaccaaggaaaatataggtaaatgaaaattttgaaataaagaacaatgccttaatttgtaaaatctatcattgctaccaccctgcccaggtctggccatttgccataaatgctggtaaataaatacaatgactgataga

SEQ ID NO: 29201 - DNA, 571 bp, Homo sapiens
  source 1..571: mol_type = unassigned DNA
gatcagtggtaaaagaagttacgaacagttcataaaagatccagtccttctgtggaacttctgaacatcttttattagtggaaatattttctacacaatgaagtcaacaacttaatttaaaccagtgtttgtgcggttctgattcatctgctgtggttcccgaagcttgagatctaaggagtacagggtcttttgtgatgacaatatgactaatagtaaaggaagatctattaccgataaaacaagtggtggtccaagtagtggaggaggttttgtagattggactttacgtttaaacacaattcaatccgacaagtttttaaatttactcttgagtatggttccagtgatttaccagaaaaaccaagaagacaggcacaaaaaagcaaacggcatttggcaagatggattatcaactgcagtacagacttttagtaatagatctgagcaacacatggagtatcacagtttctcagagcagtcttttcatgccaataatgggcacgcatcatcaagctgcagccaaaagtatgatgactatgccaattataattactgtgatggaagggag

SEQ ID NO: 29202 - DNA, 702 bp, Homo sapiens
  source 1..702: mol_type = unassigned DNA
gctgtcagcttggggccgcagccgcgcgaggaggcgcgggagcaggaaggagctgtgggctgggagccgctgtcctccccgccaccaccggtgccgggcaccagatccagtccttctgtggaacttctgaacatcttttattagtggaaatattttctacacaatgaagtcaacaacttaatttaaaccagtgtttgtgcggttctgattcatctgctgtggttcccgaagcttgagatctaaggagtacagggtcttttgtgatgacaatatgactaatagtaaaggaagatctattaccgataaaacaagtggtggtccaagtagtggaggaggttttgtagattggactttacgtttaaacacaattcaatccgacaagtttttaaatttactcttgagtatggttccagtgatttaccagaaaaaccaagaagacaggcacaaaaaagcaaacggcatttggcaagatggattatcaactgcagtacagacttttagtaatagatctgagcaacacatggagtatcacagtttctcagagcagtcttttcatgccaataatgggcacgcatcatcaagctgcagccaaaagtatgatgactatgccaattataattactgtgatggaagggagacttcagaaaccactgccatgttacaagatgaagatatatctagtgatggtgatgaagatgctat

SEQ ID NO: 29203 - DNA, 563 bp, Homo sapiens
  source 1..563: mol_type = unassigned DNA
agtctgcaagaaacatgacctcagccaaaaagaggccgctggtctgagaagagaaatcatgagtcatggattcgggggttcggaccttggagcaggcgatcctcttctcatgtagacggctttcttccaagtggtggtgatgatggtggtggtagaaggagctttgtgaggaggaagacacagtgacagaaagtttcagaattaagtcattccaaaggaaagtcttcccccaaaggccttcccctctgaaatagccctatccagtccttctgtggaacttctgaacatcttttattagtggaaatattttctacacaatgaagtcaacaacttaatttaaaccagtgtttgtgcggttctgattcatctgctgtggttcccgaagcttgagatctaaggagtacagggtcttttgtgatgacaatatgactaatagtaaaggaagatctattaccgataaaacaagtggtggtccaagtagtggaggaggttttgtagattggactttacgtttaaacacaattcaatccgacaagtttttaaatttactcttgagtatggtt

SEQ ID NO: 29204 - DNA, 590 bp, Homo sapiens
  source 1..590: mol_type = unassigned DNA
gctgtcagcttggggccgcagccgcgcgaggaggcgcgggagcaggaaggagctgtgggctgggagccgctgtcctccccgccaccaccggtgccgggcaccaggtgaatgccccttccatcccccgcccctggtgtctcggtctggtctgaggagacggggacccttctcacaccggccgctgccgccgccgcgctccggaacagatccagtccttctgtggaacttctgaacatcttttattagtggaaatattttctacacaatgaagtcaacaacttaatttaaaccagtgtttgtgcggttctgattcatctgctgtggttcccgaagcttgagatctaaggagtacagggtcttttgtgatgacaatatgactaatagtaaaggaagatctattaccgataaaacaagtggtggtccaagtagtggaggaggttttgtagattggactttacgtttaaacacaattcaatccgacaagtttttaaatttactcttgagtatggttccagtgatttaccagaaaaaccaagaagacaggcacaaaaaagcaaacggcatttggcaagatggattatcaactgcag

SEQ ID NO: 29205 - DNA, 564 bp, Homo sapiens
  source 1..564: mol_type = unassigned DNA
cagcttggggccgcagccgcgcgaggaggcgcgggagcaggaaggagctgtgggctgggagccgctgtcctccccgccaccaccggtgccgggcaccaggtgaatgccccttccatcccccgcccctggtgtctcggtctggtctgaggagacggggacccttctcacaccggccgctgccgccgccgcgctccggaacagatcctcttctcatgtagacggctttcttccaagtggtggtgatgatggtggtggtagaaggagctttgtgaggaggaagacacagtgacagaaagtttcagaattaagtcattccaaaggaaagtcttcccccaaaggccttcccctctgaaatagccctatccagtccttctgtggaacttctgaacatcttttattagtggaaatattttctacacaatgaagtcaacaacttaatttaaaccagtgtttgtgcggttctgattcatctgctgtggttcccgaagcttgagatctaaggagtacagggtcttttgtgatgacaatatgactaatagtaaaggaagatctattaccgataaa

SEQ ID NO: 29206 - DNA, 685 bp, Homo sapiens
  source 1..685: mol_type = unassigned DNA
agggggccgcgggcgccgacggccgggctgtcagcttggggccgcagccgcgcgaggaggcgcgggagcaggaaggagctgtgggctgggagccgctgtcctccccgccaccaccggtgccgggcaccagatcctcttctcatgtagacggctttcttccaagtggtggtgatgatggtggtggtagaaggagctttgtgaggaggaagacacagtgacagaaagtttcagaattaagtcattccaaaggaaagtcttcccccaaaggccttcccctctgaaatagccctatccagtccttctgtggaacttctgaacatcttttattagtggaaatattttctacacaatgaagtcaacaacttaatttaaaccagtgtttgtgcggttctgattcatctgctgtggttcccgaagcttgagatctaaggagtacagggtcttttgtgatgacaatatgactaatagtaaaggaagatctattaccgataaaacaagtggtggtccaagtagtggaggaggttttgtagattggactttacgtttaaacacaattcaatccgacaagtttttaaatttactcttgagtatggttccagtgatttaccagaaaaaccaagaagacaggcacaaaaaagcaaacggcatttggcaagatggattatcaactgcagtacagactttt

SEQ ID NO: 29207 - DNA, 574 bp, Homo sapiens
  source 1..574: mol_type = unassigned DNA
actatgcgctgctgggccgaaagacacgtggttcggttttaactccagtctgcaagaaacatgacctcagccaaaaagaggccgctggtctgagaagagaaatcatgagtcatggattcggggatccagtccttctgtggaacttctgaacatcttttattagtggaaatattttctacacaatgaagtcaacaacttaatttaaaccagtgtttgtgcggttctgattcatctgctgtggttcccgaagcttgagatctaaggagtacagggtcttttgtgatgacaatatgactaatagtaaaggaagatctattaccgataaaacaagtggtggtccaagtagtggaggaggttttgtagattggactttacgtttaaacacaattcaatccgacaagtttttaaatttactcttgagtatggttccagtgatttaccagaaaaaccaagaagacaggcacaaaaaagcaaacggcatttggcaagatggattatcaactgcagtacagacttttagtaatagatctgagcaacacatggagtatcacagtttctcagagcagtcttttca

SEQ ID NO: 29208 - DNA, 1797 bp, Homo sapiens
  source 1..1797: mol_type = unassigned DNA
cggctcccagccccccgggcccccggcggggctctgcgctgccggagcttgggcgtctgctgctgtcccggagcgccaagtcgtccgaggtccggccgcccggccggggcggggccagggaggcccggccttcccgcttcctgcctgagccgcaggcccgcccctgcgtcctccgcccgcctctttcccgccgccgcctgggaggggacccgggctgccaggcgcccagctgtgcccagatggatgggacagagacccggcagcggaggctggacagctgtggcaagccaggggagctggggcttcctcaccccctcagcacaggaggactccctgtagcctcagaagatggagctctcagggcccctgagagccaaagcgtgacccccaagccactggagactgagcctagcagggagaccacctggtccataggccttcaggtgaccgtgcccttcatgtttgcaggcctgggactgtcctgggccggcatgcttctggactatttccagcactggcctgtgtttgtggaggtgaaagaccttttgacattggtgccgcccctggtgggcctgaaggggaacctggagatgacactggcatccagactctccacagctgccaacactggacaaattgatgacccccaggagcagcacagagtcatcagcagcaacctggccctcatccaggtgcaggccactgtcgtggggctcttggctgctgtggctgcgctgctgttgggcgtggtgtctcgagaggaagtggatgtcgccaaggtggagttgctgtgtgccagcagtgtcctcactgccttccttgcagcctttgccctgggggtgctgatggtctgtatagtgattggtgctcgaaagctcggggtcaacccagacaacattgccacgcccattgcagccagcctgggagacctcatcacactgtccattctggctttggttagcagcttcttctacagacacaaagatagtcggtatctgacgccgctggtctgcctcagctttgcggctctgaccccagtgtgggtcctcattgccaagcagagcccacccatcgtgaagatcctgaagtttggctggttcccaatcatcctggccatggtcatcagcagtttcggaggactcatcttgagcaaaaccgtttctaaacagcagtacaaaggcatggcgatatttacccccgtcatatgtggtgttggtggcaatctggtggccattcagaccagccgaatctcaacctacctgcacatgtggagtgcacctggcgtcctgcccctccagatgaagaaattctggcccaacccgtgttctactttctgcacgtcagaaatcaattccatgtcagctcgagtcctgctcttgctggtggtcccaggccatctgattttcttctacatcatctacctggtggagggtcagtcagtcataaacagccagacctttgtggtgctctacctgctggcaggcctgatccaggtgacaatcctgctgtacctcgcagaagtgatggttcggctgacttggcaccaggccctggatcctgacaaccactgcatcccctaccttacagggctgggggacctgctcggttcaagctccgtgggccacactgctgctgtgccaagaaggtgtacagcctccccaggatggggcctcatacaacccttcatctgcactcaacatttaatcgtgtccttgctgtctttttattttcctttttgtttgttagcaaaaacctctatttagatttcaataatcagagaagtgtaaaataaaacag
